United States Patent Application Publication US 2026/0103690 A1 - sequence listing, part 5

SEQ ID NO: 6938 - DNA, 1322 bp, unidentified
  source 1..1322: mol_type = unassigned DNA; note = element_ac87252
  misc_feature 1..2: note = core
  misc_feature 3..73: note = LE
  misc_feature 74..1108: note = CDS
  misc_feature 1109..1322: note = RE
  misc_feature 1094..1316: note = bridgeRNA
ttaataagatggttcccctcgctttcccagccgctagactggggagtgagacctcccaacaaggagaaccatcatgtctactatcaaagtccttggtatcgatttaggcaagtcttctttccatttaattggtcgcgatcaccgtgatcagaacatcctccgcaagaaattctcccgtgccaaagtcattgagtttatcgctcagctaccgccgtgcctgattgcctttgaagcctgtggcggtgcccactggctggcccggcagtgtttgaaacacggccaccgggtgcgtttgctgccgccgcagttcgtcaggccctacgtgaagggcaataaaaacgactttattgacgccgatgccatcgcggaagcctgtggtcgaccgggcatgcactttgtgccggttaaatccgaggaggcgcagatgctggcggtctgccatcgcctgcgcgagggttttgtttcagagcgcacaaggctgatgtgccgcataggcgcgatcctgttggagtttggtcttgccctacccagagggcacgcgaccatgaagcacctgttccagtggttggccaccaaaaaagacgagttaccgccggcgctgatacaggagctgcaggttgctcatgaccattataagcagctcaatgagcgcataacggagcaagatcgtaagatccaggagtcggttaaacaggatgaacgctgccagttgttgaaaagcatccctggcgtgggtgacatgatcgccagccagctggtgatgacggtgggatctgggcagcagtttcgacaggggcgcgagatggcggcctggctggggttggtgccgagacagtattcgacggggggcaagccgaagctgctgggcatcagtaagcgcggcaataaaaagctgcgctgcctaatgatccacggagcgcgatcggtgctgtcgcggttgagtgatggcaatcggccgttcgatgcatggctgagaaagttgcgggcgaacaagccgttcaatgtagctgtggtggcactggcgaataagttggcaagaatagcctgggcggtgctgagcagcgccaagcccttcgacgcgaaagagttacaaccgggtttgcagtgacagagagtgatgacgaaagcgggtcaaccggccagatggagaacctgacacaaaaaacagtcgtttaagactgtcggctttttgaggaccatccggcgcggatactcatcgtggagcgggaagtgaaagcctcccaaccaagactccgaatacattagcgcagaccaacctcgccatcgcacactgttgttgcaatcgcgaggggaaccataca

SEQ ID NO: 6939 - DNA, 1296 bp, unidentified
  source 1..1296: mol_type = unassigned DNA; note = element_ac87ee2
  misc_feature 1: note = core
  misc_feature 2..207: note = LE
  misc_feature 208..1185: note = CDS
  misc_feature 1186..1296: note = RE
  misc_feature 34..198: note = bridgeRNA
ttatatattcaataggactttgtaaatttgcaaaaattatcaatatctcgagtggaagaagaccgatcccgcgtttgtcataaagaccgtgcccgatgtttagtccccactcatttttacattaaaaactggatagttcaatgggcattgaccccgcatttataatggaagttcatgatgtaaagatgttgattaaatagttactacatgaaatatataggtatcgatgtaagcaaaacgacattcgttgttgcttattcctcggagaagagtagcaaaacatgtgtttttgcaaacactgcggttggtataaagaagtttatgaaaactatcgacccgtcagtgcatcattgtgtgatggaagccactggtaattacagtatgctccttgtctatttactctctaaagcaggttacgtagtgagtatggaaaatccgctcaaagtcaagaactttgcacgtacaatactttcagtcattaagactgatgaagtagatgcacggctgatagctatgtatggcgaaaggatgcagcctgctccatacaagattaaagatgatgccttgcttaaacttaaacaaaagcgtaccatcttaaggcagctaaagaagcaattgactgctaacaagaatattctggagtcctttgatgtattgcctgtaaaggatcgatcttgtgagagggctctaaagagaaccattgaattccttgagaagcagattaaagctatgacaactgagcttgaggctttttctaatgaaaagttcaaagagcaattggatttacttacttcaatcaaaggtgttggagtgactattgcaactgccctgattgttgcaactggtgcctttacttacttcaatagtgcaaagcaattgacaaggtatttaggattatctccaacctatcagcaatcaggaacctctgtgaagttccgaggacacattaatcgcaatggtgacccttatttgcgtagcaatctatatttagcagcatgttcctccttacgcagcaataaggaatgtatggccttttacaatagaatgaaagctaaagggaaacctgcaaaactggcagtagtagcagtagctaacaaacttgtccggcaggcttttgccgtggttacaaacaacaccccttacgaggatggctttatctcgaaaaacaataaaagctcctgctgagggagcgccatgcggcaaggggctgagcagtcagccccgacgagccctgttaagcttggactacaaacattaataaaattcaaatagaatcatttatattactatagttca

SEQ ID NO: 6940 - DNA, 1461 bp, unidentified
  source 1..1461: mol_type = unassigned DNA; note = element_ac8a7d0
  misc_feature 1: note = core
  misc_feature 2..227: note = LE
  misc_feature 228..1148: note = CDS
  misc_feature 1149..1461: note = RE
  misc_feature 12..235: note = bridgeRNA
ctactagacgattcctccagggccggtgtctggccagacttcgtctaggtgatcggcgggcagctctccatgcggctgcccaccggctgaactggtgtggctctctatcggtcagcggcccgccggtcaccgtgccgaggcgtggctcaagaagggactgccctgctcgtagtagcaatgcccacctcgccgtccaccccgggaacgagcgcaggcgggagtagcacatgcaacacacggagcagatcatcatcggggtcgatccccacaagctgtcggccaccatcgaggtcgtcgaccatcacgagaagttgctcggctcgggacggttcaccaccgaccgggccggctacgccgcgatgcgcaagtacgtcgccgggtggccggaccgggtgtgggcggtcgagggcagcaacggcgccggccgaccgttggcgcagcgactactcgaggacggcgagcgtgtcgtggatgtccccgcgaagctcgccgccagggtccggttgttcgacaccggtcataaccgcaagaccgatgcccgtgacgcgcactcgatcgcggtcgtcgcggtccgcaccacgacgttgcgggtgctgcagctcgacggggagcttgaagccttgcggatgctcactgaccgacgtgaggcactgacccggcgcagggtccagaccgttgaccggctccaggcgttgttggccgaactccttccaggacaggcgaagaaggacatcactaccggtcaggccaaggtcatgctcgcttcggttcggccgcgtgacatcgccgggaagacccgacgacggatcgccgccgaggaactcgcggagctggtcgcggtcgaggccaagatcaagaaggccaccgccgagctcaaagccatcgtgctggcccgcggctcacacctgatggacctgcccggcgtcggccccgtcgtcgcggcccgggtcctggccgacgtcggcgacgtcacccggttcgctgaccgcaaccgcttcgcgtcctggaccggcaccgcacccctggacgcgtcctccggtgagcagaaccggcaccgcttgtcccgggccggcaaccggcggatgaaccacatgatccacatcgccgcgatcagccagatccgcctcgacaccgatggccgcgcctagtaccaacgcaaacgagccgagggcaagaaacccctcgaagcgatcaggtgtttgaagcgaaggatctctgacgccatcttccggcagctcctcgcagatgcgcagatcgatgcggcacagcgagcgtgcgcgggtccgggagggcactgcggggcgactcaagatccagcgcggtcgacctacccccgctcatcgacacttcggatcagccacttcccggacccgcaataccgacgctacgcccagcctcgacgccccggaagacccgcgccgccaagagcctcgtaccagccggttgacaacagaagggagc

SEQ ID NO: 6941 - DNA, 1344 bp, unidentified
  source 1..1344: mol_type = unassigned DNA; note = element_ac958d2
  misc_feature 1..2: note = core
  misc_feature 3..83: note = LE
  misc_feature 84..1100: note = CDS
  misc_feature 1101..1344: note = RE
  misc_feature 1096..1328: note = bridgeRNA
agataattggactcccccacctcccaaggggaagtgaggtaatgtaattgttccgacacaaattatattaaggagagtccaccatgaataatactatcgttggagttgatttagcaaaagatgtcatacaggtgtgtatttacacaagcaataaagtgcagtccaataccgaaatgtcacgccatgaatttctcgaatggctattcaaaacatccagctctacagtgctttttgaagcctgtggcacgtcaaatttctggacacaaaaagcggtggaagctggacatgatgcgcggttgatatcggcgaagctggtatccagtgtcaggcagaatcagaagacagacaagaacgatgcattggcgattgtccaggcatcgttcataccggaaatcagtttcatcaaaggcaaaactaatgagcaacaacaattacaatccatcttgcgcttaagggaacttgccgtaaagcagaaaacagcctctggcaatcagctcaaggcactgctattggagtttaatattcgcgtgagtacgaaaaatggcggcctgggaggagcgattcaatcaacgctagaggatgcacagaatgagctttcaacggcattcagagcagctctgcatgcagcctggcaacaccatttgcaaatcattaaatccattgctacctatgatcggtctctggaggaattggttgagcagcacgaggattgtaaacggcttctcaagctcgaaggggtgggagtgattaacgccgtcaatttgtatatagcgctgggctgtgctgacttgggtagtttcactaaaggaaaagatgcatcagcgtgtattggcttaacgcccatccaacactcaacgggtggcaaggtcaagctgggctcaatcggcagttatgtaaaaaatagtgtgttgcggagtcaacttattacgggagccatggcagtcgttggtcaagtgtgtaaacgaacggctgtcacctccaaagatctgtggatacagcaattagtggcaaggcgaggcaagaaggttgctgcagtcgcattagccaataaaactgtgagaaccgcttttgcgatgctcaccctaggtaccgaatactaagcggtgcttctcgccgcctgaaaagcgtttcaacgataaagatgcacaaacgaagataaacaatcagcgtgttaaatcagttaccaaataagagcctagagctcgttgaacagattagaaaacacgtccgcgtaaatatcaaagagcctgttgtcgcaactctattgagagctcgtacataaaagtacgaatctatttcttcgattgttgtaattttattgttgacacagggggagtccacata

SEQ ID NO: 6942 - DNA, 1838 bp, unidentified
  source 1..1838: mol_type = unassigned DNA; note = element_ac9a76d
  misc_feature 1..3: note = core
  misc_feature 4..238: note = LE
  misc_feature 239..1453: note = CDS
  misc_feature 1454..1838: note = RE
cttatatgttactatttttccagacccttttgagcaagggtcagcaggatacattcctgctcgaaaggcactgccgaggaaagacttgtttctccacacggctcgaccggtactgaaagatcgttcttcctttggcagttttcctgggccaatcgatgattggagggacgtgcttcgagcacccgttatataaggacccgatccccccaggagttgcgctagaaagggaactagaaggatgtggtatgttggattggattgggcagatacccatcatgacgtcgaggtgctggatgaagctggcaagcgcgtgggagcgcggcgctttgcccacagccacgacggcttgaacgagttgaagcagtttttgttgagcattgcggcgtcgcccgaacgtctggcgtgcattgtcgaaacgaaccacggattgctgatcacgttcctgctggaagctggcatcccggtctatcccgtgaacccgaaaagtgtcaatcagttgcgcaaatccgcaggagccaagacggatcaaattgacgcgcatttgctggccaagataggccgccttgagctggccgagctgcgtcgattggagccggacagccccatcgtggccgagctgaaaaccctgacgcgcgatcaggatgcactggtccagacccaaacccgcctggtgaaccagttgacagcctgcctcaaggagtactatcctgccgccttgcacctgtttgccaagttgcagcagcgctccacccttgtctttttgcaaacctactcgacgccccaagcagctcaggccgcttcgcttgaagagatcaccgcgacgttgcgaacaggcaagcatacgaacccgacgcgaggtgcccccaagatcgtggaggaactgcaccgtccccagttggtggccaacgaggtcattgtgcgtgccaagtcgcgcctgatgctgtcgctggtcaaacaactgctggtggtgatcgaggagattgccagctatgaccaggctatcaccaccctttttttgaaccatagcgatcaggcgatctggcgttcgctgccgcgtgcgggcaagcgcctggctccgcgcatgctcgccgagtggggcgatgatcgccgtcgctacgccgatgccgcaagtgtccaggccctggccgggaccgcgccggtgccgttccaaagcggtaattacgccaaagcgcacaaacgctttgcctgcttgaaaccgctgcgcaatgccctgcaccagttcgcctggcaatccaccttgaaagaggcttgggcgctggcctattatcaacggaaacgcgtagagggcaagacccacagtatggcggtccgagccttggccaacgtctgggtgagaatcatctatcggatgtgggagaacaagacctgctatcagaccgcgacgttggaagcggccaagctggcacatgcgccccggcagcacgccgcctgagtccaggtcacgcctcctgggtgtgcccccctgggtgttctcagcgctgcgaggtccctcggaagtcgcgggggagtatgctccaacggagtcgcccaagcggttcccgtcgcgtctgctctgccgaccatgagccgttcccactgaggcacctacctgtccaacgtctgccgcagcccgccaccgcgttcccgactcccggtgtgggttgctgtctacagaccacaccgagtcaaggccgtgcaggaggcgcggttgagctgtgggggcacgctcgtcttggccttgaccggtgtggtagacttgcatcaccacacgggaggcagcttcacccacgctcacctttctttttcctttcccagttttgcctcttgacatagagggt

SEQ ID NO: 6943 - DNA, 1714 bp, unidentified
  source 1..1714: mol_type = unassigned DNA; note = element_ac9b0f7
  misc_feature 1..2: note = core
  misc_feature 3..66: note = LE
  misc_feature 67..1221: note = CDS
  misc_feature 1222..1714: note = RE
  misc_feature 1267..1478: note = bridgeRNA
agatgctatggggcggcggcgaggaaattgcatccatcgtcgctgatgtgaccgatggaggccccaatgcaaaagccgaacgacctgaaccaatcccgtatcgtcctgaaacaggacagcacactgatcgcggtgatcgaaatgagtttgtcgagctggctcgttgccggcatcgtgcctggcgtcgagcgtcagccgttgaagaagcttgcggtcgacgagagcgcattgctgaagctgctcaatcgctggcgtgaggaagcggagaaagcaggacgcaggatcgaacgcattaccgtcgcctttgaggccggccgggacggtttctggctggcgcgctggcttagagcacgcggcatcgaggcccacgttatccacgcatcgagcgtagccgtgtcgcgcgagcaccggcgcgccaagaccgaccgtctcgacaccgagctgctcaagcgcgcctttctcggctggctgcgcggcgagcgagatcactgcaagatggtggcgatcccgactaccaaggacgaagatgccaagcggcccaaccgcgagcgccagagcctcgtcggagagcaaactcggattgtcaaccgaatgaaagcagcgttgatccggctgggcatccgcggcttcaatcccaagctgaagaaggccgccgggcgccttgaagatttgcgcacgcccgagggcgaaccaataccgcccaacacgctagctgagctgcatcgcgacatggagcgccggcggctcgtcagtgatcagatccgccagatcgaggaggcccgcctggagcgtatggagcaggcacccggtgatggaccacacgcgatggtccgactgatcgcccgcgttattggtgttggtatagaaacggcggacatgctggtgcacgaggtcctctcgcggaaattgcgggatcgacgagccgtagcgcgctatgctggtctcactggcgcacccgacgagagcggcagcaaacggcgggagaaagggcttgccaaggcgggcaacgcacgagtacggggcggaatgattcagttggcttggcgctttttgctctttcagaaggacagtgcattggcccagtggtatcggactcgaactgagggtggcagaaaccgcaaaacaataatcgtagctctggcgcgcaaattgctaattgccttgtggcgtctggtaaccactggcgaggttccggctggcgtcgtattgcgagcggcgtgagggagaagacttagaaaagacaagctctcggaggctgacgagcagaacatcgtcagtgtccgatgacgatccgaggtggcggtcacccgaagcaagccatggttttgaaaccggtttcgagaatgggtccgccgccgaggagcttcgccgccgatgcgcatgactgcatcatggtcaggtcgctacggacctaccgaatacaaggttgtggcgcgatgatccgcgcccgatggcaaagctccccctctgatcatcgtcccgactgcaaccagcagtgccgccgtgctcgggcctgtcaaggcgcggcctggaaacgacggagcgtgcggccagggcagagcgacggccgaccttgacaggccctgtgcgcgtcggcctcaacacgtgtgtgggtcggggcgaagaaacgggattccaagtcgaacaaagaaactggaatggaggaagtggagagtggtgtaaaatatatgcttgacttcaaaagccccataca

SEQ ID NO: 6944 - DNA, 1384 bp, unidentified
  source 1..1384: mol_type = unassigned DNA; note = element_aca6af9
  misc_feature 1..2: note = core
  misc_feature 3..82: note = LE
  misc_feature 83..1114: note = CDS
  misc_feature 1115..1384: note = RE
  misc_feature 1142..1372: note = bridgeRNA
tgatgctgtggacggctcccgccaccggcatcacgatgtgccaaagtgcagttgctgttaaccgccaggagggagccgtcctatgaccgaagttaccacgatcggagttgatctcgcgaagaacgtttttcagatccatggcgtcgatgcatcgggccagccggtgatccgccgccagttgaagcgcagccaggtcttgtcgttcttcaagaagcaaccgccctgcctggtcggtatggaagcctgcgccagcggccatcattgggctcgcgaggtctctaagctagggcacgaggtgcgtctgatgccggcgcgctacgtcaagccctacgtcaagcgcaacaagaacgacgcggcggacgcggaagcgatctgcgaggcggtgacgcgcccgaccatgcgcttcgtgcccatcaagacacgtgagcagcagagcgggctgatgcagcaccggacgcgcaagctgttcgtgcgccagcgcaccgctttgatcaacgccatgcgagcccatctggccgagttcggcatcgttgccggggtcggtcgcaatggggtcgagaagctggtacgcctgattgacaagggagatgacgagcgtgtgccgtcagcggcgcgagagtgcctgctggcgctgcgtgatcagcttgaggcggtcaagttcaggatccacgagttagacctgcgtatcctggcctggcatcgctcgagcgaactcagtctgcgtctcggcgagatccccggagtcggcccgttgatcgccaccgctctcattgccagcatccccgatccccatgccttcagatcgggccgtgacgtgtccgcctggatcggtctggtgccgaagcagaactcgaccggtggcaaggagcgcttgggtcacatctcgaaggccggcgaccgctatctgcgatcactgctgatgatcggcgccttctctctgatcaaacgcgccaagcaggcaggcagcacaccgcgaccgtggcttgcggcgctgctggcacggcgaccgacgaaggtcgcagccatcgcgctggccaacaagatcgcccgcatcgcctgggccatgatggtccgcggcacacgatacagcgagcctgcagcccaggccgcttgagatctgcgcgggccaggctcgcgcacccgaggttggaaagggcaacggacagataatgcacccagccggtcgatccggagatcgggacaccccacagtagccattgcagcatcgagactgcgtgcttttgaccgggacccgatctgcggagagcattatggccagcggccatgtgaaagtgccgcatcaacaggccgaacacatggcagcaccgaccagcactgcatcaacgtccaataaatcccttgccaacagggagccgtccacaca

SEQ ID NO: 6945 - DNA, 1587 bp, unidentified
  source 1..1587: mol_type = unassigned DNA; note = element_aca6be3
  misc_feature 1..2: note = core
  misc_feature 3..255: note = LE
  misc_feature 256..1458: note = CDS
  misc_feature 1459..1587: note = RE
  misc_feature 32..275: note = bridgeRNA
ttagtaccataaaagtgtagttgttagagagtaattaactctgacagctgcacttattttattataatataggggagtaattggtctgacgtaactctatttggatcattgcatccgtcaaaaaaaccgttaaccaaccccttattataagcattcgattaagcaggtagggattcgctcccgcgtaactaactaaactggatggtaataagggcggctggaacaattactaatacagtttaaggagattaaaaaatgataagtgtaggtgtagatgtatcgaaaggaaaaagcacagtctgcatacttaaaccttatggagaagtagtgagtagtccttttgagatacatcatgtagaaaaggacatggaagatcttgataatttactgagcaagctggatggagagataaggatagtgatggaggccactggtatttaccatctgcccgtagtgacatttcttcatgacaaaggatatttcgtatctgttgttaatccgttcgcaatgaaaaaatatgcgaaagacaacagcatcaggggagcaaagaccgacagacttgattcaataatgatcgcaaactacggaattgagaaatggtttaagttgcaaagatatgaaggcactgaagaaacctatgctgaactcaaacttttgggacgccgttatcggtactatatggagttacatgtgaaagctttacaggagctgacacatgttctggattatgtgctaccgggaataaagaagatgtttaacagttggaatgaagctaatggaaaagataaactcagcgattttgtagagagatcctggcactttgatttgattacatctatgagtctcgaaaagttcactgaggaatatattgcttgggcaaaagaaaagaaataccacagaagcagatctaaggctgaggcagtctatgaattagcttcaagtggtattcctacactgtcttccagcaccccatcgaccaaaatgttagtacaggaagcagtatcagtattgagggctgtagacagctctctgtctcttattttaacacgaatgcaggaacttgcgaagtccttacctgaatattcggttgttagggaaatgggaggagttggtaacgtccttgcagtgaaacttattgcggagattggagatgtaagaaagctgcacaatgcaaaagcactcatagcatgggctgggattgatccaccaccatatgaatcaggacagttcattggttcaaaacgcaggataacaaagaggggctcatcaacgctcagaaaagtcggatatgaagtgatgagagtgctgaaaagtcactctgctccgaaagatgatgccgtatacaattatattttgaaaaaggaaagtgaaggtaaaagtaaaaaacatgcaaaaattgccggattgaataaattcctgcgtatttattatgcaagggtgatggaagtttaccagtaaaaaagacaaaaatcatctgatgtaattatacagactggaaataacaccagtcttcttgttgtacacaaaaatagattaaggaaataatttaaaaaacctgcttaaaagtacttgacttttgttagcagg

SEQ ID NO: 6946 - DNA, 1377 bp, unidentified
  source 1..1377: mol_type = unassigned DNA; note = element_aca86e1
  misc_feature 1: note = core
  misc_feature 2..78: note = LE
  misc_feature 79..1110: note = CDS
  misc_feature 1111..1377: note = RE
  misc_feature 1144..1367: note = bridgeRNA
tgatggtgtggaacggccctcctcaggcaactgaatttggcgcatacttatgcaagagttcacacagggagcagtttcatgaatacgattgctacgattggtctcgatttggcaaaatcggtatttcaagtccacgctgtggatgccgccggaaaagttgtggtgcgccgagctattcgtcgatctcaacttctagacttttttgaacgaattcctccatgcctcgtcggaatggaagcctgcgctagcgcgcactactggacgcgcgagatcggcaaattcggccaccaggtccgcatcatgcccgcctcctacgtcaaggcttacgtgaagaggaacaaaaccgatgctgcggacgctgaagccatttgcggggccgttacacggccgaccatgcgttttgtcccggtgaagtcggatgccgagcaatccgtcaacatgatgctcaaggctcgtgatctgcttaccaggcagcgtactcagacggtcaatgcgctacgctctcatctcgcagagcttggtatcgtagctggcgcggggtttagagcgagcgccaagctcgtcgagataattcgcgacgataccgatcaacggctgccaccgatcgcccgcattgcattgacggagatcgcggatcagatcgagcgactgaccgagaagatcatgaggctggaaaaggtcatcgtatcgtctgtccgaaaggatgacgtcgcacggcggttgaccagcatcccaggcgtcggcccgattactgctgctgcggtgagggcgctggtgacggatccagctggattccgaaccggtcgggattttgccgcatcggtggggctgacaccgcggtcaaactcaagcggtggaaagcagaaactaggttcgatatcgaagcggggcaatcctcaactgcggagtcttttcatggtgggagcgatggcgattctcaaaatgtcaaaacacggggccgccatgcagccttgggtcgccagtcttttgaagcggaggccattcaaggtcgtcgctgtcgccatggccaacaagacagcccgtatcatctgggctttattgatcaagggcggatgctacgaatcaagatcggcaggattgcacgcatgacatctttataaatttccggagccgcagcgccggaacgactagcaaggtgcaactgaagtgatgaaccaaacgggacgaattccaatgcagatcagaccatgcccctcgttgcgccttagagcgcgtgagttcgattaggcgatccggcattacggaaatcatcatggccagcggttgtgtgaccgcgctgataggccggacatacgaccgcaccgcccgagttggagaataacagcagcagcgtcttgctaaacgggccgttccaca

SEQ ID NO: 6947 - DNA, 1455 bp, unidentified
  source 1..1455: mol_type = unassigned DNA; note = element_aca997d
  misc_feature 1..2: note = core
  misc_feature 3..223: note = LE
  misc_feature 224..1435: note = CDS
  misc_feature 1436..1455: note = RE
  misc_feature 7..222: note = bridgeRNA
ctaataggggcagagccgccaagatagtgcggttcttccgagcctccgaagggtgagcactcaagtcagcagagcgtcggagctctagggctagacggtgcccccgccggcaggtgaggagagatggacgaccggtgggatgttgtgccttgagcactgctctattagctcgtcgctgctctccttcgactcggtatccacgcgtgccaccgaggagatgctgatggtctatgtaggcgtcgactgggccgaagcccaccacgacatttgcgtggtcgatgaggaggggcacgtgcttgccaagcgaagagtcccagaagggctggagggggttggcaagctacacgctctggtcgccgagcacgctgaagatccggcgagcgtggtgattggcatcgaaaccgatcgcggtttgctagtgggctctttggtggccgcgggttaccaggtctatgccatcaaccccttggcctcgagccgctatcgagaccgccatgcgacctcgggtgcgaagtctgattcgggcgatgctcgggtcctggccgacctcgtccgcaccgaccgtcacaagcaccggccgctggccggcgactccaacctcgctgaggcggtccaggtcctggcccgagctcatcagggtttggtctggactcgacagcgccaagccaaccagcttcgcaacgcgctgcgcgagttctaccccggagccctggccgccttcgacgacctcgacgcggccgatacggtggccatcttggagcgagccccgaccccggtccgcggccgcgccctctcccaggccaagattatctccgctctccgtcagggcggccgggcgcgaaacctggaggccaaggcggctcagatccaagcccagttgcgacagcctcagctggaggcgccgacactcatcgccgaagcctacggccatagcgtcgccgccatcgtggccgtcatcaaacagctcaacttgcagatcgcagccctcgagcaggagctggctgcgaattttgaaatgcacccggacgccgagatctacctcagtctgcctggactcggtcttgtcctcggcgcccgggctatggccgagtttggtgatgaccgcactcgcttcctgaatcctaaggctcgcaagaactatgcgggcacagcgcccatcaccaaggcctccggcactcgcaaggtcgttctcgcccgggtggctcgcaaccgccggctcgccgacgcctgttaccaatgggcgttctcagccctcactcgctccgaaggcgcccggcatcgttacgacgtcctccgcgcccgcggccagacacatcatcaggctctgcgcgctctcggtaaccgtctggtcagcatcctccacggctgcctcactaaccgccagatctatagcgagcacctcgcttggctgcatcaatcggagcttgccgcttgacttttccacccgtgggatgt

SEQ ID NO: 6948 - DNA, 1319 bp, unidentified
  source 1..1319: mol_type = unassigned DNA; note = element_acb963d
  misc_feature 1: note = core
  misc_feature 2..67: note = LE
  misc_feature 68..1084: note = CDS
  misc_feature 1085..1319: note = RE
  misc_feature 1086..1313: note = bridgeRNA
taattagatggtacgcccctccattccactaaactcgatagtgtcggggaaaggaaaggtaaccatcatgaacagcacacatattattggtatagatttagcgaaacatgtctttcatctcgttggccatgattgttgtggcagagagacttttcgaaagaagttaaccagacagaaaacccttcagttactttcagtccatgagcctgtcattattgcaatggaggcttgtggtggcagccactggtttgatcgaaaatgccaagagtatggtcatcaggttaagctgattcccgcgcaatacgttaagccttacgtcaaaactcacaagaacgacttcattgatgcagatgctattgctgaagcagccattaggccaaagatgagatttgtttctcccaaaagtgaacaagctcaacttagtatcgttgttcgtaaaattcgttctggttacataaaagaacgaactgcctgtatgaataggattggctccatgcttttggagttcgggatcagctttccaaggggtcatcatcagatgaagaatctttttcagtggttggcagatagtaaagaagtagtgccccctttactaattctcgaattaaggagccagcttgattactacaacctgctaaacaaatggatcaaagagcaggaaggaaaactagaagcgttaaacaaagacaatgagttaatgaccattttacaaagcgtacctgggattgggccaatgacagcttcctgttgcctatcagttgtggcagatcctaaagattttaagaatggccgtaactttgccgcgtggttaggtttggttccatatcagtattccactggaggcaaacctcggatgcttggaatatctaagcgtggaaataaggaacttcgagaactatttattcatgctgcgcgtgcagtcatgtggcgggatacctcggcagaaaaatatttcggcacttggcttattgaattaaaacaacggaaaccattcaatgtggcactcgtcgctttggtcaacaaactagcaagaatctcatggtctgttatggtcactggtaaggtatttgagatcagaacttaatcaaggtttgcagatgataaagaaagatgacaaaacggttagaccaccagattgaggaccttatggacaaaacagcatctacagtgcttacaaacttttgaggataatctggcgcggatctcatcgtagagcgggacggttgatgaagtgaacgtcttataaactctgaatacattgacgcaaaccagctccgttatttttaattatcaacttgcaaaacggggcgtaccataca

SEQ ID NO: 6949 - DNA, 1488 bp, unidentified
  source 1..1488: mol_type = unassigned DNA; note = element_acc84e4
  misc_feature 1..2: note = core
  misc_feature 3..238: note = LE
  misc_feature 239..1468: note = CDS
  misc_feature 1469..1488: note = RE
  misc_feature 7..228: note = bridgeRNA
ctaatgggagtcgagccggcccgttgtggtagatgggttgggtccgagccgccagaggtcgagcactgttgccggcgggcctttgaggtctagagctagatcgtgccgcttctggttggtgggggggcgcaacgactggtgggatggcgtgccgatcgagcactgatccattagcgcggacgtggtctctcctcgtggtggcggacagggtgccggcgcgaaggtggaggagcttgcggtgctgttcatcggtgacgactgggccgaggcccaccacgacgtggagatccaggacgaggccgggcggcggctgactcggcggcggctgcccgaaggggtggccgggatggccgggctgcacgccttggtcgcggacctgctcggcgatggtgagccgggtgaggtcgtggtcggcattgagaccgaccgcggcccgtgggtgcaagcgctggtcgccgccggctaccgggtgtacgcgatcaatccgttgtcggtggcccgctaccgggaacggcacgtggtgtcgggggccaagagcgacgccggggacgcgcacgtgctggcggatctggtccgcacggatcggcagcaccaccggccgatcgccggggacagcgacctggccgaggcggtcaaggtcctggcccgggcgcatcagaacctgatctggtcccggcggcggcaggccaacatgctgcgctcgacgctacgcgagttctaccccgccgcgttggccgcattcgacgagatcgccggccgggatgccctggccgtgctgcagatcgccccgaccccggccctcggccgggcgctgtcccgggcgaagattgccgcggcgttgcgccgcgccggccggcaacgcaacatcgacgcgcgggccgaccagatccaggccgtgctgcgcaacgaccagctcgccgcgctgcccgcggtcgagctcgcgttcgggcacaccgtgaccgcgctggtccgggtgctggccgaactgtcacggcagatcgacaccctggaaggtgagctggtcgcccattttgaccggcacccggacgccgagatcctgcgctcccagcccggcctgggagccatcctcgccgcccgggtgctcgccgagttcggcgacgacccaacccggttcgccgacgcccgcgcccgccgcaactacgccgcaaccagtccgatcacccgcgcgtccggcacccgccgcgtcgtgctcacccgggtggcctgcaacaaacgcctccgcgacgcgctctacctgcaagccttcgccgcgctcaccagctcgcccggcgcccgcgcttactacgacacgcaccgcgcccgcggccacacccaccaccaagccctgcgtgccctagccaaccgcctcgtcggcgtcctgcacggctgcctccgccaccggcagacctacaacgaaaccaccgcctggcccgacaccaccgaaccacgtctccccaccgccgcttgactcttacgcccgtgggatgt

SEQ ID NO: 6950 - DNA, 1155 bp, unidentified
  source 1..1155: mol_type = unassigned DNA; note = element_acca8a3
  misc_feature 1..2: note = core
  misc_feature 3..207: note = LE
  misc_feature 208..1143: note = CDS
  misc_feature 1144..1155: note = RE
  misc_feature 12..213: note = bridgeRNA
cttgtcttatcctgaacacggctcctcgggtattaaggagccacggcccaccacaccatttgtggtgagccgtggcggcggttggatcgcaagcagctgggtcgtgatggaccgtagcgaagtttgatcagtcgccgtcttcaccaaagggcctgaacggatacgcgtgtgacaagtcacgcatgacaagcataggacatggcgaagatgacagatcataacattggcgtggacatttcgaaatcccatctggacgtgttccggatggaagatggtgcggcgcagcgcttcgataattcggcttcggggtttcgcgcttttgccaaatggttgggcaaggccacggttgcgcggatcgttttcgagccgacggggccgtatcacaaggcgttcgaggcggcgcttggcgagaagtttcctttggtcaaggtgaacccgctgcaagcgcgccggttcgccgaggcacatggcaccagggctaagaccgatgcggtcgatgcccggatgttggcgcgcatgggggcggcattcgatcttgtgccccaagtgccgtgctccaaggaaattcttgttctcagggacttgcacgttgcacggaccggactgatcaaggaccgcaccagattgagcaaccgtgcccaaactcaggatatcgctgtcctgaaacgtcagaccaaggcgcggctcgcccaggtggaacgtcagattgccgagttggacaccgaaattgcagcactgatcgcggcagggaaggccactgcacgcaaccgcgatattctgtgctcaatgccggggattggcactgtcacagccgcagccatgctgattctgatgccggagatcggcacgcttgagcgcaaacaggtagcaagcctggctgggctcgcacccatcacccggcaatccggtcaatggcagggcaaggcgttcattgggggcggacgcaaaccgctgcgtgatgctttatacatgccagcgctggtcgcaatgcgtcacaatccggacctcaaagccaaatacgaacacctgcgcagtgcgggaaagccagcaaaggtcgccatcgtcgccatcatgcgaaagctcatagagacagcaaacgcgctggtcaaagcagaccgcctctgggctaaaaaacccgcttgatcaagacggata

SEQ ID NO: 6951 - DNA, 1210 bp, unidentified
  source 1..1210: mol_type = unassigned DNA; note = element_accbebe
  misc_feature 1..2: note = core
  misc_feature 3..209: note = LE
  misc_feature 210..1151: note = CDS
  misc_feature 1152..1210: note = RE
  misc_feature 12..192: note = bridgeRNA
cttgtatcctgaacagatagctgattagctgtcagctatctgaaacgggagaagcttgtatccggcctgaagactctgagcttccgatgtagcttaagcctcccgtttcacctttcacgtcactcaaaatccgaacggtaaccagaagcgttgacttcgtatgtacaaggctggaatggcgtgttggctcaggtgaaaggaggtgttctgtgtatactctcggtattgatgtcagtaaaaataaaatcgatctttgtctgcttactgccggccccggcggtaaaaaaaagcacaaggttctgactaacgaacccgccgttgcccgtaaagttgtcgactggctgaacgcacaaaaatgtgtccctgaaagcgtgactgtcgtactggaagcgacgggtatttaccatgaaaatctggcgtatggcctgcatgaggctggtgtcagcgtctgcatggccaacccctgtcgtgtccgcgaatttgcccacgggatggatatcctcaacaagaatgatgctgtcgatgccttcgtgctggcctgttatggcgagctgaaatccccggctgtctgggttcctccttcgcctgaagtacgtaagctgagggcattgctgcgccagcgggatgcgctgagagaggatgtacagcgtacggtgaaccggctggaaaaagcgaattccacatccacaccacaggaggtcatccgttcacttgagcgaacaaagagctggctgaacgaggaactggcccggatagagaagctgataaccgatcatacggataacgatccggggctgaaggctgatctcgatttactgaaatcaatcaagggagtgaaagatcaggtcgggcgggagatgctggcgttgctgaaagacgggacgttcaaaagcgcctcacaggtggcggcctatctgggactcacaccggtagagaaaacgtcggggagctcagtgcgtggcagaccacatatgtcaaaaacaggaccgtcaggagtgcgggctaagctgtacgttgcagcgctgaccgcgagccgctggaacaaacaggcgaaggctatctatgaaaggctggtcgcaaagggcaaggcgaagaaagccgcgctgggagcagtgatgcgcaaactggtgatttatgctttggcgtgttgaaaacgcggcttccgtgggatgaaaattatgtagctaccgcttgacgttcaagacggtag

SEQ ID NO: 6952 - DNA, 1552 bp, unidentified
  source 1..1552: mol_type = unassigned DNA; note = element_acccfa7
  misc_feature 1..3: note = core
  misc_feature 4..283: note = LE
  misc_feature 284..1447: note = CDS
  misc_feature 1448..1552: note = RE
  misc_feature 46..267: note = bridgeRNA
cacgtataattaaaccatctcgaaaggggtggtttaattatgtctcctttcataaaatctttggttatatttgcaggagtagctacctgcgatataattaaggcaagcactgtggatttgtatctatctttttacagctttgactggttggaggtgactcaaaccacagtggtttgtctgaaatggtaatcagttagttaacgctttgacgtttctatttgcgtgaatacagggacaagccgtctgtggaaaacagcagtgcagaaaagtaaaggaggaaaccatgtattacattggaatcgacatttctaaattcaaacacgattgtgctgtaattgacgacgttggtgatgttgtcactccctcgtggtcatttgcaaatgaccacgagggctttttgcagttcaaagcattattagactctcttggctcagaaacaagaatagggcttgaatccaccggtcattacggtacgaaccttaaactctttcttgaatcgtgcagcaccacattcatggagtttaatccgctgttaatcaatcgctttattaagagtaaatctcttagaaaaactaaaacagattcgattgactgcgaaatgatagcccgttatctgatgacggtagagtacaagccctatccatcatcattttaccacactgagaaactaaagtcactaacaagatttagggataacctcgttaggcaacgaagccgacaactcgtagaactgacaaatatcttagacaaggcttttcctgagtttaagccgttttttaaaggtaaattttctgccactgcgtttcacatccttattaactattcgtcacctgaaaggattgcaaatatgaattctaaatcttatgaaacacttagaaaattgtctcgcggaagattttctctcgccgatttcacaactctgaaacatattgcacggaatactgtaggtcgtcccgacgatttcttgcttagtgaaatggctatggtcatagacattttcagtcagttagattcaaaagttgatgaaactgaaacactcatcaaggaatgtgtcttagagataaatccgcccatactgactattcccggcattggtgttgactctgctgccgttattcttgctgaattcggtgacttttcaaagttccaaaatcctgctcaacttctttcgttcgccggtttggaaccgggatattttcaatccggcacttccgaatctaacggtaaaatggttaaacacggttcttcttatttgcgatatgctcttatgaattgtgctcaatccgtcgctaattacgaacctatattcgcagaatattactctaagaaacgtgccgaaggcaaaacatatcgtgtggctctttcgcatgtcgccaaaaagcttgtgcgtgttatttttactttgcaaaccaaaaatcttgtttatgaccctgatgccattagataatctctaactgatttttttaagtccttgaaatatagggcttgtttaagtgcgcctattttccaattattcaattttttaaaaaagtcttgacttttaatagttagt

SEQ ID NO: 6953 - DNA, 1366 bp, unidentified
  source 1..1366: mol_type = unassigned DNA; note = element_accf91c
  misc_feature 1..2: note = core
  misc_feature 3..75: note = LE
  misc_feature 76..1110: note = CDS
  misc_feature 1111..1366: note = RE
  misc_feature 1083..1354: note = bridgeRNA
tgatggggtggacgccccccgacggcatcgatgtgccagagtggaggtgttgattcaccactgagggaggcgtccgtgtcagatgttaccacgattgggctggatatcgccaagcatgtttttcacgcgcacggtgcggatgcgacgggccgggcggtgttcagccgtcggctcacgcgcggcaagctgctcgacttctttgccgcacatccgcgctgccgagtggcgctggaagcatgcggcggggcccatcattgggcacgggagctgcaggcgatgggtcacgatgtccggctgatcccgccggcgtacgtgaagccgtacgtgaagcggcacaagaacgatgcaatcgatgccgaggccatctgcgaggcggcacagcggccgggcatgcggttcgtggcggtgaagagcgagcagcagcagggtgcagcgctggtgttccgcacgcgtgacctggcggtgaaacagcgcacacaaattgctaacgctatcagagggcaccttgccgagtttggctgggttgcgcccaagggtgcggcgcacctgggtatgctggcggatctgctcgaggacggcgagatcggtgacacgctgccggaagcggcacggccgatgttcgcgatgatggtcgagatgctggccgatctcgaccagcggatcgccgtgctggacaaggagatcactcgacgtgcccgcgaggacgaggtggcgcgtcggctgatgacgatccccggcatcggtccgatcacggccacggcgcttgctgcgatcgcaccgccggccgagacctttgccaaggggcgcgactttgccgcatggctcgggctggtgcccaggcagatgtcgaccggcggcaagcagaagctcggtacgatctcgcggatgggcgaacgcaccttgagacgtctgctgatcatcggagcaagcgcggtggtgcttcatgcaagcaagcgcggcgcacctgccggctcatggctcgaaggcatgctcgccaggaaaccaaggatgctggtcacggtggcgcttgctaacaagatggcgcgcaccgtttgggcattgctggtgaagcaggaggattacagggctccggtcccggctgcggcgtaagccaaagcgggccagaggcgtcggagggcgcgaggcggatcgaaggaggatatggcacaacagtcggcgagacggggccggaagaaccagggctttccaccgtgccatgagcacgctgttggtgatgtggttccggtccgcgaactcccatacgggccagcagctcactgctgcatgacaggccggacagatggcagcatccgaccacgtgtcagaacctcaagataccgcttgcaaccgaaggggcgtccacaga

SEQ ID NO: 6954 - DNA, 1378 bp, unidentified
  source 1..1378: mol_type = unassigned DNA; note = element_acd0658
  misc_feature 1: note = core
  misc_feature 2..67: note = LE
  misc_feature 68..1099: note = CDS
  misc_feature 1100..1378: note = RE
  misc_feature 1129..1373: note = bridgeRNA
caatggtatggaccccgcccttgctgcggtggaatctcgaacgtcaactgcagtgaaggaggatgtcatgcaggtcgttcgcataggtctagatctggcgaagtatgtcttcgaagttcacggcgtcgacaaccacgggaaagtcgtcgtgcgaaagaggttgcgtcgcgatgcggtggccggctttttcgccaatttaccggcctgcctggtcggcatggaggcttccaacggggcacactattgggctcgcgtgctcacggagcttggccatcaggtccgactgatcagccctcagttcgtgacgccatacgtcaagtcgaacaagaacgaccagaacgatgcggaagccatttgcgaagcggtcggccgtccgtccatgcgcttcgtaccaccgaaatcaaccgatcagctggcggtacaggccgtccaccgcattcgccggcgcctggtcgccgaccgggtcaggctcgtcaaccagattcgcggtctgctgtccgagcatgggattgtcattgcccgtgacatcgcgcagctgcggcgcggcctcgctgtcattgtagggagcatcaatgacggcctcggcgagatgctccgagcgctcatgagggaattgcaagaggagttatccgagcttgatacccgcattgcagcccatgaccggcggataagggaaatcttccgtacgagtgagcagtgccaacggctcggcaaaatcgaaggcgtcggacctgtgacggcaacagccttgatcgccgccgtgggcgatagaagctgtttcaagaacggccgacagttcgcggcttggcttggcctggtgccaaagcagcgatccagtggagggcgggcccgcttgttcggcatcagcaaacgcggcgatcgatacctgcggacgctgatgattcacggagctcgcgccgctttaagccgggctactggcaagcaggatccgcgaagcctctggctcggcaagatgcggcaacggcgccatcccaatgtcgtggccgtggctcttgccaacaagaatgcgcggatcgtgtgggctatgctcacaggcgacgcggcttatgagccggcgctgtcggtgaaggcggcctgaagcgaagcggcaatcaaggaaaggaggtctcacccggcaattgcaacaaatatggcaggagatggcgaaacggtcacccccgtcgcttcccgaacctgatgtgtggaccggcacggcttgcgccgatgtctcggggccgttgaggtggaagcgggcgaaaaccatcgaggctcgcggcggagacgttgtccagccgcatcaagaagccggatatacgtcagcagttgtgaccgtcgatcctgatcaagccggtcgttgcaatcgggcggggtccatata

SEQ ID NO: 6955 - DNA, 1402 bp, unidentified
  source 1..1402: mol_type = unassigned DNA; note = element_acd512f
  misc_feature 1: note = core
  misc_feature 2..131: note = LE
  misc_feature 132..986: note = CDS
  misc_feature 987..1402: note = RE
  misc_feature 1168..1398: note = bridgeRNA
atggtatggacgcctccccccggcaacggggcgctgttggcagttgggggagagatggatcctcgctgcaatggcatcaaagtgccaaagtggaagtgtcgtaactctccacatgagcaggaggatccgaaatgaaatatagcgtgatcggcatggatatcgccaaacaggtttttcaactgcatcgggtagaggtcgagacgggcgaagtcgagcgtatcaagctccgtcgcgacgacgtcctgccatactttgcccgtcaagcaccagccatggttgccctggaggcctgtggcagcgcccactggtgggcgcggaagctttccgcactgcggcaccaggtgcgcctgctgcacccgaagagcgtgcggcctttcgtgttgcgcaacaagaccgatgccgccgacgcgcgggccatctggacggcggcgcaacaaccggacgctcgcttcgtcgcggcgaagaccgagacccaacaagccatcctggccttgcatcgattgcgcgcccaattgctgaagttccggatcatgcaaaccaacgcactgcggggattgctgtatgaattcggagaagtactgcccgagggccatgcggccttgtcgaaggcattgcctgccgccttggccaatctggatacgcatctgcccgctgtgttgctcgatagcctgcgcgaacagtggacgcgggtgatgagcgtagacaaggagatcgccgccatcgaacgccgtctcgccaccattctgcgcgataccccatcctgtcaggcagtggccgaaatccccggcgtggggctgctgaccgcaactgcggcagtcgccagcattggcgaagccaaagccttcaaatccggccgagagttcgccgcctggccggattggtgccccgacagcgaggcacaggtggacgggtccggcaactgggcatttccaaacggggcgatgtctatctgcgtaccctgctcatgcatggcgcacgggcggtaatcttgcgttaccggcatgtaccctggctggatggactgctcaaacgtcgtccctacaacgtggtcgtggcggccgtcgcgaataagctggctcgcacgatctgggccgtgcttgccaagggcaagccatacaaccccgacgcgttcagcgccgtggtggcaacccagggcggggtttgaaaccgtttctcaaggagcgcaagcgattcatgcgtgatggcatacaggtcggaccgggacggagaaaacctgatagggaacatgaacttcgagttcggtgttcagataaggtctccgtcagcggattccatcagggccagcaggcttaccgcctgcaccaacaggccggatataagactgcatccttacctactgccaaatgcaaaatctacttgtactccgggaggcgtccatata

SEQ ID NO: 6956 - DNA, 1804 bp, unidentified
  source 1..1804: mol_type = unassigned DNA; note = element_ace086a
  misc_feature 1..2: note = core
  misc_feature 3..358: note = LE
  misc_feature 359..1675: note = CDS
  misc_feature 1676..1804: note = RE
  misc_feature 112..289: note = bridgeRNA
ctagtataataatgatgtagtcaataaagactagttgttaacaaatttctttagaatagataacagaagaaggtgttcttccttcatcagaagttatccataataattatcatgtctgacggttcctgatagacaccagataaaacataaggtattatctcttaggataggacaaagaatggtcacctccttgggatgctgaattatcagcagatacctacaagaaagtcaattagtccattcgacagggttttatgttttagctggttgggagccggaaggccatacccgaataacgcgctaggttgtgtacctgccagattggaaatggattcctatcagaaaggagcttttgctcatgtcaaacaatgttatttttaatcttgatgaattattcatctctgttggtattgatgtcggtgctgacttctcctggatgtctattgcacttccaaaccaacagttagtgggaaagccttataaaatcctacatagtagtatgaattcccttacaaccgctgtttctaaaataaaagaagcagaagagttgtattctttggaaagtcgcattttcctcgaatccacgggaatttatcattacccactcttctgctatcttcgtgataagggttttaactgctcggttataaatcctatcatcactaagaatagcacaaatatgaatatacgaaaagtacataatgaccgttttgattctaaaaaggctgctttagttggtttgaaacctgatttaaaggtttctcttatgccatctgaccttgccttaaactgccgtaatctgtgtcgtgaatactacgacttaatggacaaccgcagtgcttacgtgaataaactgcaaggtgaattacgtatggcattcccacaatatcttggtattttttccaaagtaactatcaatacatctctcactttattagagacttatacatctccaaacgcttttattgaagctgataaacaagagattattgataccattaaatctacagctcgctttggacttacatatgccgaaaagaagtacaatgccattattcaagctgcacatgatgccaatgaattcggttacatcattgatagtaatatcaaacgtatccgtctctacataagtttcatccgcaagtatgatgaagaaatcgcaggcatcatggatgctttgcatgatcttgtagattccaacgaagatactgattttgtgaaacaaatccacttgatagaaacatttaaaggtgccggtttcttatctgcggtatctctcatgggcgagattggtgatttttcagcatttacaaagccaaaacaactctttgcttactttggtcttgatccagctgtcaaacagtctggtaaatttgaaggaaccaaagtacaaatgtcaaaaagaggttccgctattgccagaagagtaatccatgtattaacacttcagagcatcagtacttccagaactggggaggctaaaaatcctgtattaagggattactacctcaaaaaatgtgaatcaaagactaaacttgttgctatgggagctgtctcacataaagtatgcaacatgatatttgccatactcagagataacaaaccttttgaaatcatcactccacaggagcacataaaacaatacaatgctgctaaatgcgacaaagctgcataaaatactgaattacccgaatctatatctttttaaaacaagatattttcaccaagggataagtgcgcccttttttagtcctaaaatataatcaatatttttttaatttcttattgacatttattagctgga

SEQ ID NO: 6957 - DNA, 1507 bp, unidentified
  source 1..1507: mol_type = unassigned DNA; note = element_ace0e5e
  misc_feature 1..2: note = core
  misc_feature 3..204: note = LE
  misc_feature 205..1482: note = CDS
  misc_feature 1483..1507: note = RE
  misc_feature 6..204: note = bridgeRNA
ctgatggctctaccctcccctcttgaggtcttccccggggaacgcttcggttgctcgtccctcgaggactgatctgagacggcgtccccagggaacggcctcggaggtctgacgtccacaagggtgtcgtcccacgaggactggtccatcagcacgacgccgaacctccgtccgaacggcttccccacgaggaagggaggcgatgtgctggggatcgggatcgactggtccgaggagttccacctcgtcgcgctgggccggccgggcgagggcgtcatcgaggtcacccgcgtggagcacacccccgccgcggtcgacgcgttggtcgccgagatcgcggggctcgagcccgaccccggcgaggtccgcgtcgtgatcgagacccgccacggcctgctcgtcgagcgcttggtcgatgccggctacgtggtcgtgccggtcaacccggatctcgtcgcgcgaaggcgcggcccggccaagaagaaggacgacgccgaggacgctcgcatcgcgtgcctgatcgcgctcgataggcacgaacggctgcgcccgctgatccctcacggggagatcgccggcgagctgcgcgccatcgcccgagacgacgagcgcgccgcccgagacgagcgcaggcccggcaaccggcttcgccaggacctcatctcgaccttccccgcggcgcttcgcatcggcgggcaggacctcggcgcgccgacgttcctgcgcctgctcgagcgctggcccaccgcgaacgcccttgaagcagcaacgagggtggatctcgtggcgttcgcccgctcgtgtcgccacgggtggccggagcgcttcgccgacagggtccaggcctccctcgggaacgagcacttcaggcccaaggactacctcgtgcgggccaaggccgacaccatccgcttggccgcgacccagctcctgttgatcggtcggcaacgaaggagctgggagcgacgcatgggcgagctcctgctcggtgctccgcggcaaggacgagacaggaagccgaaaggagacgggttggggaagggctttcctggcggcgggatctacctgagctttccgggcctcggtgaccgcctcgccgccaggatcgccggtgagatcggcgatcatcccgaacagttcgacacgccgaactcgctgcaatgctacgcgggcaaggctccggtcacgcgccgctcgggcaagtccgagctcgtcgtggcgtgccggctcgcgcacaaccggttcctcggagccgcggtccagcagtgggcgttctgctcgctgaggcgctcggggtgggcgcgagagttctacgactcgcagcgagctaggggtaagggacaccatgcggcactgcgggccctgggcaatcgctggctcgagatcctctggtactgcgtgcacaacggcgtcctctacgacgaagccatccacgttgccaaccggaaccgcgcgctcggacgggcgacccaggccgcctgaggcggtggtggttgacgaagggtgt

SEQ ID NO: 6958 - DNA, 1535 bp, unidentified
  source 1..1535: mol_type = unassigned DNA; note = element_acedaab
  misc_feature 1..3: note = core
  misc_feature 4..242: note = LE
  misc_feature 243..1421: note = CDS
  misc_feature 1422..1535: note = RE
  misc_feature 8..222: note = bridgeRNA
tttcgtattattaggttaaccagggttttctggttggcctttctttatggttgttttacgatggtggtagccgggaaaacgcaactgactttgggggattctaccccgttccagaaactgttttcccactactccaaataaacatgtttgagctggttgagggaacgacctcgtatcacaagcgaagctatggatttggaaccatcgtgggagtgccggaaattgatatgtaggaggttgttatggagccagtggtaggtgtggatgtggcaaagggatgtagtgtgatgcaagcctttacgaagaggaacgagccttacgggaagttggaaagcatctcgcatgatgagaatggatttgaacgattaggtgaggttttagcggggggacacgtggcaacggggattaccccagtagtcgtgctagaagcgacagggcattaccataagccacttgtcgcctatctgaagcgcagcggatggacgcacttcatcgttaatccattgcagtcgaaacgggcaaaaggaactcaattgcgcaaggtgaagacggacgctacagacacatggcatttagcggatatgtattaccgtggagacgtcgaaccgcatcgtacgtgggataaggcgtttacagaactgcagcatgtgacgagacaacatgagtttgtgacagacatgttcgtgcaagcaaaactgaataccagagcgttgctggatcaagtgtttccagactacgagaagatcttttctaatctgttttcgattacctcactaagcgtgctgaaacgttgtttggaagatgatagtgagaatcttatggaagtgattcaggaaggtgtcgggaaatcccactccaaacgttgggtggaagaaaaagcggaacgtatcgaggtgctcttgtccatctggagggattatccgataagcagagcgcaaacggtaatgttaagcagcatggtcactttgttactcacgttcatcgaacaattaggcgaccttgagagacagatgaatcggatcgcatcgactttacccgaggtagaatggttgaaaagtattcccgggattggggataaattggctgcggcgatcgttgcagagattggggacatccatcagtttgaagacgccaagcaattggtcgcttatgccggcttagaccctacaatctatagctctgggaaatttactgccacaagttcgagaattaccaagcgtggatcaaaaaggcttcgacgttccttgtatctagcggtgcaatgtggagtccggaaaagtgcaaaccgaaggatctggagctattacgataagaaaagaaaagagggcaagccctataaggtggttgtgattgcttgcgcgaacaagctgctccatcatatttacgccatccttagtaagagccagccttacaaagcataatcccatatttaaccatattccttctgcacagaaggaatatttgtcatgcaatgaaaacattataccagcaatcttatttaaattaaagcaaaatgcttgacaaacattagctgg

SEQ ID NO: 6959 - DNA, 1403 bp, unidentified
  source 1..1403: mol_type = unassigned DNA; note = element_acef0d3
  misc_feature 1: note = core
  misc_feature 2..226: note = LE
  misc_feature 227..1390: note = CDS
  misc_feature 1391..1403: note = RE
  misc_feature 13..241: note = bridgeRNA
ctacttatttactggtggtacgaccgcagcccggccaggcttggtcgaggtgaccggtggggtcgctcgctcatcggctgtccaccgtctgttggtgtggctcagatttggcatgcgtcccgccggtcaccgtggcgcggagaggctcaagaggggactgcccagctcgaagtagcgctgccctcctcgccggattcaaccccgggttcgatcgaggagagcaggcatgggacaggtcatcatcggcatggatccgcacaagcggtccgcgaccatcgaggtcatcaacgaccgcgagaaggtcctcgcacaaggccggttcagcaccgaccgcgacggctaccattcgatgctcaaactcagccggcagtacaaggaccggatctgggcggtcgaaggctgcaacggcattggcaaacacatcgcccagcgcctggtcgccgacggcgagaccgtggtggacgtacccgcgaagctgtccgcccgcgcccgggtgttcgataccggccaaggccgtaagaccgatccggtcgacgcgcacagcgtcgcggtcgcggcgttgcgcagcaagggtttgcggcaggtcgacgtcgacgatgtgacggtggcgttgcggttgctggtcgactgtcgcgacggactgggccgcgctcacaccgacctgctcaaccggatccacaagctgctgctcgagctgctgcccgggggcgcgaagaagtacctgtccgccgcgcaggcccgcgcgctgctcaacacgattcgtcctcgtgacctggtcgggcggactcgtcgccggcttgcctccgaactgatcaccgaactggtccaggtcgacaagaagaccaaagctgcggacaaggaactgcgcgagctggtcgaggcgaccggtagcagtctgcaggacctgcacgggatcgggccgtccggagccgcccggctgatcggtgacgtcgcggacatcagccgcttcgccagccgcgggcacttcgcgtcctggaacggcaccgcaccgctggacgcctcatccggcgaccagaacagacatcggctatcgcgggccggcaaccggcgcatcaaccgcaccctgcacatcatggccgtcgtccaactgcgcaacgacacccaaggccgcgcctactaccggcgcaaactcgccgccggcaaaaccccggtggaagccctgcgcgcgctcaaacggcggctgtccgacgtcgtctaccggcagatggtcaacgacgccatacgcgtcgagacgggcccgggaggacacgtgggagcggctctgaaatccagcgcggccgacctgatccccatgatcgacacttcggataagtcacttcccggacccgccgagcctcagcctagaacacaactcctcgccgtctcttgacacagaggggtgc

SEQ ID NO: 6960 - DNA, 1427 bp, unidentified
  source 1..1427: mol_type = unassigned DNA; note = element_acefdc2
  misc_feature 1: note = core
  misc_feature 2..128: note = LE
  misc_feature 129..1148: note = CDS
  misc_feature 1149..1427: note = RE
  misc_feature 1186..1426: note = bridgeRNA
atgatatgaacgcctcccacccgtgagcggtgagagccggaaagaaggcggagcctcacgggccaacggcattagagtgtccagatggaagaccatagaggtttttctgacaaaccggaggcttcgaaatgaaccatacgacagtgggcgttgacattgcaaagaacgtgatgcagctccattacatcgacgcagagaccggtgagatcgtcaacaaaccggtaaagcgggcagcgtttctggagcacttcgctaaccgggctccgtgcctgatcggcatggaagcctgcggcggttcgcagcactgggcacgcaagctgacggcgatgggtcatcaggtgaagctgatgccggggaaattcgtgaaggcattcgtgatgggcaacaaaaacgattcggctgatgcgcgggcgatctggatggcggcgcagcaatcgggcaaatctgttgcagtaaagacggaaacgcagcaggccgtgctggggctgcacaggatgcgagagcaactggtgaagtttcgcacgatgcagatcaacagtctgcgcggcctgctgaccgaatacggtgaagtgatggccaaggggcgagccgcgctggacaaggcgattccggacgtgcttgagcggctggttgatcgtctgccgacgatcctgatcgacacgctgcgcgagcagtggaacggtttggcggagttggataaacagattgcccagatcgaacggcgtctacaggcatggatgaaagaggacaaggcgtgcaaggcaatcgctgcgatacctggtatcggtctgctgacggcgacagcggctgtcgcgacgatgggtgacgcgaaggcattcagatccggccgggaattcgcagcctggatcgggctggtgccgaggcagacgggctcggggggtaaggtgcgcctgcacgggatcagcaagcgaggcgatacgtatctgcgcaagctgctgattcacggcgcgcgcagtgtgctgtttcactcgaaaaagcctgggtcgtggctcgaacagatcagggagcggcgaccgatgaatgtgacggtcgtggcgcaggccaacaagatggcccgcacgatctgggcaatcgtggcgcatgacaggccttatgaaagcggttacgtaagcgcgaagccggtttgaatggcaaacggtgcgtaggaagatcaacttttacaggatgacacgtcgaaaggttgcgctggcaatcgtatgtgatgacaagacaggtcggaccgggactcgctaaacctgaatggctggtcgagcttcaagctcgcgaggtaaatgaggtgcgagtcagcggatttcatagtgggccgcagcgcatcaggctgcaacaagcccggatataaagctgcaacccatcctgtcgtagtcggaactcacgaaaaaccttcgcaaacgggaggcgttcatata

SEQ ID NO: 6961 - DNA, 1665 bp, unidentified
  source 1..1665: mol_type = unassigned DNA; note = element_acf0d3f
  misc_feature 1: note = core
  misc_feature 2..300: note = LE
  misc_feature 301..1485: note = CDS
  misc_feature 1486..1665: note = RE
  misc_feature 60..273: note = bridgeRNA
cctggtatattgtaattgacccatctagctggtcatctacaatatacatttcctttctatcaaccctttaataaccgtggttgattacggttatgttcatttgtaaaatcgaatttgtgaatgtggatttgtattttttcctgtggctttgactacttgatggaggttcttaccacaccttattcctaaacaatgattagttagatgagtctttgaattcgtattttgaaccaggttttgtggtctaagtattgtggataaccattttcacatatctcaacaaagaaaggatgtctatatatgaaattaattggtatcgatgttggaaagaacagtcatcacttttgtatcatggataaagagactggcgaacttaatattacaccaactccttttcctaacaacaaagaaggctttgactttctgatcaactctcttaaaccgtattctaaaaaatcagttctatttggtatggaagacacaggtcattaccatattgctcttctaaaatttcttcttaacaatggatatactgtagctttgattaaccccaagactactgaccttactcgaaaaatggaaggtggcattactaagaatgataagctggatacaatcacgatctgtgatgttcttgatactcctgaacgtaagaaacaataccggattactaaagtgaacagttttgacttatatgagcaaaaacaactcactcgccatcaccataatttaaaagaagaactgaacgtctactgcaatcgactacagaaatcgattgatcttgtatttcctgaattcaacaccttgtttcgctcaaagtatggtgttgtttacatgaatcttcttaaaacttttggcagtgctgaagttattgcttctacggatattcgtaccattcgtaaatgttttgaaatcagaggtaaaggcaaccgtattccattgacaccagaagagttgaaagaatgtgcaaagaactctgttggaatctcttctgaagttgaaaccatacaaatcaaacacttagtaagtcaaatcatgcttattaaagagcaaatcgctgaaatagataaaaaaatagaagagttctcaatcaaaaacaactctcctatactaaccatcccaggtatttctcatttctctggtacttctattttagctgaattaggagatattggcaattattccaagccttctaagatcataaaatatgcaggagtagctccttatcactatgaatcgagtcaattcaatgcacagcacacatccataaccaagaaggggtctaaatatcttagaaaaactttgtatcaaatcatactgcctgtaatcaataataatcctgtattcaaacgatactatcaattaaagatttcacaaggaaaaggacatcgttgtgctcaagggcactgcataagaaaactacttagaatcatttatcatctattagatacaggacaagcatttgagcctgcattattaagataggataaatatatttaagaacatcataacttttaaaaatcataatttaaaagttcttttcgtcatgcctaaaattaatctgatattcacattttcaaagctcaactttcaattaacttaaaaatctaatagttttatattttcaaactttttcataaaaacacttgaattttatatagttag

SEQ ID NO: 6962 - DNA, 1307 bp, unidentified
  source 1..1307: mol_type = unassigned DNA; note = element_acf3b35
  misc_feature 1..2: note = core
  misc_feature 3..189: note = LE
  misc_feature 190..1152: note = CDS
  misc_feature 1153..1307: note = RE
  misc_feature 28..202: note = bridgeRNA
cttgtgtccgcaaaatctgccagaatgtgcgaacgggcggttcttaccaaccgcccgttgctggatctgagcccgttcgtgctcgaaggcccgagagcctgacggggagcgagggacagatccggtatcttccttaaacccgaacagttgcatgggctttgagcccggaccgagcaaggaagggagtggatgatggcacaaaatgatcgcgttgtcgtcggcatcgatgtcgccaaggacaaggtggatgcgtgcattcgcacgttgtcgcaactgcggacgtttgaaagcaccgcagaaggacggcggcagttggtcgcttggcttcgcaggcacaaggtgggtaaggcggcgatggaggcttccggcggctacgagcgggactgggccaaggcgctgcgcgaggccggcctcgaggtgcggatcgtcgatccgaagcgggtgcgcagcttcgcccgctcggccgggcggctcgccaagaacgatgcgatcgatgcggagatgatcgcctggtttgccgagacattcggcgaggccccggcccaggcctacgatgcggcacgcgacaagctggtgcagatcgtcaacgcgcgtcaggctctgctcgacgtgcagaccgagctgcaaaacaggggagagcacgccgccccagaagtggtgcagaaaatgcaggcgcgactcttgaagaagatcgctctcgaagtggccaagctcgaggcggcgatcgcagccatgatcaagacgacggcacattttaccgagctctccgagatcatcgagagtgtgccgggccttggcaggggaacctctgccggcctgatcgcggcgatgccggaactgggccaggtgagcaacaaggctgccgccgccttgttgggtgtggccccttacgacgatgacagcggcaaacggcgaggcgagcgccagatcaagggcggacggcgcaaggtccgcaatttgttctacatggcttgcctgggagctgcgacccagcacaatcctgtgctgaaggctttctatcgtcgcctgatcgccaagggcaaagagaagaaggtcgcgctcgtcgcctgcatgcgcaagctgatcgtcatcctcaacatcatgattgcccgtggcgagaaatgggatcccagtcgctacgcggtgagctaacgagcgcgccatgtcgcgctcggtcctcgaccgagcgcttgcaaagccaacagaccggtgagcggacggggtcaaggccgtcagccgccgaaggcgggggcgcgcaagcgccagccttgagcccggccgatcactggtctacttcaacacagttg

SEQ ID NO: 6963 - DNA, 1430 bp, unidentified
  source 1..1430: mol_type = unassigned DNA; note = element_acfc724
  misc_feature 1: note = core
  misc_feature 2..128: note = LE
  misc_feature 129..1148: note = CDS
  misc_feature 1149..1430: note = RE
  misc_feature 1189..1429: note = bridgeRNA
atgatatgaacgcctcccacccgtgagcggcggaaagccagcaggaaggggagcctcacgggccatcggcatcagagtgcccagatggaagaccatagaggttttcctggcaaaccggaggctccgaaatgaaccatacaaccgtgggtgtggacattgctaagaacgtgatgcagctccattacatcgacgcggagacgggcgagatcgtgaacaaaccggtgaaacgtggcgtgtttctcgagcatttcgcaaaccaagcgccgtgcctgattggcatggaagcctgtggtggttctcagcactgggcccgcaagctgatggcaatgggtcatcaggtgaagctgatgccgggaaaattcgtcaaggcgtttgtgatgggcaacaagaacgactcggctgatgcgaaagcgatctggcttgccgtgcagcatacgggcaaatcgatcgcagtgaagacggaaacgcaacaggcagtactggggctgcaccgaatgcgcgagcaactggtgaagttccggacgatgcagatcaacagtctgcgcggcctgctgaccgagtacggagaagtgatgggcaagggtcggactgcactggacaaggcaataccggatgtgctggaacggctggtcgatcgtctgccgtcgatcctgatcgacacgttgcgcgaacaatggaacggtctgacggaattggacaagcagattgctggaatcgaacggcgtctgcagacgtggatgaaagaagacaaagcttgcaaagcgattgctgcgattccgggcgttggtctgctgacggcgacggcagcggtcgcgacgatgggcgatgcgaagacgttccggtccgggcgcgagtttgcggcctggatcgggctggtaccacggcaaaccggtacgggcggtaaggttcagttacaggggatcagcaagcgaggcgatatgtatttgcgcaagctgttggttcatggtgcgcgagctgtcctgtgtctcaagaaggagccggggccgtggatcgaagggatcaaaaagcggcgcccgctgaacgtatcgatcgtggcactggcgaacaagatggcccgcacgatctgggcgattttggcgcatgacaggcagtacgaaaagggctacgtgagtgtgaagccgggttgaccggccagcgccgcgtaaaaggaagatcaacttttgcaggatgacacgtcgaaaggttgcgctggcaatcgggtgtgatgacaagacaggtcggaccgggactcgctaaacctgaataaacgtccgagcctcgagctcgtaggtgaaatgaggtgcgggtcagcggatttcatagtgggccgcagcgtatgaggctgcaataagcccggatataaagctgcaacccatcctgtcgcaatcggaacacacgaaaaaccgtcgcaaacgggaggcgttcatata

SEQ ID NO: 6964 - DNA, 1587 bp, unidentified
  source 1..1587: mol_type = unassigned DNA; note = element_acfcbff
  misc_feature 1..2: note = core
  misc_feature 3..217: note = LE
  misc_feature 218..1474: note = CDS
  misc_feature 1475..1587: note = RE
ctactacaatagaattatggataaggtacatgacaaccaaccatgtccatatccttcttattgctcaagctgttagaatgaagggaacaatggtatgactgcttcccacttggacttcgcgtccgtccggtagaatgtcagcctgccctcattcgcagcattcgttttacgcaggtagagctattacgttcgtgtcagccagtagttagaataagcaatgagtaaagccgaccttaccattggcaaaatacaaaacaaggagaatacaatgaatgcagtaggtattgacgtatcaaaaaacaaaagtacaatcgctatcctccgcccattcggagagattgttgctaaaccatttgatgtaaaacacacatcttctgacataacatatctaattagccagttgaaaagcttaaatggcgatactcgaattgttatggaacatactggccgatactatgagcccatggcgcagtggttatcagacgctggtttattcgtaagtgccattaatcctaaactaataaaagactttggtaataatacattacgtaaagtaaaaacagacaaagctgatgcaataaaaatcgcacgctacactcttgataactggtgtgaacttaaaccatacaacaacacggatgaattacgccgacaactgaaaaacatgaaccgccagtttgatttctacatgaaacagaaaacagccatgaagaataatcttattgctcttcttgatgaaacatttccaggtataaataccttctttgacagccctgcaagaaatgatggaagccaaaaatgggtggattttgtcactatcttctggcacgttgactgtgtacgtagacattctatttcttcgttctctgagcggtatcaatcttggtgtaaaaagaaaaaatataattttcagtcccaaaagcctaacgatatatatgaatttagtcacgatcttatcgcaacactgtcaaaagataatgtaacgaaacttttgattcagcaagcagttgatcagctaaatatagcctcaaaaaatgtggaatcacttcgtctccttatgaaccagactgccgctaaacttccagaatacccaatagtacttgatatggctggggtaggaactacactcggcccgcaactgatagctgaaatcggtgatgtatcccgtttttctcataaaggtgctctaactgcctatgccggggttgatccaggtgccaatcaatctggtgactatgagcaacaaagtgttcgaacatcaaagcgaggagctccacaactcagaaaaaccttatttctaattatggactcacttatgaaactggcacctccagatgatccggtatacggatttatgatgaaaaaacgtgctcaaggcaaagattattacgtttatatgaccgctggtgcaaacaaatttctccgtatttattacggacgagtcaatgaatacctctcatcattgacttcttaatagtagtttttcatctttcccttttcagccggcaataattggcggctttattgtgataccaattttttaatataacttattttaaaaataactattgactttttctttgcagg

SEQ ID NO: 6965 - DNA, 1419 bp, unidentified
  source 1..1419: mol_type = unassigned DNA; note = element_ad01ac9
  misc_feature 1..2: note = core
  misc_feature 3..324: note = LE
  misc_feature 325..1110: note = CDS
  misc_feature 1111..1419: note = RE
  misc_feature 1191..1410: note = bridgeRNA
taatgagatggtccgccgcttgattcacctgcgagagggggtgatcgaggtggcagcattgaagaaggaggatcatcgacatgcagatacactcggttggcatcgatctaggcaagacaacctttcatctcgtagccctcggcgctgccggcaaggtgattgtgcggaagaagttcaaccggaagcagcttctggcctataccgcgaacgtcccggcatctctaattggacttgaggcctgctccggggcccactttctcggaggcgctgcgccagcaaggccatgatgtcaggcttatcccagctcagtttgtaaaaccattcgtgaagtcgaacaagaacgacttcatcgatgcagaggcgatcgcggaggccgtcgagcggaagaacatgcgttttgttccgatcaagaccgatgatcagctggacctgcagggtatccaccgggtccgtgatcgcctgatctgtcggcgcacggcggtgaccaatcagcttcgggcatttctgctgaagcgcgggatggtatctgcgcacaggccagcgaatctcatggctgccatggcggacattctggagaacgccgaggcggacctgacgccgcagatgcgaagcctgatcaacatgctctgggatgagtggaagctcgttgaagagcagatcaaaaagctcgacctggaactggaacagatctcggtcgcggatgccggatgcacgcagatacgtcagatcccggggatcggaccagttgtcgcaactgccatcgttgcttccattggcaacggcgccgccttcaataagggccgggacttcgctgcgtggctgggtatcgtgccacgccagtactcgactggaggtaaagcgaagctgctcggcatcagcaagcgcggtaacatctacctgcgtaagattctgattcacggcgcacgagctgccgtgctgcgcatcaagcgcgaccgagcgccgatcgtgccctggctcgatgcactcgatgccagagctcccaaaaatgtcgtcgtggtcgcgatggcaaacaagctcgcgcggatcgcatgggctgtactgtcgagcggggaagactaccggccaatggggaatatcgttgccgcataagatagtgcggaaaagacgcctgcggcttgggagcgctgacgcgctcccactttcccgcactacgacgacggattgaatttacccaccgaggtctgcaccggaacagcgaagacgaacgaacagtcaaaacggcgtgcctgaattctgatgtgacactgtggtcttcacgaccgttcggctagttagaacaggcacgcgcggaactcatcgtggccaggagaataatctccatctgaaggccgaatacatagacgcagactgctcccgtcgtcctcaatgtccccttgcattcatgcggcggaccataca

SEQ ID NO: 6966 - DNA, 1586 bp, unidentified
  source 1..1586: mol_type = unassigned DNA; note = element_ad13dca
  misc_feature 1..4: note = core
  misc_feature 5..262: note = LE
  misc_feature 263..1465: note = CDS
  misc_feature 1466..1586: note = RE
  misc_feature 16..282: note = bridgeRNA
ttttagtaccatataagtgtaagagataaagcatatcattagtgctttaccttctgcacttatttttttatgataagggagtaattggtctggcgaggcgctttttggattaaccacatccgtcatgaaaaccgtcaaccaccccttattataagcagtcgtttaagcaggttgaaacccgtaaggtgctttcgtgtaacgaactaaaatgagtggtaataagtgtggatgggacaattacaaatttattttggaggttcagatgataagtgtaggaattgatgtgtcaaaagaaaaaagtaccatatgtatcctgaagccgtatggtgaaatcgtgagcaggccttttgaagtctgtcatacagagaaagaattatccgaattgacttctatgctgctacgtttgaatgatgatgttcgtgtagttatggaagccaccgggatctaccatctgcctgtattatgctatctgaaagaaaaagggctgtttgtggcagtggtcaatccatttgaaatgaaggaataccgttgccagggactgaggcgtgtgaaaacagataagcaggatgctgttacgatctctaactatgggattgaccattggtatcggctgagagaatatgaagcggaagaaagcatctacgcagagctgaagcttttaggacggcagtaccgccattatatgcggatgcgtgtggaaagcgtgttggaactgacccatcttctggactatacgatgcctgggatcaaaacgctgctgaaaggctggaatgaaacaaatgggaaagataagctgggggattttgcggaagaatactggcattatgacaatatcacgaagaaatcggaggaacagtttatagagagctatctaaaatgggcaaaagagaagggataccaccagagccaggataaagccgtcaagatttatgcgttggcaaaagaaggcatccccacagtatcctccgataccccatcgaccaaaatgctggtacaggaggcagtgcgggtgttacgagaagtcgataacactctaatgactattctaacacagatgcaggcattagccaagagtctgccggaatatccggttgtcagggcaatgggaggtgttggaaatgtccttgcgcctaaattgatcgcggagattggggatgtaaggagattccatagtggaaaagccttgatagcccacgcaggaatcgacgcgccgccatatcaatcagggcagttcattggaacagagagaaaaatatctaagagaggatcttccagtctgcgtaagatcggatatgaagtgatgagatgcctaaaaacccataaagaaccagaagatgcggcagtatataaatttattttgaagaaagaaaaagaaggaaagtcaaaacgtgcagcaaaaatagcgggattaaataaattccttaggatttattatgcgcgtgtgatggaagtataccagaagtaaaaagaactaaaacagaggataaggcagaccggattttccaccggtctaattgtcgtgggaaaaattcataccaaaaatttatttaaaaacctgctaaaaagtcttgacttttgttagcagg

SEQ ID NO: 6967 - DNA, 1578 bp, unidentified
  source 1..1578: mol_type = unassigned DNA; note = element_ad1ac5e
  misc_feature 1..2: note = core
  misc_feature 3..274: note = LE
  misc_feature 275..1447: note = CDS
  misc_feature 1448..1578: note = RE
  misc_feature 3..249: note = bridgeRNA
cttgtatgatgtttatagaagcataaacaccatattccctttctttttattttgtatcgtggttcaatacaactcagatactgtggacttttaattattttcctgtagcttgactactcaacaggagtgtattgccgctacctttatctgaattgtttatctgctggatgagccggagcgtctgttcctgagttcttatttcaatcaagtctacgatgataatcgatggtggatatcacggtatcagacttttatgaaagggaggtacaacctcatgatctacgtaggcattgacattgccaagctcaaccactttgcatcagccatatcttctgatggaaaggaactcatgaagccgttcaaattcacaaatgacggtgatggcttccaaatgctgcattcccgccttgaagagctttcccgctccggcgacagcatcatcatcggtcttgaatcaacggcacactacggcgacaaccttgttcgataccttgtcgcctgtgactacagcgtgtgtgtgttgaaccccatcaagacttcggtcatgcgcaaggacaacatccgcaagaccaagactgacaaagtcgacacgttcctcattgccaggacgctcatggtgcaggattcctacaggttcgtctctttctatgaccttgacctgatggacctcaagcagctcggccgttttcgtcagaagaccatcaagcagcggacacgcttaaaaatccagctgacttcctatgtcgaccaggtcttccccgaactgcagtatttcttcaagtccggcctgcaccagaaagctgtttatgcacttttgaaagaggctcctacgccccaggacatcgcttccatgcatatgacccatctgagccatctcctcgtggctgcctcacacggccacttcaagaaagagcaggcaaaagaattaagggttctcgcacggaagtctgtcggcgccagtgacagcgcactatctattcagataacccactctattgcacagatcgagttactggatagccagttggacagtgtggaggcccagatggcagagatcatgaagttccatgattccgtcatcatgaccattccgggtatcggctacatcaacggcggaatgatacttggagagattggtgacatacaccgcttctccagccccaataagctgcttgccttcgccggtctggacccttctgtctatcagtctggcaattacagtgccaagcgcaccaggatgtccaaacgcggctccagagtgctcaggtacgcacttatgaacgcagcacacaatgtcgtgaagaacaacgccaccttcaaagggtactatgacaaaaagatggcggagggccggacacactataatgccctcgggcactgcgccggcaagctcgtcagggtcatctggaagatgctcactgacgaggtggaattcaacctcgattaagaggcctgaatatcaatatcgatagactttgaaaatgcacccttagggagctttattaaggttacccttttttaccaccgatacaaaaaagtaattttttgctaatttaggcttgacttttcatagctggt

SEQ ID NO: 6968 - DNA, 1620 bp, unidentified
  source 1..1620: mol_type = unassigned DNA; note = element_ad1d2cc
  misc_feature 1..3: note = core
  misc_feature 4..276: note = LE
  misc_feature 277..1467: note = CDS
  misc_feature 1468..1620: note = RE
  misc_feature 26..296: note = bridgeRNA
tttggtacaatattagcatagtcttgaactgctgaaccagtggtgacaggctatgcttatttttgtataataagaaggtaatggactgacggcacctccttggaactttgcgttcggaattgaaagcgtcagccgccttcttattatcaaattcgattaagcaggttgtacctgctgtgtgcgttcacagcagcgttcgcgtcacaaaccaaaatgaattttaataagctcctgagcggaaacattacaaatatatctcagaaagcaggtatcattatgatcagtgttggcattgatgtttcaaaaagcaagagtacggtttgcatcctaaagccctgtggtgaagttgtcaagccgccttttgaaatgaatcacactgccgatgaactcgattcattggtttctctgatcaattcatttgatgaggaaacccgcgttgttttagaagatacagggcattatcatctgcctgtagcctcttatctggcatcgcacaacatttttgtttgctgtgtcaatgctttgagaatgaaaaagtactgcgcacaaagcattcgccgtgccaagaccgacaagatcgacgctgcacacattgcctcctttggcatcacatactggtctgagctgacccaagcctatgatgctccggatacttatgatgagctgcgttttcttgcacggcaatattatcagttcacctctatccttgtaaaggcaaaggtgaatttcagcaatctgctggatcaggtcatgcccggcatttccgatcttcttcaaaatcagaaggacaaccataagctgactgaattcgtagaccgatacattcattttcagacgatcctcgatatgggagaaaagcggtttactgccgattactgcaaatgggcaaagaaaatgggataccgttgcaacgaacgaaaggcatcagagatctttgcccttgctcaaaacggtatcccatcgcttcctaactcccaatccgtcaaaattgccgttagagaagccataaagatgattcactcgacagaggaatcacgcaataccattttagcacaaatgcaggatctttgcaagaccttgcctgaatattatattgtcagagaaatgaattgcatcggagatgttcttgcgccgcgcatcattgccgagatcggcgatgtgcgccgtttcagaaacaagcacgccctgatcgcttatgccggcattgatgccccgccttaccaatctggtgcgtttagcgcttcggagcggaagatatccaaacgcggtaactcctatcttcgcaagaccggatacgagatcatgcagtcactgattaaacataagcctgctgccgatcctgtatatgactttatacagaaaaaacgcagcgagggtaaaagtggcaaggaagccatgattgcaggactgaacaagttccttcgtgtttactacggcaaggtcatggagctttactctgaaacatgattgttgtcagaagtacatactcatcaagcgtttgaaagctgtttttctgacgctgcctttgctatacccatcaacagtttccacgcatcaacactttcaacaaagcgcagctttcaactttggctgttttgcctattgatttttcttagcagg

SEQ ID NO: 6969 - DNA, 1387 bp, unidentified
  source 1..1387: mol_type = unassigned DNA; note = element_ad24379
  misc_feature 1: note = core
  misc_feature 2..87: note = LE
  misc_feature 88..1119: note = CDS
  misc_feature 1120..1387: note = RE
  misc_feature 1162..1382: note = bridgeRNA
caatgggatggactcctcctcacttcggcatcttgagtgccagactgaaggtgcgaaccacagtcaacagtgagaaggagtccacacatgaagtttatgcgcattggggtcgacctggccaagaacgtgtttcagatccacggtgtggattgccatgagcagccggtctggcggcagcggctgccacgtgatcgctggcttcaaacggtgctggaaaaggtcgaacctggttgtgagatcggcatggagagttgcggtggggcccatcattgggcgcggcaactcgaagctcgcggatttagagtcaagctgatcgccccccagttcgttaaaccttatgtcaaaagcaacaagaacgacgcgaacgatgccgaggcgatctgcgaagcgatgagccgtcccagcatgcgcttcgtcgccatcaagacgatcgaacaacaggatatccaggcgacgcatcgcatccgggccggcttaatcgaacagcggacggccaaagccaatcagatccgtgggctggttgccgagtacggcctcgttgcaccgaaggaattactgatgctgcgtcgtgcgatcccgtgctggctagaagatgcggataacggtttgacggcacgctttcgtcgtctgctggatggcttgtgggacgaccttcgtgcgctggatgaacgcgtatgcaaactcgacggcgagatcactgcgatcgcggcaagcgagccgtccgccgtccgtcttcaacagctgcgcggcgtcggcccaatgatcgccacagcgctcgtcgtcgctctcggtgatgcccgtcagtttgccaatggccgacagtttgccgcctcgctgggactgacaccgaggcaacacagttctggtggtaaggatcgattgctcggtatcagcaagcgcggtgatgcgtatctgcgaacattaatggtgcatggcgcacgctcggcgctacgcacagccaaatctaaagaggatcgactcagccagtgggccgttcgtttagccgagcgatcgcatcccaatgtggccgctattgcgctggccaacaaaactgcacgcatggcttgggcgatgctgcgtcacggcactgattaccaaccggatcaggcagcggcctgatctatttacccgacgtgttccacgtgagaaacaactcttaaccacgattgcaaagcaacctgaactatggcaaaccggtcgaaccggcgtcggcaaaaccctctaatgtctaagtgcgaaaagcacgaaaaagcaatcgggagctgacgcgcgaatagcccatcatggccctgcatcgaaacgttgccgtatttagaggccgaatatacgtgtgcagtcggcacgggcgccaaagcaacggggcttgcaatgaggaggagtccatata

SEQ ID NO: 6970 - DNA, 1590 bp, unidentified
  source 1..1590: mol_type = unassigned DNA; note = element_ad2765a
  misc_feature 1..2: note = core
  misc_feature 3..267: note = LE
  misc_feature 268..1470: note = CDS
  misc_feature 1471..1590: note = RE
  misc_feature 32..287: note = bridgeRNA
ttagtaccataaaagtgtagttgttagagagtaattaactctaacatctacacttattttattataataagggaagtagttggtatgacatattgccattaggattttcacatccgtgaatgaaaccgtcagccatccccttattataaacattcatttaagcaggttgaaactcgcaggagctttcgcgtaacgaactaaactgaatcataataagtgtagatgggataaacaactgcaattctataaaaagaaaaggagtatattatgatcagcgtaggaattgatgtatcaaaagggaaaagtacagtatgtattttgaaaccatatggagagattgttagtaagcctttcaatattacccatacccaaaaggatttaagcgaattatcttccatgcttttcagactaaatgatgaagtcaaaatcgttatggaagcaaccggaatttatcatcttccagttcttacatatttacaggaaaaaggattttttgtttctgtaattaatccgtatcttatgaaaagttatcgtaacgaaagtctgcgaaaagccaaaaccgacaagattgattcccgtatcattgctaattatggaattgatcattggtttaaaatgaaagaatttcaaacttctggagagatttatgaagagttgaagttgcttggacagcaatatcggcattatatgaagcttcatcttttatctctcgctgaattgacccatcttttagatttgaccatgcctggaataaagaatcttcttgcaagttggaatgaaacaaatcggaaagataaaagaagtgattttgtggaacgtttttggcattatgatgtaataacatctatgtctgaacaggaatttactgaagagtatatactttgggcaaaagaaaagaaatacgtcccaagccaggaaaaagccaaagttatatacaccctggctcaggaaagtattcccacattaccttcagaaacctcatcggtcaaaatactggtgactgaagcagttcgggtgctcaaggaagttgatgcaacccttggtctaattttatcacggatgcaggaaatagccaagactttgccagaatattcggttgtaagagaaatgggtggagtgggaaatacattagccccaaagttaattgcagaaataggagatgttcgcagatttcgcaacgggaaggcattggttgcattcgcaggaattgatccaccaccatatgaatctggtcaatttgtaggttgtaataggaaaatctcgaaacgtggttcagcatcattgcgcaaagtaggatacgaaacaatgagaagtttaaaaatgcgttccagaccagaagatccggtttaccgatatgttgtaaaaaaggaatcagaaggtaaaagtaaaaaagcagcaaagatagccggattaaataagtttttacgcatttattatgctcgagtaaccgaactatataaaaatatataatcttatataaaataaataattttttagactgccaatcagacagtctatttgtggtacgcaaatatattttgtgacagaaaataaaaaagataaaaataattattgacttttcttagcagg

SEQ ID NO: 6971 - DNA, 1410 bp, unidentified
  source 1..1410: mol_type = unassigned DNA; note = element_ad2f6e1
  misc_feature 1: note = core
  misc_feature 2..80: note = LE
  misc_feature 81..1145: note = CDS
  misc_feature 1146..1410: note = RE
  misc_feature 1179..1401: note = bridgeRNA
taatgggatggacccgccgtgctcctgccccagccagccgcatagctggttcggggctacagaagaatcaggagcattccatgccacacaacaccagtcgccttgaagccgttgcaacaatcggcatcgacatcggcaagaacacgttccatctcatcggtctcgaccggaatggcgcgatcgttctgcgccagaagctttcgcgccggcaaatcgaggctcggctcgcgaatacgccgccctgcctcatcggcatggaggcgtgcgttggggcgcatcacctgggccggcaactcaaggcgtacggccacgatgcgcggttgatgcctgcccggtatgtgcgaccttattcgaaagggcagaagaacgacttccgcgacgcagaagcgatcgctgaagccgtgttgcgtccaaccatgaagtttgtcgccatcaagacggtcgagcaactcgatctgcaggcgctgcatcgggtgcgcgaacggctggtttgccagcgcaccagtgtgatcaaccagatccgcgccttcctgctcgaacgcggcattgcggtgcgccaagggccgtcggcattgcgcagcgagatacccattgttctcagcatgacggataaactttcgccccgcatgatccagatgatcgaagatctttgcgcggactggcgctatctcgatgagcgcatcgagaccgtgtcggacgagatcaaaacgctgtccgagcaggacgagggagccaagcgtctcatgaccgtgccgggcattggcccgatcatctcgaccgcaacagtcgctgcgatcggcaacggcgatgcgttctccaagggcagagatttcggcgcttggctcggactcgtgccgcgacagatgtcaaccggggggcgcacggtgctcggaccgatctccaaacggggcaatcgctatttgcgtatgctattcgtgcaggcagcacatgccgttctgctgcacccacagtgctgggagaggcacggtcttaaatcgtggatcgcggctgcagcccgacggctcaatcggttcaagttggcgattgcgctcgccaacaaactcgctcgcatcgcctggggcgttcttcacggcggtcgtagttttgaggtcagatcgatgaagccagcggcgcaatgcctatgatcgccagaaacggcatgtgagccgcaatcgtttccccaccgaggtctgcgagagaaagagaagagatggagaattggtcttcccggcgcatccgagaactggcccccgaaatagcccttagaggcatggccgctaacaagatcggatgcgcgcggatttccatgatggtccggagcacgagctccaaagcgaggcctgatacattggtgcaagaccgtactccaggctcaccgttttctcttgcaacgcacggcgggtccataca

SEQ ID NO: 6972 - DNA, 1384 bp, unidentified
  source 1..1384: mol_type = unassigned DNA; note = element_ad31bb8
  misc_feature 1..3: note = core
  misc_feature 4..85: note = LE
  misc_feature 86..1114: note = CDS
  misc_feature 1115..1384: note = RE
  misc_feature 1088..1371: note = bridgeRNA
tgatggagtggatgccccctcctgacggcatcgtgatgtgccaaggtggcgatgtttgcgcatcccacgaacaaagagggcatccatggagaaggctaacatcatcggtctcgaccttgcaaagcggtcctttcaggcccacggcgcccgcgccgatggcggcgtggtgttccgcaagaagctttcgcgtgagaaggttctcgccttccttgccgagcagtcgcgctgcattgtcgccatggaggcctgtggaagcgctcatcactgggggcgcgcgatcggcgacctggggcacgaggttcgtttgattccgccggtctatgtcaaacctttcgtcaagcgccagaagaacgacgcggccgatgcggaggcgatctgcgaggcggcgggccggccgaccatgcgcttcgtcgcggtcaaaaccgaggaacagcaggcacgcgccatgctgtttcgcacccgcgatcttcttgtgcgccagcgcacgcaactgatcaacgcgctgcgcggtcatttagccgagcatggcgtcgtggcgccgcaagggccagcgaacgtgaaggttctctcagaggcgatcgaggagatgacgacatcgcttccgcttctcgtcgtggagttgtcgcgcgttttcctcgatcagatcgatgggctgtcgacgaagatcgccgaactcgagaaggcgacggttcacgaagccgcgcgcggcgcgacaacccgccgcctgcaaaccatgcccggcgtcgggccgatcacggccatggcgatcgagaccttcgcgccgccgatgaccaccttcaaacgcggacgcgacttcgccgcttggctcgggcttgttccccggcagcattcgaccggcggcaagcagcttctcggaaaaacgtcgaagatgggacaacgcgacattcggcgattgctgatcatcggcgcgatcgctgttgtgcgctgggcctgccggaagggagcgccagacggaacgtggctccatcgcatgctggcacgcaagccgcgcatgctcgtggcaatcgcgctcgccaacaagatggcgcgttcgatctgggccatgctgacaaagggcgaggattatcgggctcccatagccgtaaccctctgatcatcgatcagacggggcgaccaagggaatgtcgggcgtgtgaggaggtcgacgaacggtaaggtcaaatgatcggtcagatccggatctggaaaagcattaaattccaaggagcttacagctcgcgtggttgaaccgcgccaggtccgctcatctccataccggccagcggtcgtgacaggccgcatatcgaggcctgatacatgaccgcacccgatcacacgatcacaccgctcaaaaacttcttgcgcgaacgggggcatccataca

SEQ ID NO: 6973 - DNA, 1297 bp, unidentified
  source 1..1297: mol_type = unassigned DNA; note = element_ad3508f
  misc_feature 1..3: note = core
  misc_feature 4..215: note = LE
  misc_feature 216..1151: note = CDS
  misc_feature 1152..1297: note = RE
  misc_feature 16..191: note = bridgeRNA
gcttgtgtcttgagaggggattagaattaggagtgagagcggtgaatggcaagctgaatgccgaaggtgccttgagcacgtgtgggagcacaagctgccattcaccgttccactttggcgagagcccgaacagttggatgagggcctaatctcgaaccacaagcgtgggccaagccaaagctctctcacactgttaagtctaggaggttttggtgatggcttccttcttgggtatcgatgtatccagtctttcccttgatgcactggtgcggccccagggcatcaagatcagcgtgcgcaatgatccagcgggctttgaggaactggtgaagagccttcgagggctcagcatcaagcgcgtcttgctggaagctacaggcggctacgagcgtgatgtcatgcgctttctccaagacgccagctacaaggtcatacgcgtaaaccccacacgagccagatcgttcgcggattccttgggtatcaaggccaagaccgatgccatcgacgccgcagtgctggcccatttcgctgaggtcattccagacaagccaaccctgaagacaagccctgaaagggccctgttacgggaactccttcagcagcgtgatcgcctagtccaacagcgagatgacgaccggcggcgcctgaagcaggctcagtcagcgatggtcgccattttcctgaacaccaatctccagcactttgcctcgcagataaagttggtggagcaagcgatcaagcagcaggccacagcgctcaacgatgaacggattgccaaattggacgaagtcaaaggcatcgggatggtaaccgcgaccaagctggtagcgctcttgccggaactggggcatgtggagtccagggaaatagcctctttggtcggtgtggcccccttcaatcacgacagcggaaagtccgtgggcaagcgctttatttcaggaggccgatttgaggtcaggcgtgcgctgtacatggcgtgcctggtggcggtgaaacataatccaacgctcaaagcccgatatgaagcgctgcgtgggcgggggaaacttgccaaggttgcgattgtggcctgcatgagaatcttcatcgtgcgcctcaacgcgatgctcagatcgggcacgccgtggcgggatgacttaccgcagccatgaaaacatagcgcagctcaaatcagggtgggagcaggtttacccgcgaagaagacaccgtgtggatggcacgggcttcgcccgtgttcgcggggcaagcccgctcccacagggatcgcgccagcttttagaagttgagcaagacagtt

SEQ ID NO: 6974 - DNA, 1505 bp, unidentified
  source 1..1505: mol_type = unassigned DNA; note = element_ad357f7
  misc_feature 1..2: note = core
  misc_feature 3..214: note = LE
  misc_feature 215..1489: note = CDS
  misc_feature 1490..1505: note = RE
  misc_feature 7..210: note = bridgeRNA
ctgataggactaccttccttcatggctgggacctccgaggaacgctccagtcgcttgtcctgcgaggactaaaatgagacggcgtcctcggaggttgtagccggaggcttgtcgtcttggaggatgtcgtccctatgaggactggtttatcagcacgacgcagcgcctcccgctccagtcgtttcatccctgaacgcgagaggagacgggccgcatgctcggcgtgggaatcgattgggccgagtcgtttcacgacgtggcagtgggtcaccccggaaagggcgtgatcgaacagttccgcatcgatcacaccgccgccggtgtccaccggttggtcacccgctgcctggaactggaacctgacccggccgagatccgagtcgtgctggaaacccggcacggcctgctggtcgaatcgctcgtggacgcgggattcaccgtgctgccggtcaacccggacctggtcgcccgccgccgcggaccggcgaagaagaaagacgacgccgaggacgcgagaatctgctgtctgatggcgctggaccagttcctggaactgcgcaaactgatcccgcacggcgagctggccggagagctgcggtcgatcactcgtgacgacgaacgcgcttcccgcgacgagcgccgtctgctcaaccggctgcgcgccgacctgctcacgacctttcccgcagcgctggcgatcgccggtgacgatctcggctccccggtcatgctgaagttgctggcccgctggcctggccaccggcaactcgcggcggccggcgccgaggagctcgaggcgttcgcccgcgccgccaagcacggctggcccgcccgcttcgccgcacgggtgaccgacgccctggccgccgaacagctgtccacacaggactatctggtgcgggcgaaggaaaccaccatcgccctgacagccacccagttgctcgctctgcgccaagcgcggaaagcctgggaacgaagaatgggcgagcttctgctcggctccgcccgctacggacgggcgaaacaaccgaaggatcccgatccgggaaaagcgataccgggcggtgacatctacctgagcttccccggtctcggggacatcctcgccgcccggatcgccggagagatcggtgaccacatcgaccagttcgactcgcccagcggactgcagtgctacgcgggcaccgcgcccgtcacccgccgctcgggacgcagcgagctgactgtcgcccgccgcctggcccacaaccgctatctcggcaacgccgtctatcaatgggccttctgcagcctgaccaaatcccggtgggcacgagagttctacgacaccaagatcgcgatgggtaaaggacaccacgcggtcctgcgcgccctggggaaccggtggctggaaatcctgtggcactgcctcatgaaaggcacccgctacgacgagaccattcacgtccgcaatcgccagcaggccctcggccctcgagcagccgcctgaggttgacagaggatgt

SEQ ID NO: 6975 - DNA, 1376 bp, unidentified
  source 1..1376: mol_type = unassigned DNA; note = element_ad358dd
  misc_feature 1..2: note = core
  misc_feature 3..222: note = LE
  misc_feature 223..1218: note = CDS
  misc_feature 1219..1376: note = RE
  misc_feature 6..210: note = bridgeRNA
catttacatttgcagtattaaatatcacaacaaaatataagtgtatatttgaaaagtagagttgcagtgaactaactttgacactagtcttaaatgactataggctgaatcagactgcaactctcttaataggagaacctagccagttagaattgtaggctcacgacctaataaatgtattagctgtttctccttcatgtttaatactgtaaatacaaagttatgaattattctcattttgtaggtcttgatgtaggaaaaaaaactttcgatgcatcattaatgtccgcagacgaaaaagagttgtctcacaagtcttttgataacactccaactgggatccaatctttattggattggatagctggttatcatctctctttatccaaactcttgttctgtgctgaaaacatgggaagttatgtcacagagttatctgtttccagtgtctccatgggattttccctggctttggtttgcccgttgaccatcaagaagtccataggcttgcaacgaggcaaaaatgaccgcattgatgccaaaagaatagcgaactatgcggtattacactatcgaaaactggagttatacaaattgcctgacaaagacttggtgagactgcggggatggattattatacgtgacaatttggtcaagcaaaaagtatcaagcataaagttattggaaacattctcctggatggctaagttggctgatgtgacagaatccatttcttttttggaagagcagctcaagtcgataaaagaaagaatcctggaggtggaagaggatatggagcaactaatagccgccagtacatcgctttacacaaactacttgctattaagaagtataaaaggaataggaattatcaatgccattgtattactgtgtgttactgacaattttcaaagatttgacaacccgaggaaatttgcctgctattgtgggggcgccccatttgaacatacttcaggtatttccatacggggaaaaacgcagacttcttcattggctaacaaagaagtaaaagtataccttacccgggcagctattactgccatctcttgggatccgcagatgaaagcatactataaaaggaaaatagcagaggggaaacataaagcagctgtaatcaatgctgtaagagccaaaatcatagcaaggtcttttgctgtgatacgaaggcagactccatttgtaacattagccgtataataaaaaggtccttaacttcgaaaatatcttaggtttaggaagtagctatacacttctgaagagtaggtatgtctatatacaaacttacccaaggatacgttaatgttcgtaaacttgggtaagattttatagatattgtttggagaggacttagaatt

SEQ ID NO: 6976 - DNA, 1312 bp, unidentified
  source 1..1312: mol_type = unassigned DNA; note = element_ad3a1b8
  misc_feature 1..2: note = core
  misc_feature 3..67: note = LE
  misc_feature 68..1084: note = CDS
  misc_feature 1085..1312: note = RE
  misc_feature 1086..1306: note = bridgeRNA
ttaattagatggtccgcctcacgcctaagctatacttagggtaggctaatcaaagaggcgaaccatcatgtctattattaaagtaattgggatcgatttaggcaaatcttcttttcatcttgttgggcatgatcacactggtcgtgaacaatttcgtaaacatttaactcgtttaaagctcattcaatttctgtcacaaacacctaaaacaatgattgcaatggaatcatgtggcggttcccaatggttggcaagaaaatgccaagcactgggtcatgaggttaagctcattcctccccaatatgttaagccttacgttaaaacgaataaaaatgattatattgatgccgatgcaatagcagaagcatgcacaagaccatcgatgcgttttgttggtgtcaaaacagagacctcacaagtcatcagcgttattcagcgagttaggtctagttatatcaaagagcggacagcgtgtatgtcacgcattggagcaattttactcgagtttggcatgagctttcctagagggcatgccaaaatgaaagtgttattccaatggcttgccgataacggcgaaccgcttccaaccatgttgatgcaagaattaattgaacaccacgagtattacttactgcttaatgagcgtatagcagggcaagataaaaagcttaaacagcttgtcgagcaagatgtgcgagcgcagctattaaagacgatccctggggtgggagatttaaccgcagctcagtgtttggccgatatctcagatgtcacgcattttaaaaatggccgtcaaatggccgcatggataggattagttcctcatcaatattcaacgggagggaagtcaaccttgctcgggataagtaagcgtggaaataaggcgttaagaacgttgtttattcatggtgctcgagcgatgttatcaaggccagaaaaagcggtggccgtatttggagaatggatacttgagctcagagcgaggaagccatttaatgtagccgtcgttgcattagcgaataagttggtacgaatagcgtggtcggtattatcgaccaagcaagcatttgaaataagagtttaacccgagtttgcagatgatagagaagatgacagaacggtcagaccactagattgaagacctgacacaaaaaacagcaccgaaagtatgctttgggctttttgaggacaatctagcgcggaactcatcgtggagcgggtggtaaagcacctaatgaagattccgaatacattagcgcaaaccaacctcgttatcgaaaatatcatttgcaataacgaggcggaccataca

SEQ ID NO: 6977 - DNA, 1355 bp, unidentified
  source 1..1355: mol_type = unassigned DNA; note = element_ad3cb47
  misc_feature 1..3: note = core
  misc_feature 4..246: note = LE
  misc_feature 247..1029: note = CDS
  misc_feature 1030..1355: note = RE
  misc_feature 3..220: note = bridgeRNA
cttatattatatttagcgcagttagctactgccaaagcccaagtggtatacttggaataagccactgtggattagtttattccctccaatcgcttgacgatttccgaaaggctctaaccacagttttttgtttcaattggtaatgagtttgataacgcatagacgttttatctcgtctaaggtaacaaggcaaaaaattcgtggataaccaagtagacttgaaatactacatctggaggtactcccatgctttatgtgggcattgatgtcgctaaaaataaacacgatgttacagccttgaatgttccaggaaaaactgttcttaaaccactcactttttcaaataataaagctggttttgaactcttagatctgtcttttcgacagctcaaccaagactgtctcatcgctcttaaacttctttctgaccccaatcgtgaacaatttcaacacgataatcggcaagtagaactaaaaatactggctagacatattcatcgtctcaagaaaaaacagtctgattggaaagtacaatacactcgttgtcttgatatcatctttcctgagttggataaaatcgttggaaagcattcagaatatacctaccaactcttgacacgctaccctaatcctcagaaaaggcttgaggcaggatttgataagctgatagaaattaagcgattgaccgcttctaaaattcaggatatcctctcagtcgcacctcgttctatcggaacaacatctcctgctcgtgaattcgaaatcatcaaacattacaagaggctcattgacaaggcggaaacatgtgtcaatgacttgatggctgagttcaactcggtcataacgacggttactgggattgggaatcgtttaggggcggtcattttagccgagattcgaaatattcatgcctttgataatcctgctcaattacaagctttcgctggactggattcttctatttatcagtcaggtcagattgatttagctggaagaatggtcaaacggggttcccctcatctgcggtaggtactcatacaagctgccaaagcatgccctcgcttttcgcctgcttttaaggcctatcttaagactaaattagaacaaggaaaacattacaatgtagccatcatccaccttgcaaaaaaacttatccgaaccctgttttatatcctaaaaaagagctgccatttgacgaacaaaaagtgatgtaatttctgaaattaacacaggattacctttgaaaaaatggactttttcaagggctttttgccgtgctctaaaatcatcgccaaatcatcaaattgaaataagaaatagtttagataaaactattgacttttcttatagtttgt

SEQ ID NO: 6978 - DNA, 1140 bp, unidentified
  source 1..1140: mol_type = unassigned DNA; note = element_ad3e9cf
  misc_feature 1..2: note = core
  misc_feature 3..168: note = LE
  misc_feature 169..1125: note = CDS
  misc_feature 1126..1140: note = RE
  misc_feature 10..183: note = bridgeRNA
cttgtatctttaagcctcggaccggctcgggtagcccgaggcgcctctgggttgatgtttgaagcccgtgcctgagcactgggcgcctgggccggaccgtccttctctgcagcccgaacggttgtaggaacttgaagttcgcatagacaaggatgggagtgagaggacgtgtccgactctgttttcgtaggtatcgacgtgtccagccaaacgctggaggtggccagcagcgccgcggccaagacctggcaggtcagcaacgacgctgtgggtattgagcagttgacggcgcagctgagctcgcggcagccggcgctggtggtgctggaagcgacgggaggttatgaattcgaggccgcttgcgccttgcaggccagcggcctggcggtggccgtggtgaacccgcgcacggcacgggacttcgcccgcgcgatgggggcgctggccaagacggatgcgctggatgcgcgcatgttggcggccttcgcccgcgtgcttcaccagcaccccgaacgcgagcgcttcgtcaagccgctggccgacgccgagctgcagcgcctgcaggcattggtgctgcgtcggcgccagctcgtgcagatgattacgtccgagcgccagcgcatgcgtgtatcgcacgcggccgcgcgcccgagcatcgagcgagtgatcgagttcctcaagactgaactcggcgacagcgatgcggatgtggcggctcatgtgggccagcaccatgccacgctggcgcaggccctggccagcgtgcccggcatcggtgcggccagtgtggccgtgctgttggcggaactgccggagctgggcaagctggaccggcgccgcatcgctgcactggtgggcgtggcgccgctcaaccgcgactccgggcagatgcgcggccagcgctcgatctggggcggacgcgctgatgtgcgccgaacgctctacatggccacactgaccgcggtgcgccacaacgcgcccttgaaggcccattacgagcgtctcttggccgtcggcaagcgcaaaaaagtcgccctcgtggcctgcatgcgcaagctgctgaccatgctcaacgccattgccaagaacggctcgagttgggatccgtctctgcatcaagcttgactttcaagacggttg

SEQ ID NO: 6979 - DNA, 1681 bp, unidentified
  source 1..1681: mol_type = unassigned DNA; note = element_ad422a6
  misc_feature 1..3: note = core
  misc_feature 4..249: note = LE
  misc_feature 250..1464: note = CDS
  misc_feature 1465..1681: note = RE
cttatacattaaactaagaacaagccctctcgacacagggccggaacaagagtacacttgttctaggaacctattgaacccggaaggcgaaagtctacttcctccacccggttcgaccgattgagaaagctcgcacttcgccttcttccattcctgagcggaagcgatcatgagagagtcgcgcttcgagcgccacagtataagggcacgcgtgctcaggaaccgatctgacagagaggagcatgtttcatgtggtataccggtattgactgggcggacgagcatcacgacgctctggcgctggatgagcagggtcggcgggtgggatcgctgcgggtggatcacactgccaaaggacttgccgccttgaacacctttttggaacagatcatcggctcgcaccccaaggaggagatggcctgcatcattgagacgactcatggtctgctgattacgtctctgttggaggcaggatggaccatctaccctgtcaaccctcgcaccgtcgatcgccgacgagccgcatcgggagccaagacggataccattgatgcttacttgttggcgaagaccggacgagccgactttgccgatttgcatcgtctcaccccagacagcgagaaggtggcggaactcaagcaactgacgcgtgatcaggagagcttgatccacctgcaaacccgcctggtgaatcagctcaccgcttgcctcaaagcgtattatcccgtggcactggatctctttgggaaattgcaacaaaagagcacgctgctcttcttgcagacgtatccaaccccacaagctgcacaagccgcctcggtgcaacagatccaggaactgctgagatcctgcaggcatcccaaggcaaaggcttcggctgtttcgattgtggagcaggtgcatcaaccgacattgcaggccgatagcgtgacgatccgcaccaagtcgcgtctgatgctggtgctggtgagtcaactgctgccgttgattgagcaaattgctcagtatgaccaggagattgacaccctttttttgacccatgaggaccatgagatctttgaaagcttgcccagggctggccaacgcctggctccgcgactcctggcagaaatcggtgatgatcgagctcgttatcaggatgccagcagtttgcaagcgctgggaggaacttcgccggtgctctttcaaagtgggatgtactccaaagcgcatcgccggttgggctgtatcaaaccgctgcgtaatacgctgcatacctttgcttggcagacgacccagagtgaagcatgggccagagactactaccaacgaaagcgagcagaaggtaaaagccataccgtggcagtacgagcgctggccaacgtgtgggtcaggatcatctttgccatctggctgcatcgagagtgttatcagacggccacctttgaactggcacaacagcaccatgcacgcagagctgcttagggctccacctcgcatcgggcggctcgcggctttcgcgtgaagagcgaagagatggggtgatttttcgcttttcacttgatacgtcttgatcctcccacgcaagcgagcggcgtggactaccgtcttgtgctcagttgccaccattgcttcccctcccttctctgtattttttctgccttccccaaattggtcccaaaaagacttgactatagagagt

SEQ ID NO: 6980 - DNA, 1354 bp, unidentified
  source 1..1354: mol_type = unassigned DNA; note = element_ad46335
  misc_feature 1: note = core
  misc_feature 2..69: note = LE
  misc_feature 70..1101: note = CDS
  misc_feature 1102..1354: note = RE
  misc_feature 1104..1344: note = bridgeRNA
tatggaatggctcgccccttaccgtcggcgcatgattgcgttggttgagcgtggcagggaggtgggccgatgaatgatatcaaggttcttggtatcgatctgggtaaggatatctgcagcgtcgtcggtctggacgatgccggtcaggtgttgctgcggcgtcgaatgcgtcgtgacagcgtgctgaagctagcggcaggattgccagcctgcgtgatgtcgatggaagcctgttgtggcgcccatcatcttggtcgtcagctgagagaacagggtcacgacgtccggctgatgtcgccggaatatgttcgcccgtacgtgaaagcgcaaaagaacgatgatcgggatgccgaggcgattgcggaggcggcgacccgcccgacgatgcgctttgtcgatctgaaaactgacgagcaactcgacatgcagagcctgcatcgagcacgggaccgactgatcggagagcgcacgacgctgatcaaccagctccgcgcggtccttctcgaacgtggaattgtgatcgcaaaaggacggcgcaagctcgaaatccagctcgaccgacttctcgcaggcgagatcgcgatcagcggccggatcaggatactgatcgaggacatgcggaacgaatggcgcgctctcgacgaacggatcggagcgttcgatgtcgaatttgcgaacctggcccgcacggatgcttcgatgaggctgctggcgacgatccctgggatcggcccactaaacgcgaccgctttggtagcttcggtcggaagggccgagacgttcaaccgtggtcgagatcttgcggcctggctaggactcgtcccacgacagatgacgaccgggggcaagccgcagcttctcggaatcaccaaacgtggcaacggttatctcaggcggatgttgatccacggagcgcgagcagccctgccgtccctggccaggggtaagacgctgatgggggaatggctgcgcggactgctgtcgcgagcgcacatgaacacggctgtcgtcgcgcttgcagcgaagatggccaggatcatctgggcggtgttgagaagcgggcgacccttcgatctgaaggctacgtcgtcgacagcatgatcgagttcggccggaagggcacccttctggctggcgttgtctgtgagtggattggaaagatggcctgacagttgaacggtgtgccgaaatcctgaccaaaaaaatggcgtctgacgccgtgaagtttatgaggatcggtacgcgcgtaagctccatcttggccggggacaatcatcagcccccgagaccggatacgttggcgcagactgaaaagccggaaagaaaatcccttgcagtcggggcgagccatacg

SEQ ID NO: 6981 - DNA, 1172 bp, unidentified
  source 1..1172: mol_type = unassigned DNA; note = element_ad484e9
  misc_feature 1..2: note = core
  misc_feature 3..206: note = LE
  misc_feature 207..1160: note = CDS
  misc_feature 1161..1172: note = RE
  misc_feature 3..182: note = bridgeRNA
cttgtatggttagacttgaaggggtggtgggactaaatgcccgattctgactgttcgcagcagtacagaccgtgggagacatcgccccacctcttccaccaaagcgccgataaagaatgcatcgtttgcaagcgacgatagaagcaagccagcgcctcttggtgaaaccccttcaagccgaaaaaccataacgtgaggagccgcccatggcaatgcaggtaggaaagttgattgtgggtgcggatgtcgcaaaagctgagctggttatccaccacgatgatcgcgatgaaattatcagactgaaaaactccaaacccgaaatcaaacgctggctgaaacagcagcccctcaatactgcaattgctgttgaggcgaccaatgtctaccacctggacttggttgagcaggcccatagcctgggtttcgaggtttatgtcattgatggctttcaactgagcaactaccgaaaaagcgttggaggccgggttaaaactgacccttccgatgctcgattgctgtcccgttttctgaaaaatgaaggcgaggaccttcgcccttggagcccccctccagcggtctacggcaagcttcagagccttctgcgacgcagagccgccctggtgactgctcgcactgcgatgacccagagctgggctaacgaaagcctcttgcaagccgccttcgaaacctttgtgaaatcaatagatcggctggacaagttgatccaacagaagatcaaggaagtgttgcgagaagctgggctgcaggagcaagtcgctcgctgtcaggcagtagagggcattggttttctcaccgccgcagcattggtgatggcttttatgaggggcgaattcaaaagtagcgactcgtacatcgcctttttgggaatggatttacgggttagtgattctggacagaaaaatggacggcgtcgtctcaccaagcgaggttgctcagaaattcgtcgcctattgcataacgctgcgatggcagccagcagatcggccgcttggaaagggctttatgaacagcaccggaaatctggtaaagcaacaactcaagctctggtaatcctggctagaaagctcgcgcgggtggcattcgccctgatgaaaaatcaggacgaatacgtcaccaaaggtgggaaactggcttgctgaaaaccatagaat

SEQ ID NO: 6982 - DNA, 1390 bp, unidentified
  source 1..1390: mol_type = unassigned DNA; note = element_ad5ef33
  misc_feature 1..2: note = core
  misc_feature 3..89: note = LE
  misc_feature 90..1118: note = CDS
  misc_feature 1119..1390: note = RE
  misc_feature 1089..1376: note = bridgeRNA
agatgggatggttgccgccctcccccaacggcatcgcaatgtgccaggatggtggttcgttagggccaccgagcggagaggacggcggaatgtacgatactatgattggcattgatctggcaaaaaatgtatttcagcttcacggggcatcgatgatgggggaagtgaagttccgcaagaaaattggccgcgtgcaatttctcaggtttatggaagcgcagccgccatgcgtcgcggttatggagtcgtgcggtagcgcgcatttctgggcgcgcgagctggtgaagcttggacatgcagtcaagctaatcgccccgcaatatgtgcggccctttgtcaaaaggcagaagaatgatgctgcagatgccgaggcgattgtcactgccgcgcagcgtcccgaaatgcgctttgtcgaaccaaagacggaagctcagcaagcacgagcgatcttattccgcgcacgcgagcgcatcgtccatcagcgcaccgaactggtcaatgctttgcgcgccgtgctctacgaatacggtcatgtcgttccgttggggatcagtcatatcaagcgtatcgaggccattctcgatgaaataggcaatgatctgcctcagctcgtccaggaagagtgccgcgatcttttggctcagattgcggagaagaccgccaggatcgatgataagacaaagaaaattggagaggtcgccaagcagacggatatcgcgcagcggcttcagaccatgcccggcgtcggcccgatgacggcaatggccgttgaagccttcgcgccggcaatgagaagcttccgtcgcggccgtgattttgcggcatggcttggtcttgtcccaaaacagttttcctccggcgggaaagagcgccttggccgcgtttccaaagctgggcaggccgacattcgcaggttgctgatcattggcgcgatgtcgcgcatcacatggatgggtcgtaaacggattgctgacggttcgtggctggcccggatgctggcaagaaagccgcgcatgctggtggcgatcgctctcgcaaacaagatggcgcgggcgatctgggccatgctggcgaagggtgaaaattatcgagttccggcgtcgggcatggctgtatgaacttcatgcagagcatgcctgagtaacgcagggagacgggtgtgagaaggcaatgaccagaatgggcgcatgatcgaaccgatcgggacgggaaaaccagtttggcactttgagcatgcaagctcggaattaagatttggacccgctccgcagatcaccataccggccggcggcctttggaagcgtcgcaacgaaaggcctgacagaagaccgcactcgatcacacgcacaaaaggtcagaaacttcttgcaaaacgggcggcaaccacaga

SEQ ID NO: 6983 - DNA, 1499 bp, unidentified
  source 1..1499: mol_type = unassigned DNA; note = element_ad63805
  misc_feature 1..2: note = core
  misc_feature 3..243: note = LE
  misc_feature 244..1479: note = CDS
  misc_feature 1480..1499: note = RE
  misc_feature 15..227: note = bridgeRNA
ctaataactgttgtcgggtcggccatccggcagactcggttgaaggtggccgccggcaggtgagcacttgttgctcctgggcttcgagccctgcgcaaagatcgtgcccctgccggctgccgggagagttgatcgctgctgggatgtcgtgcccgccgggtggcgtgagcacagttttattaggtcgctgatagttctcccgctggctgctgactggattcggcattgcgatcgggaggcttgatgcggctgctggtgggtgatgactgggctgaggaccatcacgatgtggaggtgatgagcgaggccgggaaggtactggcgcggcggcggctgcccgagggcgtggccgggatcgcgcagttgcacgcgctggtcggcgcgcagctgggcgatgacgcggatgaggcggaggtggccgtcgggatcgagaccgaccgcggcccgtgggtggcggcgctgatcgccgctggctacctggtgttcccggtgaacccgctgcaggcgtcccggtaccgggaacggcacggcgtgtcgcgggccaagagcgacgccggcgacgcgcacatgctggctgacatggtgcgcaccgactcccaccagctgcgcccggcggccggcgactccccggaggccgaggcggtcaaggtcctggcccgcgcgcacaagacgctgatctgggaacggacccgtgcggtgcagcggctgcggcaccagctgctcgggtacttccccgccgcgctggaggccttcgaggacctggacgcccccgacgcgctggaactgctcgcgaaggcgcccgagccggcgcgggccgcgaggctgacccgcgcccaggtgagcgccgcgctcaagcgcgcccgccgccggaacatcaaggacaagacggatgcgatcctcgcggcgctgcgcggggagcacctgggccagcccgagatcctgacagccgcctacgccgcaaccgtccggtccctgatcgcggtcatcaccaccctcaacgagcaggtcaagaccttgcaagggcaggtgggggagcattttggccggcacccggacgctgagatcatcttgtcccagcccgggctgggaccggtcctcggcgcccgggtgctcgcagaattcggcgacgatccccgccgctaccgcgacggcaaggcccgccgcaactacgccgccaccagccccgtcacccgcgcctccgggaagaagaaggtcatcaccgcccggttcatccacaacgaccggctcgtcgacgcgctcaacgcccaggccttcgccgccctgaacgcctcgcccggcgcccgcgccctctacgacgagctccgcgcccgcggcatcgagcacaacgacgcgctcaggcggctggcgaaccggctggtcggcatcctgcacggatgcctcaagacccgcaccctctacgccgaggccacggcctggggacatcgcggaaacctccctcaatctccaccagcagcttgacatctaagcccctgggatgt

SEQ ID NO: 6984 - DNA, 1364 bp, unidentified; identical to SEQ ID NO: 148
  source 1..1364: mol_type = unassigned DNA; note = element_ad6a5ef
  misc_feature 1..2: note = core
  misc_feature 3..75: note = LE
  misc_feature 76..1107: note = CDS
  misc_feature 1108..1364: note = RE
  misc_feature 1080..1352: note = bridgeRNA

SEQ ID NO: 6985 - DNA, 1475 bp, unidentified
  source 1..1475: mol_type = unassigned DNA; note = element_ad72ff3
  misc_feature 1..2: note = core
  misc_feature 3..83: note = LE
  misc_feature 84..1148: note = CDS
  misc_feature 1149..1475: note = RE
  misc_feature 1224..1462: note = bridgeRNA
tgttggtgtggacggccccacccgacggcatctgtgtgccaagatggagtcgtgtgcagctcgatctgagggagggaccgtccatgaaggattttagcgcaatcggcatcgatacgtccaaggctcatttcgcggtctccggcgcggacgccgggggcagggaggtctggcgcgagggcgggactccggcgcgcatcatgaagaagctcgccgcgctgccgccgacgctgatcgggatcgaggcgtgccagggcgcgcatgcgctcgcgcgcgagctcgtcgcgatggggcacgacgcccgcatcgtgccgccgcagctcgccaagcccttcgtggggcgcaacaagcacgacgccgccgacgcgcgggcgatctgccgggccgtgcgcgagcccgacacgaccttcgtgccgatcaagagcgaggccgagcaggcggacgcgatgctcgtcggccacaggcgggcgctgcacgagcgccgcaccgagatcggcaaccgcattcgcggctatgcgggagagcacgggctgaaggcgccgcagggcgtgcgccacgtcccggcgctcctgggccggctgctcgcgcgcgaggatctgccggcgcatgcgcggctcgtcgtcgaggacctcgccgacgaatgggagcgtctcggcccgcgcatcgcggcggcggaggcgcagctcgtgaaggcggcgcggacgaagccggaatgccgcaggctgatggaggtgccctcggtcggcccggtcgtcgcctggcgtacggtgctcgcagtgggcgatccgcgacgcttccgcaccgggcgcgccttcgccgcctggctcgggctcaccccgcgcaaccacacgaccgccaacaagcagcgcctgggcgcgatcacgagagcgggcgacatggccctgagggccgatctcgtctgcgcggcgacgtcgctcctccagcaggtgaaccggcgcggcgcgcaggcctgcggcggcgggcggctcgtcgcctgggcggcgcagatcctgcccagaaagaagttcaaggaggccgcggtcgccctcgccaaccgcgtggcgcggatcctgtggaagctcctggcctccggcgcgcgctacgaccgcgatcacggcccggctctcgagccgctggaggccgcggcgtgagcggcgccgcaacccgtttcgcgccgaccggccgcacccgcggccgccccggcgcacccgagacgcccgccgcccgccgagccctccggggctgacaggcgacggacgtgacctgcaggaacgagaggtggaaccatcgacacgtcgatgatcgggacaagccgtggaacccaatggcgcgatgaaatcgcgggtctgttgggcgcccgatcacgcgaagcccatcttggccagcggctccggccgcgcgaacaggtcggacatatgggtgcaggcgatctcgatgacccagctcgaccctcttgcaggccaggggccgtccacata

SEQ ID NO: 6986 - DNA, 1431 bp, unidentified
  source 1..1431: mol_type = unassigned DNA; note = element_ad780c0
  misc_feature 1: note = core
  misc_feature 2..86: note = LE
  misc_feature 87..1100: note = CDS
  misc_feature 1101..1431: note = RE
  misc_feature 1199..1423: note = bridgeRNA
taatgggatggtcgcccctccctaaacggcatcgaatgtgccaacgtggcgaatatattcccactgacgatagagaggcgaccattatgaaaattaccactattggtatcgacttggccaagaacgtttttcaggttcatggtgtggatgagcacggcaaggcgcagctcaagaagcaactcaagcggaaccagataatggagttcttcaccaaccagccccccagcctgattggcatggaagcgtgcggcagcgcccatttttgggccaataagctgcaaagtttggggcatacagtgaagttgatggcaccgcaattcgtcaaaccttacgtcaagaccaacaaaaatgatgccgcagatgcagaggctatttgcgaagcagtgacccgacccacaatgcgcttcgtaccaataaaaagtagcgagcaattggccgtactcgccttacatcgtgctcggcagggatttgttaaagctagaacggctcaagcaaatcagctccgagggttattggccgagcaagggattattattcctaaaggaatttcgcacatcaatcagcgattacctgaaatcttggaagaaagtgagaatactctccctagaaccttttgtcagttgctagctcggttgggtaatcatttcaaagagctccataagcaggtgaaagagctcgaagtacagatccagtgttggcaccagcagaacgtagccagcatgaaattggcaagaatccctggcattggtgcacttacggcaagtgctttactcgcctcaataggtgatgcaaaaaatttcaaaagtggtcggcagttagctgcttggttggggttagtcccacggcaaagctccagcggtggaaagcaaaatttgttggggatcagcaaacgtggcgacatttatctaagaaccctattgatccacggggcgcgcgcggttcttagagtttcggagcataaggcagatagctggttagcaaaattaatggttcggcgcaattataacattgccgttgtggcgctagctaataagaatgcgcgtatcgtttgggcgttactcgcacatgatcgagagttcaatgcagagttcggagcgtagcaatgacacaatttaatatattggcgtgcagttgtatcgccagtgatgcggactaaaatgtggcccatgagttcacggaccataggaatcaaatagtaccaccgattgcataggcaatcatgacgtgatggcgagacaggtcagaccgtggatagcaaaccccgtacaagtcagagcacattagggtgcgcgcaactgattgggggccgtccagcacattccatcagggatagaggctgtagcctcgattgaaatccggatctatggctgcaatctcaacttgactcactttcatgaattgagggcttggcaaacgaggggcgaccatcta

SEQ ID NO: 6987 - DNA, 1168 bp, unidentified
  source 1..1168: mol_type = unassigned DNA; note = element_ad7e607
  misc_feature 1..2: note = core
  misc_feature 3..217: note = LE
  misc_feature 218..1156: note = CDS
  misc_feature 1157..1168: note = RE
  misc_feature 36..223: note = bridgeRNA
cttgtcttatgattttcgcgcttcttcgtgagataaagaagtgccggagaggacggccatccttctccggcgatgggggacggatcggtgacgtgcaggccgccattctggtgaatgccgggccgagctagagtttgatcgcccccatcttttccaatcgtcctgaacggatacctgagctttgggctcggatgacaagcataggagatgagaaaagatgacggatattaccatcggcgcggacatctcgaaagaccatatcgatctgcacagcctgccggacggtcaaacgcttaaggttgccaatgaccgtaagggatttgcagccgttatcgcatggatcggctcaaaagccgtgcaacgcatcgtctacgaaccaacaggtttctaccacaaggccttcgagcggttcatggctgtgcaaggattgccgctctccaaggtcaatccgcgcctggccagacgcttttgtgaagcgaccggcaggcttgccaagacagacaggatcgatgccgggctgctggcccgttacggcgcacttcttgaaccgcgcctcctacaggccaccccacaaatccacaatgacttgagagagttgcatatggtgcgtctggccctcatcaaggacaggaccgccgccaagaacagggcaaagaccctcacaagcccgctgctgaagagacataacgccgacaggctcaggcagatcgagcgccagatcaaggccgtcgacgaagctatcatggcgctgattgccgaggacgcttgcctcaaggccaggttcgacattctcatctcgatccctggcctatcgcagatcaccgcctttacactcctcatcgagatgcctgaactgggcgaacttgataacaagaccgcggctgccctatcgggtcttgcccccatgagccgccagtccggacgatgggccggacgcgctttcattgctggcgggcgggccatcgtccggcaagcactctacatgcccgccctcgtcgcatgccgcttcaacccggacctcaaggccaaatacgaccagcttcaagccgccggaaaagcaccaaaggtcgccatcactgccatcatgcgaaagctcgtcgtgctggcaaacgcgctgctgcggaaaagccgaaaatggacgccaaaacacgcttgatcaaaacggata

SEQ ID NO: 6988 - DNA, 1421 bp, unidentified
  source 1..1421: mol_type = unassigned DNA; note = element_ad843fb
  misc_feature 1..2: note = core
  misc_feature 3..120: note = LE
  misc_feature 121..1149: note = CDS
  misc_feature 1150..1421: note = RE
  misc_feature 1182..1374: note = bridgeRNA
agatggggtaatcggccggcgtttttgtggatagctgaaaaattagggtgctgcgcttcaggctgatggtgaaacgaggtccgcagatgcggcctcaagcatcagaaggagaagcgcagcatggaccattttgctggactggacgtatcggtcaaggacacgagcgtctgcattgtggatggcacgggtaaaatcgttcgggaggttaaggttgcgagcgagcccgatgctctgctgggggttctgaggaatcctgactactgctttaagcggatcggattggaagctgggccgctgtcgcaatggttgttcagtgcgcttggtgaagcaaacttaccagtgatctgtgttgagacgcggcacatgcgagcggtgctgaaggcacagatcaacaagacagaccgcaacgatgcccgcggcattgcgcaaatgatgcgggtcgggctttaccgcccggtgcatgtgaagacgctccgcagtcagaagctgcgcatgctgctgacccatcgcaagctcctgcagtcgaaagccatcgcaatcgagaatgatttgcgcggcacgttacgtaactttggtctcaaggtcggcatagtcggacggacgaggttcgaggaacggatcgaggagctcgtcgggcacgtgcctgatctggcggtgctggttgaaccgctgcttgttgtccggcgggtcttaggcgagcaaatcgctgttctgcatcgccgcctgctgaccattgtccgggacgatgaggtatgccggcgcctgatgacaatccccggtgtcggcccagtggtcgcgctaacctatcgcgcgaccgtcgatgtgcccgctcgcttccgcaaatccaaatccgtcggtgccgtgtttggactgacctgctccagggatcaatccggtgaaagagaccgcccgggcgccatatcgcgctgtggggacgagatgatgcgggccatgctctacgaagcggcccagagcatgctggtgcgttcgacgcgatggtcgtggctcaaggcttgggcgatgcaggtcgccaagcgccgcggcatgaagagagcgattgtcgcgctggcccgccggttggcggtgatcatgcaccgcgtctgggttgatggcaccgagttcagatggaccagggaggttacagcgtgagtacccaacgcgatcagaagtaggaggaaacccgagctccaccacgcggtggaatcatgtccctcgcgggacgatggatgaggtgagttcgcatgtccgcttggacctgccgacggcaaggccgcctaaaagatcgttccacctcgtcttcgaatcccatgatggacgggccgatgtgccgagtccgtagagaagcacgagcccgcgagcgacattgccatcgctgtattggagagcctgaaagcgcttgaccccgaccggccgattagaga

SEQ ID NO: 6989 - DNA, 1930 bp, unidentified
  source 1..1930: mol_type = unassigned DNA; note = element_ad85eeb
  misc_feature 1..3: note = core
  misc_feature 4..131: note = LE
  misc_feature 132..1421: note = CDS
  misc_feature 1422..1930: note = RE
  misc_feature 1589..1858: note = bridgeRNA
gagcttcttgtataattcaaatatagggaattccgagaaagaaggttgagaaaaaaatacctcagagtaaaataagattactgactttggacggttagtaaaaaatcttatcaaacagtgaggtacttgaaatgaattataacacacagaacgcaaaaattgcatctattacggaaaaaactttaattgttggtattgatgttggaagtgaaacgcattatgcaagggcttttaactggcgcaattatgagtactcgaaaaagccttttgctttcagtaatgacgaagccggatttgcttcttttaaagcatggatgaatgatatggcggaaaaacatggaatggaaacgattattccaggaatggaaccgacgggacattactggctgaaccttggagcgtacctgcaggaacagggaatgaagccggtgcatgtaaatccgcatcatgttaagaagtccaaagaactggatgataataacccgagcaagaatgaccgtaaagatccaaaaacaattgcgggtctggtgaatgagggaagattttcttatccatatattccaaccggaatctatgcagagatcagaaatctgtccaaccttcgtattcagacacaggaagagattacaagaatcaaaaacaggatcgcccgctggttcagcatttattttccagaaataaaagacgtttacaggaatccggatgcggtaagcggactgatggtaattaaacaggcaccactgccatgtgatatcaaagagcttggcgtgaatggagtgaataagatatggagagatgcaaggctgaaaggcgctgggataaagagggcaacgaccctggtaacagcagcggagcacagcatcggaaatacggaagcaccgagaagtgccaggaaagagatccgaaacctactgaatgactacgaaacatacaaaaaccggatggatgaacttatgcaagagataaaggaaacactttctgagattccctatatagataagctgatggagatcaatgggatagggataaagacggtaagctgctttatcgcagaagtaggagacattggacgttttgataatccgaaacaggtgcagaaacttgccggttatgccattgttgcagacagctccgggaaacataacggggagagcaggatcagccacaggggaagaaagcgtttgagatatgcattgtatgaagctgcgatatccgtgattgggaaaaataaagagtttaaagagatccatagttattatcggacgagggaaaaaaatccactaaaaaagatgcagtcggtgatagcggtggcatgcaaactgatccggatattttatacgatactaacgaaaggcgtggattatgacagtcagaagatgttaaatgacattgtaagaccagaaatacagttagcagcataaagagaaagaaacagtgtatcatggccggtctgagcctttgaaaggaaagaatgaagggctgagaccagccatgatagctggaagcaataaacaaatggaatgtaacaggaaaacgtccaccggaaggtgctgttgcaggaaagaagtcagtaatacaacaaacaaagaatgagccagtagtcggcaggaatattttccagagggcatgaccctgtagaggagctaagctgacaccctggttatggacaggcgggacgagagaagttaggacttggcatagactgatgatcctggtagatatgggaggttcgctgtcgtagatggatgggtacacacaaggccatgtagaacgaaataagaagacgttttacttcgtgcacccaaaatccgctattttcgtaccagatacagagaaatgtccattcctatggctccttcttctgagatatttattgatgaaacactaaaaaatccttgattttcaaggaaaaaagacttgactatatagg

SEQ ID NO: 6990 - DNA, 1167 bp, unidentified
  source 1..1167: mol_type = unassigned DNA; note = element_ad8896b
  misc_feature 1..2: note = core
  misc_feature 3..207: note = LE
  misc_feature 208..1155: note = CDS
  misc_feature 1156..1167: note = RE
  misc_feature 12..213: note = bridgeRNA
cttgtcttatgattttcctgtcctgatcgctcaagatgaggacaccgccagcgagtcgcgagctcgctggcggtgggaggggatgggtcgttccgatgcagaccggtgcgggtcgagctagagttagaccgcccctctcttttcctcgtggcctgaacggatacccgggcgtgatggcccgcatgacaagccaaggacgcggaaaagatgcagcagcttataccacagaccgccggcatcgacattgccaaagatcagctcgatgtttgtctctaccctgatggggcaacacgccgcttcaccaacgatcctcagggccaccgcgccctgatcgcctggctggccaagtactctctccagcgcgtggtctttgagccgactggcgcctaccaccgcaccctggagcgcagtcttgctagggccggcctgccgctggccaagatcaatccccgccacgcccgccgcttcgcggaagccctgggccagcttgccaagaccgaccagctcgatgcagccctgctggcgcgctttggcgccctgctcgagccgcccacccggcctgtgctcagccccatgctggacgcgatgaaagaactgctggtggcccggcaggcgctgatcaaggaccgcacggcggccctcaaccggcagaagatcgtgcgctcgcccctgtggcggcgccaccttgcacagcggctgcgccagattgctcaccaactcgctgcccttgaggcccaccttctgagcctgtctcaggacgatgccgcccttgccccgcgcttggcgatcctcatgagcattcccggcattgcccaagccaccgccgtgagcctgctcgtcgacatgcctgaactcggcagcctcgatcagagccaggtggccagtctggccggcctggctccggtggcccgtgacagcggggcttcacgcgggcgccgcacgatccgcgggggccgcgctcctgtgcgtcaggcgctgtatatgccggcgctggtggcggcccgcttcaacccggatctgaaagccaagtaccaggccctgctcgcagcgggaaaaccggccaaagtagctctgacggccatcatgcgaaagctcatcatcctggccaatgccctcttgcgggatcagcggcactggtcaccaaaacccgcttgatcaacacggata

SEQ ID NO: 6991 - DNA, 1435 bp, unidentified
  source 1..1435: mol_type = unassigned DNA; note = element_ad893d4
  misc_feature 1: note = core
  misc_feature 2..306: note = LE
  misc_feature 307..1131: note = CDS
  misc_feature 1132..1435: note = RE
  misc_feature 1199..1430: note = bridgeRNA
caatgggatggacgcccccacccgtaacggcatcaatgtgccaaagtggagttgttaccaaccacttaaaccgagagaggcgtccaccatgaagattactgtaattggcatcgatctggcaaagaatgtgttccaaattcacggcgtcgatgaacaaggcaaaacagtcttgaagaagaaactcaagcgcgatcagctcgccgcgtttttgtcaatctgcctgcctgcttgatcggcatggaagcttgtggcggcgcgcatcactgggcgcgcaagctgcaaagctttggacatgaggtcaagttgatggcaccccagttcgtcaaaccctacgtgaagagcaacaagaatgatgccgccgatgctgaggccatctgtgaagcggtttcccggccgaatatgcgttttgtcgcgatcaagagcatcgagcagcagtcattgctggcgctgcaccgggtgcgacaaagcttggtgcgcgcacgcacggcacattccaaccagatccgcgggctgcttgccgagttcggcttgatcattccgcagggcattcacaatgtccccaaacgggtgccggagctgattgaggatgcctcgaatgagctgaccggcgccttccggatattgatcgacgatctgctgaatcacgtgaagaacttgagccagagacttgacgatcttgatggccaggtcctcaccggtcaccgcgccaacgagcacagttgcaagctcgacgaggtgcaaggcgtgggaccgatcacggcaagcgcctttgtcgcgacccttggcgatgcgaaggcgttcaagaacggacgcgaggtctcggcgtggcttggcatcgtgcccaggcagcattccagcggcggcaaggaaaatctgctgggcatcagtaaacgcggcgacaagtatttgcgcaccttgctgattcatggcgcgcgttcggttatccaggccaacgaacgcaagagaggtacgccagccgaagatctgtggatttcgagcctggtgaaccgacgcaacaagaacgtcgcagcggtggccgtggccaacaagaacgtgcggatcatgtgggccttgttggcgcatgaccgggattaccgcaaggactacaagcgagatgtggcgccggtgtagcttgatctaaagccggccagagggatcccgcgaaggcaagaacacccgcaaggagagcaagacaacagacttccgacgattgcacaggcaatcatgaaatgatggcaaaacaggtaagaccgtggctgaccaaacccgtactaggcggcgcacatcgaagtgcgatagcccgattgggagtcagccagcaaatcccatcagggacatcagccgcaaggctgaatcaaagtccgaatgtacgggtgcaatcttttccttccagtcatcatgaattgagcgcttggcaaacgggggcgtccatgta

SEQ ID NO: 6992 - DNA, 1439 bp, unidentified
  source 1..1439: mol_type = unassigned DNA; note = element_ad91d2a
  misc_feature 1..2: note = core
  misc_feature 3..224: note = LE
  misc_feature 225..1424: note = CDS
  misc_feature 1425..1439: note = RE
  misc_feature 10..214: note = bridgeRNA
gccctaccttcctgagtgcaccggaagcggcttggatcgcgaggtgtgcaggcgggacggggatggctgacatcagagctgccctcgatggccataggtggctgttccccccgtcccgtcgcctgctctcgaccgctgattaggcagggcgacgaatcgctgcgtagggcgtggacggcgggtgcgggctgtacctgcattcctgcgaataaggaggttccgtcgtgccaatggctgtgggaatcgacgtcgcgaaagaggtgcattggatcgtcgtggtcgacgccaccgacggcaccgagttgctcagccaccggctgcgcaacgacccactcgagatcaacgcgacgctcgccgagatcaacgcgttggccgccgcacacggccgagccaccgtcggactcgacatcgtcggtggcatcgccgggctgctcaccgccacggcggccgcggccggcctgacgctggtccacgtgcccgggttggtggtcaaccgagcgcggcgagccaccgtcggcggggagaacaagagcgacccccgcgacgcgcgggtgatcgccgaccaggtccgtcaccggcccgagctgcggccgatcacgatcaccgacgagcagattgcgcagctgcaggtcctggtctcgcgccgcaccgacctggtcaccgaacagactcgccgagtgcaacgactccgcgagcacctcgtggccatcttcccagctctggagcgcaccaccgacccgaccaaccactcggacctgatcctgctcgcccggtatgtcacccccgccgagatccgcgacaccggcgccggccggatgcgtgcgtacctgcgcgacgcaggcgtgaagacctcccgtgcagacacgctgaccaagcgggtgctcgcggccgccgctgatcagaccatcgaggtgaccggccagtcgatcgtcgccgagatcgtccgcgagctggccgaggaagcgctgcgggtccggcgtcgactgcgcgagatcgacacgcgcatcggtgcggtcctcgacactcatcccgacgcggagctgatcaccagcctgcccggtatgggcccgacgctgaccgccgaactgctggccaccactggcggtctggcccgattcgacaccggtgacgagctcgccgccgcagccgggctcgcccccgtactccaccaatccggcagagtgcagttccgccgtcgagccacgaccgggaaacgagccctcaaacacgtcttctaccgctcggcattctgcgccctcagcagcccagacgccgccagcaaggcctactacgcgcgcaaacgcgccgaaggaaaatcccaccaccaggccgtcattgcgcttgcccgacgacgagtcaacgtcctccacgccatcctgcgcacacgtcagccctaccggccgatgatcacggcagccgcttgacagaagcattagaca

SEQ ID NO: 6993 - DNA, 1373 bp, unidentified
  source 1..1373: mol_type = unassigned DNA; note = element_ad91ed8
  misc_feature 1: note = core
  misc_feature 2..7: note = LE
  misc_feature 8..1102: note = CDS
  misc_feature 1103..1373: note = RE
  misc_feature 1131..1368: note = bridgeRNA
caatggtatggaccccgccctcgcggcgagttggaatctcgaacgtcagctgcagccaaggaggcgtgtcatgcaagtcgttcgtattggtctagatctcgcgaaatatgtgtttgcggttcatggcgtcgatgagcgtgggaagatcgctctgcggaagacgctgcggcgggattccgtggtgcggttcttcgccaatttaccgccttgcatggtgggcatggaggcctccaacggagcacattactgggcccgcgtgctcaccgatctaggtcatcaggttcggctaatcagcccccacttcgtgacgccgtatgtcaagtcaaacaaaaacgatcgcaatgatgcggaagccatctgcgaagcgatcagccggccatcgatgcggtttgttccgccgaagtcgaccgaacaattggcagttcaggccattcatcggattcgccgtcgtctcgtatcggatcgggttaagttggtgaaccaggtgcgcggtcttcttgccgagcatggaatcgttattccgcgggacatcacccagttacggcgtggcctcgccgaactcatcgcacgctgcgatgatgacctcagcgaactggtccgttctctcatgacggagctgcgggaggaattggctgaactggatcggcgaattacgtcctacgatcgccggatacgcgaaatcttccgcaacagcgaaccctgccagcgtctggggaaaatcgaaggaatcggtccgattacggcgacggcattgatcgcagctgtcggtgatcgaacctgcttcaagaatggtcgccagttcgcggcctggcttggcttggtaccgaaacaacgatccagcggaggaagagcccggctagttggcattagtaagcgcggcgatcgatacctgcgcacgttgatgatccatggtgcccgtgctgccctcgcacgagctggcggtaagcaggatccaagaagcctttggctcggaaaattgcggaaccggcgacatccaaatgttgcggcggtggcgcttgccaacaagaacgcgagaatcgtctgggcgatgctcgcgggcaatgccgcttatcaaccagaactgtcgatgaaaacggcctgaggccgtaaaggaaaggagatcccacctcggcaattgcagcaaaaaggcaagagatggtgagacggtcaccgcgtcgcttcccgaacctgatgtgtggaccggcacggcttcggccgatgtcttggggccgttgaggtggaagcgggcgaaaacccatcgaggctcgcggcgaagacgttgtccagccgcttcaaaaagccggatatacgtcagcagttgtgactgtcgaactagctcagctgatctgttgcaatcgggcggggtccatata

SEQ ID NO: 6994 - DNA, 1349 bp, unidentified
  source 1..1349: mol_type = unassigned DNA; note = element_ad92078
  misc_feature 1: note = core
  misc_feature 2..71: note = LE
  misc_feature 72..1100: note = CDS
  misc_feature 1101..1349: note = RE
  misc_feature 1102..1339: note = bridgeRNA
tatgggatggctcgccctaatcaaccgacatcggatatggtgtcggcatctgaaaggaagggagtgggcaaatgtctattgttatccttggtgttgatctgggcaagaacgcctgcagtgtagtcggtgtcgacgctgccggagccgtcatcgttcgccggtcgatgcggcgtcagtctctcatcgactatgtagccaagcttccagcctgcgtgatcgcgatggaagcttgctgtggagcacatcacctcggtcgcctgttcaaaacgggaggtcatgaaatccggctgatgtcgccggaatatgtgcgcccgtacgtcaaggcacagaagaacgacgaccgggatgccgaggggatcgcggaggcagcgtcacgcccgacgatgcgcttcgtcgaactcaaatcgcaagagcagctcgacatccagacgctgcatcgcgtgcggtcgcggctcgtggccgaacgaacgaacctcatcaaccagttgcgtgcgatcctgctggagcgcgggatcatcttccccgtcggacggcgcaagctggaactcggcatcgatgacgtaatcgccgacaagggtgaggtgctgtcgacacggctacaccaactcgtcggcgaactgcgggacgaatggaagaagctcgacgaaaagatcgaaacgctaaacggagaattcgttgcactcgcgcgcaatgatcccgccacgcgacggttgacctcgatccccggcatcggggttctgaatgcaactgctctggtcgcggcggtaggtgatgccagcagctttgctaaagcccgatctggccgctggctcggcctcgttccccgacagcacaccactggcggcaagcctcggcttctcgggatatccaagcgcggcaacacctatctgcgcacgttgcttatccacggtgcccgggcagcactgccctcgctgtcgcagagcgacacgccgctcggccggtggcttaaagcgatgatcgagcgcggttctcaccgcaatgtcgtgcttgtcgcactagcgaataagctggcgcgcatcgcctgggcaactttgcgcaaggaaaccgacttcgaccgcggctacccgttagcggcgtaaacagctcggccgcgcaccaacgcgcgtggcccaacgaggtttgcaggaaggatcgtaaagatggcctgagagtcgatcggcgtttggaaagcccggttcccaaaatggcactcgatgcctgacagattatggcggccccaaacgcgcggatgtccatcttggccgtgagcatgctcacgagaccgtatacgttgacgcagactactcagaacaccgtaaaatcctcttgcaaacggggcgagccatacg

SEQ ID NO: 6995 - DNA, 1306 bp, unidentified
  source 1..1306: mol_type = unassigned DNA; note = element_ad97b25
  misc_feature 1..3: note = core
  misc_feature 4..212: note = LE
  misc_feature 213..1178: note = CDS
  misc_feature 1179..1306: note = RE
  misc_feature 36..198: note = bridgeRNA
cattgtatattatttaatcgttatatttttgcataaagtttcaacatcagagtgtggaataaggcagattattcattggtcataaagaccgagaaatatgttccgtccccacactttatacatccgaaaccggatagttcaatgggctttgaccccgcatttgcaatggtggctcaagatgtatagatgttattatataaaatactaaagacatgacttacgttggaattgatgtcagtaaagcgacttttgtagttgcctattcttctgctaaaggcagtaagactaaatcttttaagaatacaaccaagggtattcatgagttcatacagaccatttcggcaacggaacatcactgtgtgctggaagcaaccggtaattacagtgctttgctcgtttatctgctttcagaagcaggtattaccgtcagccttgagaatccgctgaaggtaaagaacttcgcccgtgtgatgttgtctgtcactaagacagatgagatagatgcacggttgatagccttgtatggagagaagatgcagcccgcaccctacaaactccgtagtgattcaattctcatcctcaaacaaaagcgtactgtaatacgccaactcaagaaacagcttgtggcaacccgaaaccttaaaggttcgatggaagcacttcctttttttgaccctaagtgcaagaaaaccattgaaaagacaatagcctttcttgaaaagcaaatcaaggaattggtagaagcgctggctgttctggcacagagtgaatacaaaaagcagatggatttgctcactacaatcaaaggtatcggtgttacgctggctgctactctaattatggctacaggaggtttcacctactttgataatgccaaacaattaacccgatatttggggctatcgcctacttatcaacaatccggtacgtcagttaatgtcaaaggtcacatcaatcgtaatggcgattcttctttacgaagccaactttatgtggcagcttttgcatccctgcgatgcaatgctgaatgcaaggcgtgtttcgaccgcttacgatctaatggcaagcccgggaaagtagcggtcattgcagtcgctaacaaactggtaaggcaagccttcgctattgtcactcaaggaaaaccctatgtcgatggattcaagtctgcaaagccataacagctcctgcggagggaacgccatgcggcaaggggctgcacagtcagctccgacgagcctctttaagtgagataattgaataactatgctaattatagttaaccatattcagttttcttattatagtt

SEQ ID NO: 6996 - DNA, 1397 bp, unidentified
  source 1..1397: mol_type = unassigned DNA; note = element_ada86db
  misc_feature 1: note = core
  misc_feature 2..86: note = LE
  misc_feature 87..1124: note = CDS
  misc_feature 1125..1397: note = RE
  misc_feature 1170..1389: note = bridgeRNA
caatgggatggacgcccccactcataacggcatcgaagtgccacagtggaagtgttggccaccactgaactgaggggagcgtcaccatggagattacgacgattggcgtggatctggcgaagaacgtgtttcaagtgcatggtgtggatcagcgtggcaaggtggtgctgcgcaagcagttgcgacgcgagcagatggtcgagttcttcgccaggctgacgccgtgcctgatcggcatggaagcctgcggcagcgcgcaccactgggcccgtgtgctgcagggtcagggccataccgtgcgagtgatcgcctcgcagttcgtcaagccgtacgtcaagagcaacaagaacgatgccgcggatgcggaggcgatctgcgaagcggtggcgcggccgaacatgcggtttgtgccggtcaagagcgtggagcagcaggccgtgctggcggcgcatcgggcacgccagggatttgtgaaggcccgcacggcgcaggccaaccagatccgcggcctgctggccgagttcgggctggtcatcccgcgcggcctgtggcacatccaccagcgcgtgccggcgctgctcgagcgcgccgccgacacgttgccgctggcgttgcgccacctaatcgagcggctgctggcccatctgagggaactggaccggcaggtcgccgagttggaaacgcagatccaggcgtggcaccgcagcagcgagctgagccgccgactggagaagatccccggcatcggcccgctgaccgcgagcgctctggtggcgtcgatcgccgatgcacgcagcttcaacaacgggcgccagttatcggcgtggcttgggctggtgccacgacagagttcgagcggcggcaagccgctgctcttgggtatgagcaaacgtggcgacgtgtacctacgcaccttactgatccacggtgcgcgctccgccatcctggcggcgcagcgcaaagcggcaacaacggactcctggctcggcaagctgctgcagcgccgtcatctgaacgtggcgacggtggcgctggccaacaggaatgcacggaccgcctgggcgctgctggcacatgaccgcgagttccagcccgactaccggccgagcctcgccaccgcatagacagatcaatccgacaacaacgactttagaggagtaggacccaccagcgattgctcaagtgatcacgcagtgatggcaagacaggtcggaccgtggttggtcaaacccactaggtctgcggcacctcgagtgcgacaaagcggtcgggcaccaaccagctcattccatcagggacagcggcacagccgcactcaaagtccggatgtacggaagcaatccttaccttcaagccagaacgaactgatcacttggcaaaccgggggcgtccatgta

SEQ ID NO: 6997 - DNA, 1341 bp, unidentified
  source 1..1341: mol_type = unassigned DNA; note = element_ada9890
  misc_feature 1..2: note = core
  misc_feature 3..79: note = LE
  misc_feature 80..1123: note = CDS
  misc_feature 1124..1341: note = RE
  misc_feature 1098..1326: note = bridgeRNA
agataattggactccccccacttcctgagaagtgagctaatatgtttgttctcacacaaaacataaaggagcccaaaggatgaagaatacaatagctggtgttgatctggcaaaagatgttattcaggtctgtatttgtaagaacaacaaggtgcattccaatactgagatggcccattgcgagtttctggcttggttgtttaattcaaagccaatgacccttatatttgaagcctgcggcacctcaaactactggaaacaaagagcgatagaagctggtcatgatgcccgccttatttcagccaaactggtgtcttcgatcaggcagaaccaaaagacggataagaacgatgctctagcgattgctcaagcctcgcagttagcagacatacagtttgttaagggaaaaagtgtcgaacaacaacaattgcagtcaatgatgcgcttgcgagagcttgccatcaaacaaaagacagcgtcgagtaaccagattaaagcgctattgttagaatttaatattcgtgtttcgctaaaacaaaaacaaggcggtttgaaaggagtcatcgaatcacttttggaggacgcggaaaatggtttttccagtgagttcagacgtgcactgaatgcagcctgggagcttcatagggaaatacttgattcaattcgtgtttatgaccgctgcttggaaaccacgattggagagcatgacgactgtaaacgtctgcttaaactcgaaggtgtcggcacattgaatgccatcaatttgtatattgcacttggctgcgctgatctgggggtgtttagcaaaggaaaagatgcatctgcctgtattggcttaactccgttgcagcattcctctggtggtgtcacaaagctcggccatattgggaaaggtgtcaaaaatagctctatcagaagccaactgatcacgggggcaatggcagtggttaatcaagtgatgaaaagaaccgctgtgacgaaaaaagaagtctgggtgcaaggtctggtagcacgtagagggaaaaagtgtgcagcagttgctctggctaataaaaccgtgagaaccgcctacgtgatgctcacacaggggacagaatacaaggcggagttagtggccgcttaataaagagtttgacaataaaaatgcccaatcgaagataaaaatcggcgtgtcaattcagagagttaactagagcttcgagctcgctgacaagatttgaacacacgtttgcgtaaatatccttgagccagagtcagctactctattagagctcgtacataagtatgcattttatttcttcgatacagcagctttattgttgacaggggggagtccacata

SEQ ID NO: 6998 - DNA, 1197 bp, unidentified
  source 1..1197: mol_type = unassigned DNA; note = element_adac4c4
  misc_feature 1..2: note = core
  misc_feature 3..240: note = LE
  misc_feature 241..1173: note = CDS
  misc_feature 1174..1197: note = RE
  misc_feature 32..209: note = bridgeRNA
cttgtatgtttgaatgtccctcctgcaaccatgcaggacttgccggggtggagggaccaaaggggcatctgacctaaggtacagacggtaggagatttggccccacctcgcacctattcatacgccgataaagaatccatcggctgagtggcacctcagaccgacgatacctagcaagccagcgttcaggtgcgccccgacaagcatgtgtaacctagcgcaaggggctgttcagtggcaatgcaagtagaaccctccattatcggtatcgacgtggccaaggctgagttggtcatctatttccagggccagatctattccattgagaacacgcctaaagccattcgggcttggctcaagggtctgcctgcccactgcgagatagccatcgaggccactggcacttatcacatggatgttatcgagctggcccaccgtaaaggccatcacatctacgtgattgatggttctcgcctccaccattaccgcaagggcacaggagggcgcgccaaaacggacgcctctgacgcacagctacttgcccgccatctgcaacatgaaaaagaggcgttgcgccgctggagcccgccacccaaggcgtatcggacgctgcagaccctgctgcgccgccgtgcggcactggtcaaggcgcggaccattatccagcaaagcctgggtgcagagccgctactcaaagccggcttaaagaggctgatctctcagatcaacacgctcgatgcacagatccagaagtaccttcgcgacgcggccagagaggcaggactctgtgatcaggtgaagcgttgcaaagccctggagggcgtgggcgatctgacagcctatgcccttgtcatggccttcctgcgaggcgacttcaggaacagtgatgcgttcgtggccttcccgggaatggacgttcacgtgaaagactcaggcaccaagaccggcaagcgaaaactgaccaagaaaggtgattcagaagctcgcaggctgctttactgcgcggccatggccgctcgccggagcaagcgttgggcaggggtctatcaggcttatctggaccgtgggctggcaaccacccaagcgctggtcatccttgcgcgcaaactggttcgtatcgccttcgcgcttatgaaaaatggcactgactatcagccgacccctgcctcatgaagacaggggtggacaacatagaat

SEQ ID NO: 6999 - DNA, 1335 bp, unidentified
  source 1..1335: mol_type = unassigned DNA; note = element_adb1dad
  misc_feature 1: note = core
  misc_feature 2..258: note = LE
  misc_feature 259..1293: note = CDS
  misc_feature 1294..1335: note = RE
  misc_feature 86..243: note = bridgeRNA
ctctaagtttgcagcaagaaacttaaagagggtataaaaaccctttagaaaacaaggttgattcattacctttgttgtcaaaaggaagaaccagcctacaggatagggaaactttaaagtaacaaggaattcaaatccagcttttgctttagtccatcctgtatagttgcaaagacctgatagaaagtctaggctgcgagcctatttagagttttgagtccaacaactattggctagccttccataaaatgcaaagttatgaagaaagttttaattggcattgatttctcaaaagaaaaattcgatgtagctatcatcgttaagtccacatctatgcaagcgcatgcagagttcgacaataaagtgagcggctatcgtaaaatgattaagtggattaagtctgtggttgaggaaaaaacatgctcctcttggttgttctgtggcgaaactacgggtggatacagccgtatgatgagcgactggctatatgctcaggggtatgacgtgtggatagagaatgcactaaccatcaaacgcacattccctttgaagcgtataaagaatgatgctgttgacgcatttatgattgctgagtatgctctccgctttgaggataaggcgcagttatatgaacccttaagccctgctttgagtggattacgggaacttttcttgtatcgtcatcaccttgtacgtcacaggtgcagctttcaagtaagacgaattgagaaacgttttacacaagagaaatcgcctatcaagaatactatatctcagagtgccagacatatcattacagagataaataaggaaatagccaagtgtgatgaaaagataaaggagtatatcgaatcagatgaccaactctatagtatctttgccattgtcacatctatgcctggtgttgggactatcaacgctgtcagtttaatggtatatacgaacaactttactaagttcgcatacaacccaagaaagattgcttgctactatggtatagcaccttttggacgtgattctggcacaagcgtacacactgatccacaagtgggttttatagctaataagatgctcaaatcgctcctcacacaggctgcattagccgctgtacgaacttgtccacagattgcaaagtattatcaaaggcttatagaacgaggaaagaaacctatggttgcactgaataatgtcaagaataagatgattgccattataacagcaatggtcagaaatggttgcatgtatcaatctgacaacatctgcgtggcaacgccaagtgtaaatgttaaataaatagttaaaataagaaatatttgaggtttttgacatagaaag

SEQ ID NO: 7000 - DNA, 1035 bp, unidentified
  source 1..1035: mol_type = unassigned DNA; note = element_adb92c7
  misc_feature 1..2: note = core
  misc_feature 3..177: note = LE
  misc_feature 178..1020: note = CDS
  misc_feature 1021..1035: note = RE
  misc_feature 12..188: note = bridgeRNA
cttgtatctctcaattgccaaccggcaagaagccggcgaggttaaggacgcaagccagcccgatcttcctcagggccgatgagcccgcaagtgagcatggcgcggcttgcgtccgattgtccgaacgcccgaacagtcgcaagggccaatcgagcccgcattcgcaaggatgcggtcatggacgagcctcgcctcgcgtgctgcgtcggtattgatgtgtccaaggatcgtctcgacgtgcatttgcgcccgtcggacgaggcctttgccgtcgcgcgcgacggcaaaggcctcggaaacctcgtcgagcgcctcaaggcgctcaacgtgtcgctgattgtgctcgaagccaccggcggcttcgagaccacggtcgccgccgctatcgccggcgccggcttgccgctcgccgtcgtcaatccgcgccaaatcagagatttcgcccgcgcgctaggcaagctcgtcgccaggcggcggcaaatcgtcgaaatgatcggcatggagcaaaaccgccgcagacgcacgaccgataagcggctcgccaagcgtatcgaccggcatctcgccttccttgaaaaggaactcgccgaggttgacggtgacatcgacgccggcgtgcgtgcttcgccggcctggcgagagactgagcagcttctcacctccgtgcccggcgtaggaccggttacggcaagaaccctcatcgccgagctgccggaacttgggtgcctcgatcgccgtaagctcgccgcgctcgtgggagttgcgccattcaaccgagactccggaacttggcgcggccatcgcgtgatcgctggaggacgaaccagcgtccgtagcgcgctatacatggccgcccttgtcgccatcagacacaaccctccgatcaaggccgtctatcaacgcctcgtcgcgagaggacgaccaaaaaaggtcgccatcatcgcctgcctgcgtcaggtgctcacaatcctcaacgccatcgtcagggacgcgacgccgcggatcgctcaaaacgcttgaccgaaaagacagtcg

SEQ ID NO: 7001 - DNA, 1349 bp, unidentified
  source 1..1349: mol_type = unassigned DNA; note = element_adba730
  misc_feature 1..2: note = core
  misc_feature 3..80: note = LE
  misc_feature 81..1091: note = CDS
  misc_feature 1092..1349: note = RE
  misc_feature 1084..1336: note = bridgeRNA
tgttggggtggacggcccccttacggcatcggatgccaggctgtgaagatgaaacaaggcagccaagtggagccgtccgaatgacgatgatcagagttggtgtggatacgtccaaacatgtctttcaaattcatggggttgatgaaaacgagcagccagtgttgcggcggcagatccggcgcagcgaagtggtgaaattcttcgccaagctggcgccgacgcgaatcggcatcgaagcttgcggcgcctcgcactactgggcgcggctgctgcgcgggttgggacacgaggtcgtgctgatcccgccgcaatacatcaagccctacgtcaagcgcggcaagaacgacaagattgacgccgaggcgatctgcgaggcgatgagccggccgggcatgcggtttgtgccgatcaagacggctgaacagcaggctgggctgacgatgctcggggcgcgcgatctgctggtcaagcagcgcacgatgctgatcaacgcgatccgcggccacgcggcggagttcggcgtcactgtagccaaggggcccaagcaggtgggccaactgcttcaacacctggcaagcgatgaaggcgtgccggcgctggcccgcgagatgatcggcgtcctggccagccagctcgacgggttggagatcaaactgaagacgattgagaagcggctgatggcttggcatcggcaggaccaaatcagccaatgcctggcaacgatccccgggatcgggccgatcagcggcgtcagttttgccctcaaggtggccgaccccaaggcctttcgctcgggccggcactttgcctcgtggatcggcatcacgccgcgcgagaactcgaccgccggccgccagaagctcggccggatcagccgcgcgggcgacgaggacctgcggcgcttgctggtgatcggggcgaccgcggtgatccacgctgccaagccgggccgcaccgcgccatggctgttggcattgctggcgcgcaagtcgaagaagctcgcggcagttgcgctggccaacaagacggcccgcatcgtctgggccatgatggtgagcggcgagacctaccgccagccggcgcaggcctgagcccaaccaacagcgagacctggcacacctgaacctggcaaggacagcaaccgcaagatggcaatcggtcgatccgaggatcgggacaccccgtggggtcctatggtgctcagacatcactgccctgtttgggacccgatccgcgtaacccatctgggccagcggtcatctgaccgcaccacacaggccggacatatgactgcaaccgaccagaaccatcgcagctgctccccttgcgagacgggggccgtccacata

SEQ ID NO: 7002 - DNA, 1324 bp, unidentified
  source 1..1324: mol_type = unassigned DNA; note = element_adbbbd6
  misc_feature 1..2: note = core
  misc_feature 3..236: note = LE
  misc_feature 237..1238: note = CDS
  misc_feature 1239..1324: note = RE
  misc_feature 7..219: note = bridgeRNA
tcctttagatttgcattactaaaacttagggttgaaatattacctttgtagttaataagagttaaccaagggaagcgggtgacctattgtgagatctaggcagaagccctatacacagaactagtcctgcctcccttttcagttgaatcgtcccaattagaattttaggtcgttggcctattaaaggatttagtgagttcaacctatggttaacttcaaataagtaatgcgaagttatgaaaaagaaatggtttattggcattgacatcagtaaaaaaacacttgatgttgttatttacgatcccgcaaagaaacatgcggatgagacaaactacaagcaagtctcgaataataaaacgggttatcaagcattgtttgcctggatgaagcagaagcgtatttctcctaaacagactgtcatctgcttggagaatacaggcatttacagctatgatttatgtctgtttttagagtcatgtaaacaagattacagttctttcactcctctggatttaaagcgttctctggggcttgtccgtggaaagaatgaccgtgtggatgccgagcggatagcttactacggttacttgcatcgggatgaattgacctattccaaactttccggcagtgctgtccttatcttgcgtgacttgtcgtccgaaaggaaacgcctggttaagcatctgactgaaaacaagggatttatcacggacagaaaagaccgggagtccacctctacgagcaggcgggcagaagaaatggttaagattctggaaaaacaaattcaaagcgtagaagatgagatgcacgggattgtcagctctgatccgactatgaacttaaactatcagcttcttaacagcattaaagggattggtagtgttaatgccatcaatacaatcatacatactaataatttcaaggcatttgaaaccgcacggcaatatgcctgttatctgggtattgccccttttgaacattcttcaggaaccagtgtgaaagggaaaacaagggtatgtgctacgggagccagactattgaaagcggatctatcgcaggctgcaagatcggccgttgtatgggataaggaactcaaagagtattatgaaaggaaaagaaaagagggaaaagaacatggagtagtgctgaatgcggtaaagtttaaacttgtgtgcagaatgtttgcagtagtcagaagagggacaccctttgttgatttaatcacgtataaagaataaacgagcagggaagcattacgctccactactcgtttggttttattaacagtgtttttagaccgaattatttgctcaggtcttagaat

SEQ ID NO: 7003 - DNA, 1411 bp, unidentified
  source 1..1411: mol_type = unassigned DNA; note = element_adbd5e9
  misc_feature 1: note = core
  misc_feature 2..76: note = LE
  misc_feature 77..1132: note = CDS
  misc_feature 1133..1411: note = RE
  misc_feature 1181..1403: note = bridgeRNA
caatgggatggacgcccccaccctctaacggcatcggtgtgccaaagtggaagtgtcagcagccacttaaacgagaatgggggcgtccgccgtgaatattacgactgttggtatcgattcggcgaagaacgtttttcacgttcatgcgattgatgagcgtggcaaggttttggttcgcaagcaattgaaaagggaccaggtgggtcggttttttgcgaacgtgccgccgtgcctgattggtatggaggcctgtgcgagttcgcatcactggggacgcatgctgcaggggttcgggcatacggtccgtctgatggcgccgcagtttgtgaagccgtatgtcaagtcgaacaagaacgacatggcggatgcggaggcgatctgcgaggcagtgacgcggccgaacatgcggtttgtgccgatcaaaagcgtcgaacagcaatcggtgctgtcgctgcaccgggtccggcagggcttcgtcaaggcgcgcacggcgcaggccaaccagatccgggggctactgggtgagatgggcctggtgattcctcagggaatcaggttcatagcccagcgggtgccagccttgctggaggatgccagcaacgagctgccgctggcgtttcggcaactgattgagcggctgacgaatcatctgaagctactcgatgagcaggtggatgccatccacagccagatcgttgcctgggaccgtagctgcgaactcagccagaagttgcagaaaatacccggcatcgggccgctgacttccactgcgctgattgccacggtcgctgatgtccatagcttcaagagcggccgccagatgtctgcgtggcttgggttggtaccgcgtcaaaagtcgagtggcggcaagccgacgcttcttggaatcagtaaacgaggggatgtatacctgcgcaccctgctgatccacggcgcgcgagccgcaatagtcgcggcgaagcaccggacctcgggccgcgaaagcagctggctcgcgaagctactggaccgacgacacctcaatgtcgccgcggtcgcattggcgaacaagaacgcgcgcaccgtatgggcgctactcgcgcatggtcgggactttgatcctgcctacaagccggtcagggctgtcgcatagtcgaaagagtgtccagaaactatcgagttccgacgagcagatccaaccaccgattgctcaggcaatcacgcagtgatggcaagacaggttagaccgtggaaggcaaaacccaacgttcccgccgcacttcgagtgcgtgttagcgaatgggagccctccagcagaccccatcatggacagcggccaacgtgccgcacaaaaagtccgaatgtacgggtgcaatctcttcctgcgcgccgtcactgaatgagagcttgaacaagtgggggcgtccatgta

SEQ ID NO: 7004 - DNA, 1410 bp, unidentified
  source 1..1410: mol_type = unassigned DNA; note = element_adc9df6
  misc_feature 1..2: note = core
  misc_feature 3..116: note = LE
  misc_feature 117..1136: note = CDS
  misc_feature 1137..1410: note = RE
  misc_feature 1172..1409: note = bridgeRNA
gaatgatatgaacgcctcccaccctacatgccgcgtcagcggtgcatcggtggccagcgacggctaccgaatagaaatcggtgatcatattggcctactcagccggaggatccatcatgacgcatacgatcgtgggtgtggacatcgcaaaaagcgtaatgcaggtgcactgggtcgatccggaaaccggcgagatcgtgaacagacctgtgaaacgagcagcgtttctcgagtattttgcaaatcgcagtccttgtcttatcgggatggagtcctgcagcggatcccaacactgggcgcggcgattgatcgagatgggccaccgggtgaagctgatgccagcgaaattcgtcaaggcattcaacatccgcaacaaaaacgacgcggccgatgctcgagcaatctggatggccacgcagatggacagcaaggaagttgcagtgaagacagaggctcagcaggcggtgctcgcgctgcatcgcatgcggcagcaactggtgaagttccgcacgatgcagatcaacaacctgcgcggattgctgaccgagtacggcgaggtgatgggtgtcggtcgggctgcgttggacaaagcgatcgtgggagttttggaaaaattgtcaggacgcctgcccgcgatactgatcgatacgttgcgtgagcaatggaaggggttggaggacttggaccggcagatcggccagatcgagcgccggttgcaagagtggatgaaggacgatcaggctgccaagttgatcgcggcgattccgggcgtaggcttgcttaccgcaacagccgcagtggcaacgatggggcatgcgaagaccttcaaatctggccgcgagttcgctgcatggctcggtctcgtaccggcccagaccggctccggcgggaagatcgagttacaggggataagcaagcggggcgatacctatctccggactttgctcgttcacggcgcgcgaagcatcatttatcgcgtgaaagacccaggtccatgggtaacacagatgaaacagcggcgcccgttgaacgtcgtaatcgtggcgatggccaataagcttgcccggataatctgggcaatattggcccatcaacttccgtacaagaaggactacgaaagcgtcaggcccacctgagttcgctggcctgcaggaaagttttgttggaagggatggaacgtcaaaagttgcggtggcattcgagagcgatgacaaaacgggtaggacctgggactcaccaagcctgaaaagttgtcagagtgaaaaagctcgtgcggtgaatgaggcgtgagtcagcggatttcataggggcccgcagcgaacaaggctgcaataaggccgaatgtagagctgcagcccatcctgttcgtcaaaacctcgaaagtctggcgcaaaggggggcgttcatgta

SEQ ID NO: 7005 - DNA, 1521 bp, unidentified
  source 1..1521: mol_type = unassigned DNA; note = element_add416c
  misc_feature 1: note = core
  misc_feature 2..230: note = LE
  misc_feature 231..1457: note = CDS
  misc_feature 1458..1521: note = RE
  misc_feature 14..245: note = bridgeRNA
ctacttgttgacttgccctaggaccggtgcctggcgaggctcggtctaggcgcccggctcgtcgctctcaattcggctgcccacgctgatcgtgtggctctcatttggcctgcgcgggccgggtgctgccgtggcagcgggagaggctcgagaggggtttgttttgctcgaagtagcggtgccctccccttcgcccggcgttcatggcagggctggacagggaggacaggatgagccgggtagtcatcgggatggatccgcacaagcgttccgccaccatcgagatcatggctggggatgagtccgtcctcggcggtgggcggttcgccactgacactgccgggtttgcggcgatgctcgcgagggtgcggccgtggccggagcgcgtgtgggcggtggaaggatgcgaggggatcggcaggcacctggccagccggctgctggctgatggtgagcgggtcatcgatgtgccggccaagctgtcggcgcggatgcgggtgttcgctactgggcagggccgcaagaccgatgccactgacgcgcactcggtggcgctggctgcgacccgtatgaccgggctgcggcctgttgctgacgatcagcagctggcggtgctgcggatcctggccgaccggcggcgctccctgggtgaggaccacacccggatggtctgccagctgcaccatctgctgctggaactgatccctggcggggcgaagaaagacctgtccgcggcccaggccaaggccctgctcgcccggatccgcccccgcgatctggcaggcaaggcccgccgccgggttgccgccgagctgatcagcgacctggaacgcgcctaccagcgcaagaaagccgcgaacaaggaactgaatgccctgctggcggccaccggcagcacgctgaccagcctgcacgggatcggcccctccggcgccgcccggctgctggccgaggtcggtgacgtgaccaggttcccggacaaggcccacttcgcgtcctggaacggcaccgcgccgatcgatgcctcctccggtgaccaggtccggcaccggctgtcgcgggccgggaaccggcagatcaaccgggtgctgcacatcatggcggtcgtccagctccgcaaccccaccgaagggcgggcctactacgaccgcaaggtcgccgccgggaagacgccgatggaagcgatgcgcgccctgaaacggcggctgtccgacatcgtctaccgccagatgatcactgacgcccgggcagcagtaacgggcccgggaggacacctgggggcggctacaggctccagcgcggccggctcacaccccagcgccggcacttcggagaagtcacttcccgggcccgccgctcacgaccctacgccagcaaagccagcccattcccctggccgttcccggcggcctccctccccgccggaccgcagccgccgtcaagcgctctctgcttgacgacagcgaggaccggcgcacactatccacgccgggaacggccccccttgacacagaggggagc

SEQ ID NO: 7006 - DNA, 1496 bp, unidentified
  source 1..1496: mol_type = unassigned DNA; note = element_ade5d7d
  misc_feature 1..5: note = core
  misc_feature 6..253: note = LE
  misc_feature 254..1486: note = CDS
  misc_feature 1487..1496: note = RE
ctcactggtggacccttctggtgtgggctgctgcctgtgacaggctgcggctgcgcccctggtccccaccgggccatcgccctgctcgcttgaccctcgaggtccgctgtgagttctgcgaggcccggtggcccaggacacgccgactggcgacagggctgcgcgccacagagcgccgatcagtgagcgaccggccctcgtgtcccgggaccaccgggtgccttcccactgcgccaacagcgaggaggccaggatgagtgtgaccgacccggccaccggaccgcgaccgtgcggcgggatcgactgggccaccaccgaccacgccgtcagcgtcgtcggcgccgacggcgcccagctgcaacggttcaccgtcgcccacaccgccgccgggctgcggacgctggtccgccggcttggccaggccggcgcggacgcggtcggcatccaacgacccgacggcccggtggtggcggcgctgctcgcggctggcctgaccgtctccgtcatcccacccggccagctggtccacctccgcggccgctccgggtcggccgggaacaaggacgaccgcttcgacgccttcgtcctggccgatgtcgtccgtaccgaccaggcccggctgcggccgctggtccccgaccagcccgcgaccgtgaccctgcggatgacctgccgcgcccgcaaggacctggtcggccatcgcgtcgcactcaccaaccagctccgcgcccacctgcagctggccttccccggcgcggtggggctgttcggccagctcgacagccccatcagcctgcggtttttggcacgcttccccacccagcaggccgccgactggctgacccgcaagcggctggacgcctggctgcgctcggtcggctctcccggcggcaagcctgccgcgcagctccacgcccacctggccagcgcaccccgcggcccggccgggaccgccgggcaggcccgcgcgcaggtgaccggggcgctgctggcggcgatcagcgccatcaccgcccagctcgccgtgttggcagcccacatcaccgagcagctggccctgcaccccgaccggctggtcttcgcctcgctgccccgcgccggccgggtccgggccgcgcggctgctggccgagatcggcgactgccgtggccgcttccccaccccagaatcgctggcctgcctggccggcgtggcgccctccacccgccagtccggcaagcacaaggtggtcgccttccgctggtcggcagccaagcaactgcgcgatgcggtcaccgacttcgccggtgaccgccgccgcgccagcccctgggcccaagccatctaccagcgcgccatcgaccgcggctgtgaccacccccacgccacccgcatcctggcccgcgcctggctgcgggtcagctggcactgctggcaacaccacaccccctacaaccccgccctgcacggcatccgcccccaccaacgcctgccactgacggcttgacacagggcta

SEQ ID NO: 7007 - DNA, 1611 bp, unidentified
  source 1..1611: mol_type = unassigned DNA; note = element_ade6841
  misc_feature 1..3: note = core
  misc_feature 4..277: note = LE
  misc_feature 278..1483: note = CDS
  misc_feature 1484..1611: note = RE
  misc_feature 13..297: note = bridgeRNA
tctgttacaatataattgtcggtaaatccacagcaagccagctatggtttacacgcacttgttacttaagctataatgaaagcagtaattggactgacggctcctttcttgggacaacacgcccgtctttcagactgtcatccatgctttcattacagcgttcgtttttgcaggttgagccgccgcaggcgagttcgcgtcaccaaacagactgaataggtaatgagtaaagcgtggcttatccgattacacaaattcattgtaaggagagatattaatgaacgccgtaggcattgatgtatccaaaggaaaaagtacagtagctgttcttcgcccgtttggagaaatcgtggctgaaccctttgatgttgttcacgagtgcagcgacctgaacaagctcgcagacttcatcaagtcgctgccaggtgaaacgaaggtcgttatggagtacaccggcaattattatctgcccatcgcaaatgcgctgcataacaacagtatatttgtttccgtagtcaatgcaattcttgtgcacgactatggcggaaactcaatcagaagagtcaagaccgataaaaaggacgctctgaagcttgcttctttcgcccttgacaaatggcttgacctgcaccaatacacgcccgaagaggatatccgcaaaacgctgaagcttcttaacaggcaatatattcagtactctaaaattcagaccatgcagaaaaacaatctcatttcattgcttgatatggtttttcccaaagcaaacaccctgttctcatctccttcacgtaaaactgacggtcacgaaaaatgggtggattttgttctgaaattctgccatgttgactgtgtagcaaagctttctttatcagcttttaaagccaaataccaaagctggtgcaagaaaaattgctactatttcagcgaagcaaaagtcgaggacatacatagctttgcgcgaacgcaggtctgcatactccctttaaccgacagcgttaaactgcttatcactcaatcggtaacacagcttaattccattctggaagccctcgcagccatcagaaatgagatggacaggctttcatcgcagctccccgaatacgataccgttatggctttttatggcgtaggtactgttctcggttctcagcttattgcggagatcggtgatgtcaggcgttttcacaaccgcaaagcgatcactgctttcgcagggcttgacgctccgccgttccagtcgggtaatcttgacgtcaaatccagaaacatttcaaagcgcggttcatctgctattcgcaaaactctttttcagattatgactgtaatcatccaaaaccagcctcttgacgagcctgtttatcaattccttgataagaaacgctctgaagggaagccgtacaaggtctatatgattgccgccgccaacaaatttctgcgtatttattacgctcgtgtcagcgaagcgttgaataccgctgtttaatcgcttcacttctcatatcccggactgccttaaattttcattctcaggcggtctgtttgctatgccttgttttggctctgaaaaatttcgtatttttttcattttacctattgacttttatttgcagg

SEQ ID NO: 7008 - DNA, 1926 bp, unidentified
  source 1..1926: mol_type = unassigned DNA; note = element_ade7867
  misc_feature 1..2: note = core
  misc_feature 3..131: note = LE
  misc_feature 132..1418: note = CDS
  misc_feature 1419..1926: note = RE
  misc_feature 1599..1864: note = bridgeRNA
agcttcctgtataattcaaatataaggaattccaagaagggtggttgataaaaagatacctcagagtaaaataagattactgacttttggacggttagtaaaaatcttattgaacagagaggtatcccaagatgaattgtaacacacaaaacgcaaaaattgcatccataacagaaaaaactttgattgtcggaatcgacgtgggaagcgagacccattatgcaagagcatttgactggcgcaactacgagtacactaaaaaaccgctggagttcagcaacaccgaaaccggtttccagacattcaaggcatgggtggaggagcttgcagagaggcacggtaaaactgctgtaatccccggcatggagcccacaggccattactggttcgcattgggaaaattcctgcaggacaacggcatgaagccggtgcatgtaaatccccatcatgtgaagaagtcgaaggaactggatgacaacaatcccaacaagaacgaccggaaggatcccaagacgatcgccgcgcttgtcaacgaggggagattctcttacccttatatgccagtcggtatttatgcggagatcaggagcttgtcgaacctgcgctttcagacacaggaggagcttacgaggatcaagaaccggctggcgaggtggttttccatctactttcccgaatataaagacgtttacggggacttaaaggcagtaagcggaaggatggtactgaaggttgcaccgctgccggaagacatcctaaagctgggggcggaaggtgtgaaccagatctggagggacaggaagctgaggggtgccgggatgaagagggcaaaggcccttttatcggctgcggagcacagcgtagggagcaaggaagcgccggaagcggcgcggatggagctggaaaatctgctgagtgacatggatgtacatgcgtcaagaatggaggaactgctccggaggatagaagaaaagctgaaggagatcccatatatagataacctgctggcgatcaaggggattgggatggtaacagtcagcggctttatagcagaggtgggggacataggacgttttgacaaccccaaacagctgcagaagctggcgggatatgccgtcgtggcaaatgattcgggcaagcataacggagaaagccgtatcagttaccgggggcggaaacgcctgaggtatgtgctgtacgaggccgctatatcgctggtgggaaagaacgcagagtttcgggagatacacgagtattaccggacgcggaaggagaacccgctcaaaaagatgcagtcggtggtggcggtagcctgtaaggcgctgaggatattttacgcggtccttaccaaaggcatccagtatgaccctgagaggctgctgggcgacatcaggaggccacaggtacagacggcataacagctggaatcgaaacaggcaataccctgtcagggttggactgagcctccgggagacggagccgggagctgaatccagccatgacagaaaaggctggaaggtatgtggaacagtctggggaaacgtccgccgcaaggtgccagtcagggaaacatacaggtcagtaagacttatataaagaatgagccggtagccggcaggaatattttccatagggcatgaccctggttaggagctgagctggcaccctggttatggacaggcggaacgaaggaagttaggacccgcaagatggtgatcctggtagacacgggaggttcgctgccgtagaaggaagggtatacacaaggccatgtagagcgaaaagatagacgttctacttcgtgtaccctacatcctctattttcgtaccagatacagagaaatgtccatttccttggctcatttatctgagagtaacaataaaaattccttgaatttttaaggaaaatcacttgacaatataggg

SEQ ID NO: 7009 - DNA, 1437 bp, unidentified
  source 1..1437: mol_type = unassigned DNA; note = element_adebe3f
  misc_feature 1: note = core
  misc_feature 2..71: note = LE
  misc_feature 72..1124: note = CDS
  misc_feature 1125..1437: note = RE
  misc_feature 1215..1428: note = bridgeRNA
taatgggatggtccgccgccagttgaaaagttattgcgcggtatagaagacttgcggaggaggattatcccatgaaaatctgcaccatcggtatcgatctcggcaagacagtctttcacttgattagtttggatgagcatggcaagttgatcgccaagaagaaatgctctcgatctcaactgcttgcctatacggccaacattcccgcagctctcatcggcatggaagcatgctgtggctcacatcatctgggtgccgctcttgccgtccaaggtcatcaggttcgattgattccacctcagttcgtgaaaccattcgtcaagtcgaacaagaatgactacaacgatgctgaagcaattgctgaggctgtgctacgaccgaggatgcgatttgtgccgatcaaaacgaatgatcagctcgacctgcaagctcttcatagggtgcgggatcgactcgttcgcagccgcaccggaattattaatcagatccgagccttcctcctggagcgtggcatcgcgtttcgcgccggccgtgtttatttacgaagccacatggccgcgatccttgaagacgctgagctcaatctatctccacttctgcgcggcctgctggaacaactctgggaagattggaagattacggaatcgcggattgaagaggtaacagatcaactagaagtgatcgcggatcaggatacttcatgcaagaggctgcagagtgttcctggcgttggaccattggtatccactgcactggttgctgccattggaaacggatctgccttcaccaaggggcgtgagttctccgcttggttgggtctggtcccacgacaggtgtccacgggaggaaagccaaaacttctggggatcagcaagcgtggcaactcctatctcagacgcctcttcattcacggcgcaagatccatccttatccgggagcggaagaagtacgcttttggcggttggatgacccagttagaaagtcgtgcccacgcaaatgttgtggccgttgcgatggccaacaagctggctcgaatcgcgtgggcagtcctcgtcaaaggtgtcaactatcgccaaactcctattttgtcagtgagtaattgtgagggaaacatggctgcgtaacctggaatcaaggaaggggggagcggttgcacgatgttccactctccagttcaacccgacgtaaatatcaattttaagagcttccaccagatctgctgagcgagaatcgacgagatgacagaacagtccaacggcgtgcccgaagcccggaaaaaaaagtggtctctgtcagaccgtgccacttataaggacggggacgcgcgaatactcatcctggccaggagcttgctccaacagtaggccgaatacatttgagcagactatttctactcgtctcaaagattcttcttgcagaacggcggcggaccataca

SEQ ID NO: 7010 - DNA, 1396 bp, unidentified
  source 1..1396: mol_type = unassigned DNA; note = element_adf4187
  misc_feature 1: note = core
  misc_feature 2..91: note = LE
  misc_feature 92..1117: note = CDS
  misc_feature 1118..1396: note = RE
  misc_feature 1173..1391: note = bridgeRNA
caatgggatggactcctcccaccttgtatcggcatcaaagtgccaggctgatatgatttacttatcagacaaactagcggaggagtccgaaatgaatattaaacggataggtatcgatttagcaaaacaggtctttcaagttcacggcgttgataatcaagaaaaagtggtgttacgcaaacagcttcgcagagcgcaactactggattactttaaaaagctaccgccttgtttgattggccttgaagcttgtggtggttcgcattattgggcgagagagttacaaaagcaggggcatacggttaaattgatggcgccccaatttgttaaaccttatgttaaaagccataagaacgatgctaacgacgcggaggcaatctgcgaagcggtagcgcgtcccaacatgcggttcgtggccattaaaaccatcgcccagcaagatattcaggccatccatcgtattcgaagtgaagtcgtgcgccagcgtaccgcgaaagttaaccagataagaggcttgctcgccgaatatggcatcgtagtaggtcgacgtgtggaggtacttcgtaaggccttgccgcaattgctcgaagacgctgaaaacagcttgaccgttgattttagaatgctgctggagggtttacaacaggatcttgtggcgctggacgagcgtgttgatgatctggacaagaaaataaaatcattggccaatgacaacccgaccgctaaacgtttacagcaaatccccggcattggcccgacgatcgctacggccttggtctgcgccatcggagatggtaagcagtttaaacgtggtagggacatggccgcttggttggggctcacgcccagacagcacagcagcggaggcaaagaccggttgttggggatcagcaaacgtggtgatgtttacttgcgcacgctgctgattcatggtgcccgatctgtgctaaacgttgcggggaaaaaggatgatccgcgcagtcgctggttaaacagcttatgtggcagacgcaataaaaacattgctgcggtcgccttggcgaacaagaatgcccgcatagcttgggccctgttgagcaaagaaactgattacctgccggagagcgaacccgcttgagttcgaaggcaagccttcaaacccaaacgggttgagataaaggaacccatccacccacgattgtgaagcaataactactgatggcaaacaggtcgaaccggcgtttgtaaaacccgatgtgtccgctgtgcccaagtgcacgttaaaccgataaggaacaaacgcgcgaatagcccattatggccagagcttgtgctcaaataacaggccggataacgtgtgcagtcgtccccaatcttgacgtagtaaagtgcttgcaaaacgggaggagtccatata

SEQ ID NO: 7011 - DNA, 1570 bp, unidentified
  source 1..1570: mol_type = unassigned DNA; note = element_ae01667
  misc_feature 1..2: note = core
  misc_feature 3..248: note = LE
  misc_feature 249..1424: note = CDS
  misc_feature 1425..1570: note = RE
  misc_feature 3..227: note = bridgeRNA
ctcgtattatatagtagtagtgtttatagaccctctccaaggtctgtatgctatgctattggagatactgcggattgttgcacacctcctaccacttgatggttttaaaaaggctacagccacagtctctttgtatatttgttaatcagttagataccgcatgacggtttatttagaacgaggttacaatcgcaaggagtaccagtgggttccaaacagtatcaaatacattccaaagaagatttactatgatttgcgtaggaattgatgttgtcaaagataagcatgattgctttatcactaactcagatggtgaatttcttttcatatcttttaccatttccaacaatagggaaggttttgatgaactttatcgaagaatcgaatcggtattagatgatataactaaagtaaaagtaggacttgaagccactggacactatagttacaatcttctggattttcttcttgataaaggtctgaccacctttgttatcaacccgttacataccaatctttacagaaaaagtctaagccttagaaagacgaaaacggataaagttgatgcccatacaatcgcttctatgattatgtctgatgtaaacttaaagtcctactcagacacatcataccataatgaagaactaaagtcattaactcgttatcgttttgataaggtaaaagagcgagcaaagttaaaacagtccttttcacgccttgttaccattctttttccggaactagaaaagtttgttccaacgctacacatggtttcggtttatgctttattgtctgaacttccaagtgctgctactattgcatcggcacatcttaccagacttaccaatctgttatcagaagtttccaaaggtcgctatggcaaagatgctgccattatgcttcgtgaagctgcccgatgttctattggttcccatatgccagcaaagtcactagagttaaaacacaccattaagctcattcgtgaacttgataacgaaatcgatgaaatcgaagctgaaatcaaaacccttatggatgaaatcaactctccaattttaagcattccgggaatcaactatcgtatgggcgcaatgattaccgctgagattggtgatttcaacagatttgattcccctgataagatacttacttatgcaggaaggtcaccatctacctaccaatccggacagcttgataattgctattcccatatggaaaagcgaggttctcgttaccttcgatatgctctttacaatgccaccaaatatgtttgttattgggataaaaactttggtgtatatctcgcaaaaaaacaagcagaaagcaagcactataatgttgcattgtctcacgctaccaagaaacttgtaagactgatttatcaacttgaaaaatccggtcaaccatacagcaaggcatcttaaaatcttttctgtaaatatctccttttcgagcacctataaagatgctctatttgtcatgcagttttcaatgttcaaatatatctgaaatgcatttctgcaattcattcaaaaaatttcatttttagacttgacttttaatagttagt

SEQ ID NO: 7012 - DNA, 1126 bp, unidentified
  source 1..1126: mol_type = unassigned DNA; note = element_ae03a6f
  misc_feature 1..2: note = core
  misc_feature 3..178: note = LE
  misc_feature 179..1111: note = CDS
  misc_feature 1112..1126: note = RE
  misc_feature 12..189: note = bridgeRNA
cttgtaagtcattgcggcggtcacggagtagagtgtccgcagcggtgccggagggtagatcgtctcatcccagggtggttgacccgttcctcagcgaggtcgccctccggtcgttccagtgaacccgaacagtcgcctgggccggtccgcgagcccgctttcgcaaggaagggtcgccatggaacagatcagcgttgtcggcatcgacgtatcgaaggatcgcttggacgttcatgtcctgcctgcgggagaggcctggtcggtgtctcgcgatggcgaagggcttgatgaactgtgccggcggctgagcggtacggcgcgtctggtggccctcgaggcgaccggcggatacgagaccatcgtggcagccacgctgtcgagcgagggcgtgccggtcgtcgtggtcaacccggcccaggttcgggccttcgcaaacgctcttggccagcgcgccaagaccgatccgatcgatgctcgggtcatcgcccgcttcgccgaggccactcagccggagatccggcccttgcccgatcgggcgacccgcctgctggccgacctggtggcccgtcgccgccagatcgtcgagatgatcgtggctgaacgccagcgcctgcaccgcaccgaaccgccgcgggtgcgcaagagcatcgagtggttgttgaaggcgctggagaaggaactcgccagcgtcgaccacgacatcgacggcagcgtgcgcagctcgccggtgtggcgcgagaaggaggacctgatgagatcggttcccagcgtcggcccgatcatcgccagaaccatattggccgagctgcccgagttgggcacgctcgaccacaagcggatcgcagccctcgtcggcctcgctccgttcacccgccaatcgggcgtctggaagggcaaggcctcgatcggcggcggacggagcgccgtgcgcacggcgctcttcatgggagcccagactgccaagcgctggaacccggcgctgaaggccttctacgaacgtctgatcgcggcgggcaagcccaagatggtcgccaccatcgctgtcgcccgcaagctgctcaccatcctcaacgccatcctgcgagacaaaacgccatggcaaaacgcttgacctcagacacagtcg

SEQ ID NO: 7013 - DNA, 1461 bp, unidentified
  source 1..1461: mol_type = unassigned DNA; note = element_ae079aa
  misc_feature 1: note = core
  misc_feature 2..243: note = LE
  misc_feature 244..1446: note = CDS
  misc_feature 1447..1461: note = RE
  misc_feature 9..240: note = bridgeRNA
cgttaccttcttcgtggccccgcaacgggcctcccggcctccggtcccggcatgacttgcagccccagtcgatcatgattgaaaaggtggtgtcaccgggtaccggaggcattggcagaccgctgattaggggcacgagcgccgatcccgttccgggtgaggcagtctcttcgtaacgtggatgccggcacgctgatgtcgtaggtgaggccggggagggcgcgaccgctgtggagagtgcacgtgatcgacacgggtgacatcgacgtctacctgggcgtggacgtgggcaagggcgagcaccatgccaccgccctgactccggcgggcaagcgggtcttcgacaagcggctgcccaacaccgagccgaaactacgtgaggtgttcgccaagctgcaggccaagcacggcactgtgctggtggtggtcgaccagccggcttcgatcggagctcttccgctggcggtggcccgcgacacgggctgcagcgtcgcctacttgcccggcctgacgatgcgacggatcgccgatctctacaccggtgaggccaagaccgatgcccgagacgcggcgattatcgccgatgccgcgcggacgataccgcacacgctgcgaaacctggcgccgtccgacgagaccgttgccgagctggagatgatcgtcggcttcgacgacgacctggccgccgagtccacgaggatcaagaaccgtctgcgtggcctgctcacccagatccacccgtcgttggagcgggtcctcggtcccagactggatcatcccgccgtcctggcactcctcgaacgtcatggctccccggcccacttgagaaaagccgggcgacgccggctggtgaccctgcttcggcccaaggccccgcggctggccgagcgcctggtcgaggacgtcttcgacgccctcgacgagcagagcgtcgtcgtgcccggcaccgacgcagcctcgctgatcgtccccagcctcgccagctcactcacctccgtgctcgaccagcgcaagcacctcgcctcccgcatcgaggaactgctggaggcccaccctctttccccggtcctgacctccatgcccggcatcggggtcaggaccgcagcccgcatcctcatcgacgtcggcgacgccagcgctttccccacggctggccacctggccgcctatgccggactggcacccgtgaccaggagctccggctcctccatacgcggcgagcatccctcccgacgaggcaacaagcagctcaaacgagccttctacctcgctgcgttcgcatcgctgtcccagcccgaatcacgcacttactacgacaagaagcgacggcagggaaagcaccacgtcgccgccctcgtctgcctcgcccggcggcgcatcgacgtgctcttcgccatgctccgcgacggcaccttctatgagccccctaccgccatcgccgcttgacgaaaaccatagggg

SEQ ID NO: 7014 - DNA, 1422 bp, unidentified
  source 1..1422: mol_type = unassigned DNA; note = element_ae0c75b
  misc_feature 1..2: note = core
  misc_feature 3..101: note = LE
  misc_feature 102..1142: note = CDS
  misc_feature 1143..1422: note = RE
  misc_feature 1171..1374: note = bridgeRNA
agatggggtaatcggctttgagagcccatcaccggaaaggaggtgcgctccaagccgatggcaaacgagatcagacacgagcatcagaaaggaagcgcaacatgaagcattatgtcggtttggacgtctcagtaaaagagacctcggtgtgtattgttgatgagacgggcagaatttgccgggatcggaaggttgtcactcacccggatgacctcatagcgcttttgcgcgatactcaatggcattttgaacggatagggcttgaagcggggccgctgtctcaatggctctatgaaggcctggccagggcgggcttcccggtgatttgcattgaaacacggcacgctaaagccttcctcaaagcacaaccgaacaagaccgaccgcaatgatgccggtggcattgcccagatgatgcgtgtgcacctattccggccggtgcatgtgaagacgctgacgagccagaagcggcgtgccctactaacggcccggatgctgctgcaaggaaaggcaattgccatcgagaacgacattcgtggtctgctgaggaacttcgggctgaaggtcggtatggttggggcggtcaaatatgaggagcgtatctgcgagctcgttgagggcgtgtcggatctggcagagatcgtggagccgctgcttgccgccaggagaaagctacgagaggagttcgctcggctggatcacaaggctcggacagaggccaagattgatccagtctgcaggcgattgatgacggtgcccggcgtcggcccgatcgtgtcgctggcatacatggcgacgatagacattccagcgcgcttccggacttctcgtggcgtgggagctgtgctcggattgacgccgattgtcaaacagtcaggagagagcaaccgcattggtcgcgtctccctttgcggcgacggtatgctgcggtcctatctttacgaagccgcgcaaactctgctgacgcgggtcacaaaatggtcatggctgagagcctgggcgatgaatgttgccaaacgacgtggagctcaaaaggccatcatagcgctagcgcgacggctcgcagtgatcctgcatcgggtttggagtgatgggtcggagttccgctggacgcgggaagcatcgactgcaatcgcagcataaacaccactcctcgaagaatacataatataaggttctgcctcgctcgtggcggaagcgtgtccttcgcggacgaggatgatgtgagttcgtagactttcctattctgatgatgcccaacgtcaccaggatgcgatccagattggaccacatcattcttctgaccccatggagggagggctatacgccgatcccggagagaagcgcgggccgcgaaaagacattgaacaccccacggatgggcaaactcgattgtgcttgacctcaccacgccgattagaga

SEQ ID NO: 7015 - DNA, 1366 bp, unidentified
  source 1..1366: mol_type = unassigned DNA; note = element_ae1c314
  misc_feature 1..2: note = core
  misc_feature 3..74: note = LE
  misc_feature 75..1100: note = CDS
  misc_feature 1101..1366: note = RE
  misc_feature 1076..1354: note = bridgeRNA
tgatggggtggacgccccccgacggcatcgatgtgccaaaatggagtgttgaacaccacttgagggaggcgtccatgggaaaagttagcactatcggattggatgtggcgaagaatgtttttcaggcacatggcgcggatgaaacgggcgccgtcatgttccgcaagaagctgcgacgagtgcaagtgcttgaatttttctcaagccagccgccgtgcacggtggcgatggaggcctgcgcgggggcccattattgggggcgcgagatcggcaagctcgggcatacggtacggttgataccgccggcttatgtcaagccttttgtaaagcggcagaagaacgatgccgccgatgccgaggcgatctgcgaagcagttcagcgcccaactatgcgcttcgtagcggttaagagtgaggcggcacaagctgccacggtcgtttttcggacacgcgatgtcctggtgcgccagcgtacccagatcatcaacgccctgcgcggtcatcttgcggaattcgggcttgttgttgcccaaggcccggcccacgtcgccaagcttgttatggcagttcagaatcccgaacatcccctcccggaggcggcgcgcaaaatcctttacgtcttgatcgatatgctggctttgctgagcgaacgggtcaagctcctggatgtcgaaatcgctcggcgcgccaaggaagataagttggcgcgtcgcttgatgagcgttcccggtgtgggccctgtgattgcaacggccgtcgcggcgctggcgccgccaactgaaacgttcaaacgcgggcgcgactttgcggcttggttgggcctcacgcccttgcaacattctacaggcggtaaacagaaactcggtgcaacctcgaagatgggagaacgaacgctgcggcgcctgctcatcataggggcgagcgccgtcgtgcgttgggcggcacgaaagggaccgccggcgggatcctggcttgcgggcatgctcgcacgcaaaccgccaatgttggtgagagttgccttggctaacaagatggctcgggtcctttgggcgctgatggccaagggtggaacttatcgggctccggtcgcgacagcgtaagctcgctcgcgatcatggagctgtcgtaggcgtaggaaggtcaaccggaaagtatggcgcaacggtcggcgagacgagattgggaaaaccagtttgcaccagcgtgcatcaaagcacgtggctctgatttggacccaatcggcgaactcccatacgggcccgcggcgtgtgaaaagctgcatcagaggccggacacatgtcagcacccgactacgtgttgtgccgatccaaaagattcttcttgcgccgatgggggcgtccacaca

SEQ ID NO: 7016 - DNA, 1155 bp, unidentified
  source 1..1155: mol_type = unassigned DNA; note = element_ae1e0d7
  misc_feature 1..2: note = core
  misc_feature 3..183: note = LE
  misc_feature 184..1140: note = CDS
  misc_feature 1141..1155: note = RE
  misc_feature 32..198: note = bridgeRNA
cttgtatctttaatctggtttattatggttaagttagattggtaacaatcatgcagtcagataaccatcaagggattaagcccgttaatgagctttcgacgcatgattgtgacttttcttcgagaaacccgaacagttgcttgaaacacaattcgtatttgcaagaatgggagccgaagaaccatgactaaaacgatttgtatcggtattgatgttgccaaagcttcacttgaaattgcacttggtgctcagggaaccgtaatgacatatccaaatacccctgaaggtcatgatgaactagcggctacactgaccaactatgagattgatttagttgtattagaagcaacagggggttatgaggtatccgttgcttgtgttttacagaccatagggctggctgttgctatcgtcaatccccgacaagcccgtgactttgctaaggcaatgggtaacttagccaaaaccgataaaatagatgctcaggtgctggcacagttagccctggttttatctcaacgaacagaccgggataaaatagtcaggatattgccctctgctcagcaacgagtcttgcaagccatgatcgcacgtcgtcgccaattggtcgtactttccatctcagaacgccaaaggttggggaattgccatccagacattcgagaaagcatcactttaatgatcagctttatacaggaacagcttaaggtcattgaatctgccttgtctaaacacattaaaacctatcatcgttccaaactcgatttattatctacagtaaaaggcgttgggcctgccacaatagccactttgatcgctgatgtaccggagttgggtaagttaacacgccgggaaattagtgccttgattggtgttgcaccgtttaatcgagattctggatttttccgggggaaacgaacaatctttggaggaagagcaatggtgcgtcgaatgctatatatggccacgttaacggcaattagatttaaccccgttctctgcgctttctacaagagattgaccgaagcaggcaagccaaacaaagtcgccatcgttgcgtgtatgcgtaaattactggtcattctcaatgcaatgataaaaacaaatagaccgtgggacgaatcattccacacggtgtaaagtgaaagacagttg

SEQ ID NO: 7017 - DNA, 1430 bp, unidentified
  source 1..1430: mol_type = unassigned DNA; note = element_ae21836
  misc_feature 1: note = core
  misc_feature 2..128: note = LE
  misc_feature 129..1034: note = CDS
  misc_feature 1035..1430: note = RE
  misc_feature 1189..1429: note = bridgeRNA
atgatatgaacgcctcccacccgtgatcggtgggagccggcaggaaggcggagcctcacgggccgacggcatcagagtgcccagatggaagaccatagaggttttcctggcaaaccggaggctccgacatgaagcatatgacagtgggtgcggacattgcaaagaacgtgatgcaactccattacatcgacgcagagacgggcgagatcgtgagcaagccggtgaagcgtgctgtattcctcgagcatttcgcgaaccgggctccctgcctgatcgggatggaagcctgtgggggctcgcagtactgggcccgcaggctcacggcgatgggccacgaggtgaagctgatgccggggaaattcgtgaaggcgttcgtgatgggcaacaagaacgacgcggtcgatgcgaaagcgatctggcttgccgtgcagcacgcagaaaggtcggtcgcggtgaagacggaaacgcaacaggcggtgctgggcctgcaccggatgcgcgagcaactggtgaagttccgcacgatgcagatcaacggcctgcgcggcctgctgaccgagtacggcgaagtgatgggcaaaggccgagccgcgctggacaaagcgataccgagcgtactggagcgattggtcgatcgtctgccggcgatcctgatcgacacgctgcgcgagcagtggaacgggctggcggagctggataagcagattgccggcatcgaacggcgcttacagatgtggatgagagaggacaaggcatgcaaggcgatcgcggcgataccgggcgtaggtctcctgacggcgacggcggccgtcgcgacgatgggcgatgcgaagacgtttcggtccgggcgcgaattcgcagcctggatcggactggtgcccaagcaaacgggctcgggcggcaaagtccagttgctgggaatcagcaagcgcggcgacacgtatctgcgcaagctgctgattcatggtgcccgggctgtgctgtgcctcacgaaggaaccggggccgtgggctgaagggatcaggaagcggtgaccgctgaatgtggcgatcgtggcacaggcgaacaggatagcccgcacgatctgggcgattctggcgcatgacaggccgtacgaaaagggctacgtgagcgtgaaaccggtttgaccgaacggcgttgcgtagcaggaagatcaacttttacagggtgatacgtcgaaaggttgcgctggcaatcgtaagtaacgacaagacaggtcggaccgggacccgccaaacctgaatagcccctcgagcttctagctcgctaagtaaatgaggtgcgggtcagcggatttcatggtgggccgcagcgtatcaggctgtaacgaggccatgtataaagctgcaacccatcctgtcgcagtcagagcacacgaaaacccttcgcaaacgggaggcgttcatata

SEQ ID NO: 7018 - DNA, 1423 bp, unidentified
  source 1..1423: mol_type = unassigned DNA; note = element_ae222b4
  misc_feature 1: note = core
  misc_feature 2..78: note = LE
  misc_feature 79..993: note = CDS
  misc_feature 994..1423: note = RE
  misc_feature 1185..1414: note = bridgeRNA
taatgggatggcccggccgtgctcctgccccgcatgcccgtaagctgtggggatcgaacaacgcaaggagcagatcccatgtcacgaaactccacgtctgtcgcgattgcgaccatcggcctcgatattggcaagaacatcttccacctggttggactcgataaacgcggcgcgatcgccctccggatcaaggtctcgcgtggtcaagtcgagcgtcggttagcgactgttccgcactgcctgatcggtctggaggcttgctcaggatcccaccatatcggccgacaactcgcagcactcggccacgacgtgcggctcctgccggcgcagtatgtgaagccgttcctcaaaggtcacaagaacgattaccgggatgccgaggcgattgcggaagcggtgcagcggccgacaatgcagttcgtggccatcaagacacccgagcagatggatctcctggccttgcatcgcgtgcgctcgcgcctcgtcagtcagcgtacgggtgtgatcaaccagatacgcggcttcctcctggagcgcggcatcaccgcgcggcaggggccaagcgcgttacggcagatgctgccgacggtcttggggtcacgttcggacagcctctcgccaagggttagccgccttgtagccgacctggccgaggactggcgtcggctcgacgagcgcattgccacggtctcggccgagatcaacgagcttgccaaacaggacgaccattgccagcgcctgatgacggtgcccggcatcggaccgctcatcgcgagcgctgtcgttgccgcgatcggcaccgggggcgggttcaagcagggccgcgacttcggtgcttggctcggcctcgtgcccaggcaggagtcgaccggcgatcgcaccatcctcggccgcaggcaacaagtacctgaggaccctattcgtgcaggcggcccatgttgtcctggcgcgccgcccacaccgggcgaggccgggcctgtggccctggattgaggcggcggcgcgtcggctgcatcgcaacgtcctggccatcgcgctcgccaacaagctcgctcgcatcgcctgggccgtgctcgcgcgagggcacagctaccagccgatgcgtgcgcacgacgccgcgtaagacgaagcgggcgctcatgcgctcgaggatcagacgatgacgtaagcaaactcaaccgccttcccgccgaggtttgcgagatggattgacgagatggacgaacggtctgcccgtcgcaaccacaagactgggtgccattttggcccactgaggtcgttccggtagacagccttggatgcgcgcggatacccatcatggcccggagcatgaagctccacttcggaggccgcatacattgttgcagctctctcgttcgtcacttcgccaactccgtcttgcgacgcacggccgggccataca

SEQ ID NO: 7019 - DNA, 1161 bp, unidentified
  source 1..1161: mol_type = unassigned DNA; note = element_ae2a0d1
  misc_feature 1..2: note = core
  misc_feature 3..210: note = LE
  misc_feature 211..1149: note = CDS
  misc_feature 1150..1161: note = RE
  misc_feature 14..216: note = bridgeRNA
cttgtcttatgagaatcatcggctcctgaggcaaaagggagccgctacccggcaccgcatctgcggtgccgggtagcggcgggggcggcgccgtgcggagcttggtcttgcaggaccgcggtcgagtttggcgagcccctgtcttttcttacgacctgaacggatacgtgggctccgggcccgaacgacaagcaaaggtggatagaaaagatggcaaaggataccatcggaatagatgtgtcgaaagaccgtctggatgctttctggcactcccgtgacgtagcactgagcctgcctaatacggctgatggttttactcagctaagtgcctggttgagcgaggagaatggtgtgctggtcgtgttcgaggcgaccggtgcttatcatcgtgggcttgagcgacatctcagtttggcggggcagcccttcatcaaggtcaatccgaagcaagcgcgacgatttgcacaggctatcggccgactggccaaaaccgacggcgttgatgccaaaatgctggcgcgcatgggggtggttctggatctggcgccacaaggcatagaaagtgaagatgttcatgatctcagagagttgctgacagcgcggcgcgccctggtaaaagatcagataacggcaaagacacgccttgccacagcaaacaacccattggtgaaagatcaactctgccgccggatcgatgacatcgacagagatgtcagagctctcgatgaggtcatcgcgcagatcgccaagcagcgtggaacccttgatgagcggatcaggcgcctgatgaccattccggggatcggcagattaaccgcaaccattttgatgatcgacatgcctgagcttgggcatctcgacagcaaaaaaattgctgctctggctgggcttgcgcctatgacgcagcggtctggaaagtggcagggcaaagagcggattctcggtggccggtcatcactgcgacgcgcaatctacatgcctgcgctggtcgccatccgcttcaatcatgatctccgcgacaaatatcagcagcttgtgaatgcaggaaaggcgaaaaaggtcgccatcaccgccgtcatgcgtcgcatcatcgttctggcaaacacgttgctgcgcgaagggcgcgattggcagccaaatcgaccttgaccaagacggata

SEQ ID NO: 7020 - DNA, 1221 bp, unidentified
  source 1..1221: mol_type = unassigned DNA; note = element_ae30d1b
  misc_feature 1..2: note = core
  misc_feature 3..207: note = LE
  misc_feature 208..1197: note = CDS
  misc_feature 1198..1221: note = RE
  misc_feature 11..191: note = bridgeRNA
cttgtatctttctcacgtagtgattagctatcactacatgaaacagagtgagcttcaaaggcgcgctaaggctatcaaccttgcgattgagtttaagccctctgtttcacctttcacgccagcattaacattgaacggttacctagagcactgactctgaatgtacaagcggaacgggcgtgacggcttcagtgaaagggggacattatgtattacgtcggtattgatatcagtaaacgttttatcgatgtgtgcttattggttgatggcattaaaggtaaacggaagacgaaagtgttacccaatgaccccaactcagcacaagctttggctcaatggttaatcctgcaaaaatgtgacccgagtcaggctcatatcatcatggaagccacaggggtttatcacgaacaccttgcttatggtctccatgtggccggtattcttgtatcggtggccaatcctcatcgagtacgtgaatttgccaaaggaatggggatattgaccaaaacagaccgcgttgatgcttatgtgctggcaagctatggatgtttaaaacaaccggatagttgggttccgccttcgcaagaaataaagaagctcagggcattattgcagcacagggatagcctgcttaatgataaacagcgtgtagaaaatcgcctgggcacgttgaaatccaccacacctccggaagaagtcgtgacgtctctggaatcgatggtgcaacatttaaaggatgaactggagcacattgagcacctgataaaagttcacatagagaagcatctcggactaaaaaaggacctggcactcctgaagtcgattgatggtgttggagagcaaataggatggaatatgttagccatcatcaggggtaatcactttaggagtgcggagcaggtggcggcgtatctgggagttatcccggtagagcgtcgttcaggcacatcggtgcatggcagggccagtctgtcgaaaataggaccgccgggtatccgggcgaagttgtatatgggagccattgccgctataagtcacaatcgtcatgtaaaagcgcaatacacgcggctattgctaaaaggcaaggtaaagatgctggcaataggggcggcgatgaggaaactggttcatctatgctatggcgtacttcatactcaacagccctatgacaaaaattacggcgtcgtaaccgattgaagtgcttgactggcaacacggtta

SEQ ID NO: 7021 - DNA, 1505 bp, unidentified
  source 1..1505: mol_type = unassigned DNA; note = element_ae31dba
  misc_feature 1..4: note = core
  misc_feature 5..238: note = LE
  misc_feature 239..1489: note = CDS
  misc_feature 1490..1505: note = RE
gtcactagggcaccctctttctcatgagcaccgctacggtgctcgatgtagggactcggcgggagccggggtgacggtctgtggcggtcgccggaaaacggccttcatgacaccaccgcccccggtttctccggggacacggactggcaacagggagacgcgccgcagagcgccggttagtgaccgcccggtagctgtcctcctcgccgggtcgtcgctgccatcgtgaggagtttctgtgtcgcttgcgctgcctgatgcgctgtttttcaccgggatcgactgggccgctgagacccatgcgatctgcgtgatggaggccggggggaagatcgcggcccagttcacgatcgagcattccgcggacggaatcaccgccttgctccgccggctggcccgctatggtgaccccggcgccctgccggtcgccatcgagcggcccgacggccgcctggtggacctgctcctggaagccgggcacccggtggtgcccgtcaagcccaacgcgatcaagacctggcgcgagggcgaggtgctgtccggggccaagtccgacgccggggacgctgcggtgatcgccgagtacctgcggctgcgcgcgcacaagctgcgggtcgtcgcgccctacggcgaccagacccgggcgctgcgcaccatcgtgcgcagccgcggcgatctggtggagctgcgggtcgcggccaccaaccagctgtccgcgctgctggacgcgcactggcccggtgcccgggccatcttcgccgacgtcgaatcgccgatcagcctgaagttcctcacctgctacccgaccccggccgctgccgcccacctcggcgaaaagcggatggccgcgttctgcctcaagcacggctactccggccgccgcagccccgccgagctgctggcccggctgcgctccgcaccagccggcaccaccggcgaggcactcaccgacgcgctccgcgataccgtgctcgccgcggccggcgtgctcagcgccctgaacgccgcggtgaaaaacctcgaccgctccatcgccgcccacctcggagagcacccggacggcgcgatcttcacgtcgctgccaaggtcgggtcaggtcaacgccgcccaggtactcgccgagtggggcgatgcccgcccagcctacgagcaccccgactccgccgccgccctcgccggggtcacaccggtcaccacacagtccggcaagcaccgcggcgtgcagttccgctgggcctgcaacaagcggttccgcgtcgcgatcaccaccttcgccgacaacagccggcacgccagcccctgggccgccaagatctacaacgatgcccgcgcggcgggcaaagaccacccccacgccatccgcatcctcgcccgcgcctggatccgcgtcatctaccgctgctggctcgacggcgtcccctacgaccccgccaggcacggagccgcggtcgcgctcgcccagcaaactgccgagcaaatcgcggcctgaggttgacacggggagt

SEQ ID NO: 7022 - DNA, 1426 bp, unidentified
  source 1..1426: mol_type = unassigned DNA; note = element_ae48313
  misc_feature 1..2: note = core
  misc_feature 3..261: note = LE
  misc_feature 262..1140: note = CDS
  misc_feature 1141..1426: note = RE
  misc_feature 36..237: note = bridgeRNA
ctcctatgtttacaaagttaattcaagcgggtggataaaggttaaatttgtaggataaagtgataaaagggtgagagtggattaaagcctaaataactcatgaagtatattgtgctatagaaattgcctcatcctttttcatcttttcgagtctgaacagaatgtaaggaattgagtattgctcaagatccagaatatccaaccaggagacaagactaagggagattcatcactttatattcacccttaacttatagaatgatgagagctttgaaacaagtattgggcgtagatgtggctcagaaagaattagtggttacgttaggtcggctgctggaagatttgagtatagaattgtatggtcataaagtttttaggaataccgagaagggtttttcgtctttgctcgcgtggactaaaaagtttacagattccgactcagaagtacggtttgtgatggaagccacaggagtttatcatcagaagtttgcttattttctggatgataatcgttgtgctttaagcataattttacccaacaagattagcaattatatcaggaccttggaggttaaaacaattactgataaaagctgctctgaggctatcgctagatttggattagagcgaaagctagacaattggacacgccctaaaaaaacgtatcgaagcctccaacaacttactagagagcgtgatcaggtagttttagagcgctctgcggtaaagaaccaattacatgctgaaagtcaggaggcggagccgcatgagcggagtttagagcgattgaatgagcggatcaggtttctcaacaagcaagaaaaagaaattaaaggagatatagaacagatagtcaacaagcatgctgaactgaaaaaggaggtagagattatcagtagtattccaggtgtcggagaattgacggctgttattattttggcagaaacaaatggctttgatttgatacgaaacaagaagcaactaaccagctatgcgggctttgacgtgaaagagaaacacgggggcgcccgtgcgatcaggaacttcggtaaaaagcaagccgaggatatcaaaaaaaggaaaccgaagtttaagaaaggcaatgtatttgccttcaatggcagccgtaaaatgggatgataatttcagaaatatgtttgtgagaatcgtcagtaagcaaggtataaagccgggtcgccggtgcgatgaaagcattgatagctgtccaaagaaaattattagagttagcctatacgctatataagacaaaaacaagctatgacaaatcatacgaaagcaaaaaggcagagcagaaaaatagcatgtcagcacaaaaggcgtaaacatgctatactggctggctcggagccgccttcaaaacaaaggtattaaaaaataaaatatttataggtttccaacacagaat

SEQ ID NO: 7023 - DNA, 1613 bp, unidentified
  source 1..1613: mol_type = unassigned DNA; note = element_ae497d6
  misc_feature 1..2: note = core
  misc_feature 3..438: note = LE
  misc_feature 439..1491: note = CDS
  misc_feature 1492..1613: note = RE
  misc_feature 13..295: note = bridgeRNA
ctattacaatatatttacggtttaaggcacggcagccagccgtgtcttttccgtatcgttgcctaagctgttagaatgagagtgtcttggcctgatgcaatcctccaaggatcatcgcgtccgtaacgaagtccgtcagccagcctctcgttcgcagcgttcgatttatgcaggttgagtcgccacaccggtgcgcccgtgtcatcaaatagattggatcggcaatgatgaaatggttggtcgccaaagacaaatccatgatgaggagcgttgtacatgagcaatgtggcagggattgatatttccaagggaaagagcacggtgtctgttctccgtgcattaggggaatagagggcaaagcatttttctgttgttaagaccgggagagaactcaaagttctagcaaactacttgaaaatgttggtaggagagacacgggtggtcatggagcacaccgggcggtactatgagccggtggcccgctttctccacgatcagggcatctttgtcagcgcggtcaatccaaagctcatcaaggactacgggaacaacaccctgcgcaaagtgaaaacagacaaggcggatgccaggaagattgcccgctatgggcttgacaactgggtggaattgcgccaacatactcctatggacacgattcgaatgcaactgaaaacgctgaaccggcagcaggggctgtactccaagaccaagacgatgatgaaaaacaatctcattgcgctcctggaccagacctatcccggtgtcaatgccctgtttgacagtcccgtccgagaggacggcagtcagaaatgggtggactttgccacggccttttggcatgtggactgcgttcggaatatgagccttactgcctttaccgagcgctaccgcaagtggtgcaagcgccatggttacaacttcagccagagccgagccgttgagatccatgctggagcacaagatctgattgccatgctccccaaagatgccctgaccaaaacgatgatccggcaggctattgatgcgctgaacgccgtctctgcgtctctggaacggctcaaggccgaaatgcgtaccttggcagcccagctcccagaatatcccgtagtcatggctatgcatggtgttggagattctcttggcccgcagcttatggcggaacttggtgatgtaactcggttcacccacagaaacgccattacggcttttgcgggggttgaccctggagctgaccagtccggcacccatgaggcaaggagtacaagagcctccaaaagcggtccgccagaactgcgcaaagcactcttcctggtcatggactgcctgttaaaaactatgcctgcggacgacccggtgaactgctctatggacaagaagcgagccgagggcaaaccttatctggtttacatgacagccggcgccaacaagttcctacgcatctactatggccgtgtaaaggagtatctggctttacgggaaaatgctgattaaccacttccatactctttcaatttgaccggcgcttgcgcggcggtctttttgttttgctctctttcgcctcctactaaggttgcaaactttcctcaattccctgttgactttttatttgcaga

SEQ ID NO: 7024 - DNA, 1387 bp, unidentified
  source 1..1387: mol_type = unassigned DNA; note = element_ae49e6d
  misc_feature 1: note = core
  misc_feature 2..298: note = LE
  misc_feature 299..1372: note = CDS
  misc_feature 1373..1387: note = RE
  misc_feature 1..295: note = bridgeRNA
cagtaagaatagaagtgcctgatcttctcgaatggtttgacccacacagcgatcgacccctgaacagtcggtcaggtgccgtgagtgttcccgaaaggttctgactcacactctgatcgaccagcgtgtctttccccggacctgtcgaccattcgagaacactcacggcgaggctttcgcctcgccgtgatcatgtgactcaagaagggcctgaacaccttttctctttactgtcttgtccaggttaccggtcgatacgaaagcaccacaaacaatgcacatcgattggagaaacctcatgacctcacaacctttcatcactgtcgttggtggcgtagacacccacaaagacctgcatgttgctgcggtagttgatcagcacgaccgggtactcgcaaccgaattctttcctacgaccaggcatgggtacaagctgctcgtgcactggttacgctccttcggacagatcgccaggatcggggtggaatgcaccggcacctatggggcgggcctgttgcgctacctccacgcacaagatatcgaagtactcgaagtcaccggccccgaccaagccctccgaaggcgcaaaggcaaagacgacaccctcgatgcagagaatgctgctcacgcagcctatgcccgggtgcgtgccgtgaccccgaaaacccgtgacgggctggttgaatccctacgggtgttgaaagtgtcccgtaaaactgcggtcgctgccagacgagtcgcgttacagatgatccgcatgaacatcgtgtcagcaccagacgaactccgtgaccagctgcgcaccctgactcgcatgaaactcatccgcaccctagccgcatggcgaccagatctcacgaagtatcgcgatgtcactggcgcgtacaagatcgctttgaaatcccttgcacgtaggtacctggaactcactgatgagatcgctgatcttgatgtcatgatcaaaaacattgttgatcatctcgccccagacctcatcaaaaaaccagcggtcggctatgagtctgcagctcagctgctgatcactgcgggagacaaccccgaccggctgacttcagaagccgcgttcgcagcattgtgtggggcgagcccgatcccggcatcatcaggcaaaacacaccgtcaccggctcaacaggggtggtgaccggcaagccaactctgccctgcacatcatcgcgatcggcagactcagaaccgacccgagaacccaggactatgtggcgaagaaactctccgaagggcactccaaaatggaagccctcaggtgcgtgaaacgatacctcgcacgggaaatgttctacgcgctcaaaaccagaacccaggtaatcaatcagacgcagattgctgcttgacacttagaagggcgt

SEQ ID NO: 7025 - DNA, 1562 bp, unidentified
  source 1..1562: mol_type = unassigned DNA; note = element_ae52bcf
  misc_feature 1..2: note = core
  misc_feature 3..77: note = LE
  misc_feature 78..1190: note = CDS
  misc_feature 1191..1562: note = RE
  misc_feature 1296..1549: note = bridgeRNA
tgttggggtggacggcccccgacggcatcagtgtgccagaatgaggtcgttggagatctcaaacgagggagccgtccatgaacgatcttatccgcattggcatcgacacgtccaagagtgttttcgtcctgcatggggtgaacgcggcggaacagccggtgctgcgccgcaagctgcgtcgccggcagatgcctgagttcttcgccaagctgtcgccggtgcagatcggcatcgaagcatgtggggctgcgcattattgggcgcgcgagcttgtggccttgggacacgaggtgcggcttttgccgccgcaatacgtcaagccctacgtgcagcggggcaagaacgacgcggcggacgcgagcgcgatctgcgaggccatgagccggccgcgcatgcggttcgtgccggtcaagacgggcgagcagcaagcggcgctgatgctggtgggcgtgcgcgaccaattggtcgcccgccgcacgcagctgagcaacatgatccgcggttatgccgccgagttcggggtgacggcggccaggggactcgacaagatcgagccgctgctggcacgggtggcgcacgagccgggagtgccggcgcaagccaaggcactgttcgcggcgctgggcgaggagttcgtcgcgctcaagcccaggctgcgcaagctcgaagcggacctacggtcctggcatcgcggcaacgagctgagccggcgcctggcggagattccgacggtcggtccgatcgggtctgcgttgttgacgatgaaggtgaccgacccccatgccttccggtgcggacgagattttgccgcctgggtcggacttaccccgaaggatcactcgactgccggcaagcagcggctcggcgtgatcacccgcgccggcgacgaagccttgcgcagcgtgctggtggtcggcgccaccgcactgatccaacaggcccggaaggggcgcggcaatccctcgccgtggttgatcgggctgatgcgacgtaagccgccgaagctcgtggctgtggcgcttgccaacaagacggcgcgcattgcctggaagctgatggtcagcggcgaacgccacaacgagcgacacgcgcgcggcggcttcgttccgccggccggcagtctagcgccggacgcgcgccgtcaaggccgcgttgcgccgcctgcggcggtggcctgcggccagccttgaccgcgcttgccgcccggcgctccgagagcgccgccatcggcaaaacgaagccttggcccttaggcgcagagagtacctgaaatgatcccgatctctacgtaacccccagttcgacgtgcggcgaaccgcacggcgaggccgaagcttgctcgagaaaaggcagatggcgtgatcgatcgatcccaagacgcgagccactccgtggcatccagtggcccaaacacttcaggccgctttactgtttggaactcgcgtcgcggaacccatcttggcagcggtcatgtgcgaccgcgtcaacagaccggacatatgatcgcaagcgatccggtcgcgccttgcctaatctcttgcgggctgggggccgtccacata

SEQ ID NO: 7026 - DNA, 1450 bp, unidentified
  source 1..1450: mol_type = unassigned DNA; note = element_ae5c52d
  misc_feature 1: note = core
  misc_feature 2..61: note = LE
  misc_feature 62..1180: note = CDS
  misc_feature 1181..1450: note = RE
  misc_feature 1231..1444: note = bridgeRNA
taatgagatggtccgccgccgtagatctcaacgcgcgacgattgcagaaaggagaccagcaatgaacatcatcggaatcgaccttggcaagaccgtgttccatctcatcgcaatgcgcccagatggagcaatcttcacgaagaaacggctatcgcgtcctcagttgatcgcgttcatgagcaacaccccacctagcgtggttgcgatggaggcaagctgcggggcgcactatcttggcaggctgctcgtcagccaaggccacgaggttaagctgattccagcccagttcgtgcgtccctttgtaaagtcccagaagaatgactacgtggacgccgaggccattgcggaagcggcacagcgtccgacgatgcgcttcgtgccgatcaagactgaagatcaactggacctgcaagcgattcatcgggtacgcgagcggctggtggaacgccggaccgcagtgatcaatcagtttcgggcgttcctgttggaacgtggaatcgttgtccgtactggccgggaatgcctgttgagacgaatgccggaagttctagcgactgccgaagcgcaactggctcctcgaatgtttcgcctgctaaccagtgtcgtcgcggagtggcgagcgatcgaaaccgagatcgcggagatggatcgtgagatcgggatgatcgcgtcgacggatgaggcgtgtgttcggctgcaaactgtgccaggcatcggaccgctcatcgccactgccgtggtagctgcggttggcaatggggctgcgttctctcgtggccgggagttcgcagcttggttgggtcttgttcctcggcaggcatccacaggaggcaagaccaagttgcttggaatcagcaagcacggcaacacctatcttcgatggctgttcattcacggtgggcgctcggttcagcatcgcgtgtcccgtgagccgcacgccttcggtcggtggctcacggagctggagtccagaacacactccaacgtcgccggtgtcgccatggccaacaagcttgcgcggatcgcctgggtcgttctgaatcggcaggagccgtatctccgaatgaaccagccgtcgagcggcggtggcttcggcctctccaccttggctacgccagtttcagacgccgctcaaggctcttcgatgaactcgctccgctcggccttgaccagcgcctgaaaccggcgaaaggatccacaatcaggccgaagccagattacgaacccacctcggttttgcgagcagaagaactgatgaatgaacggtcaaccgtcgcgtcccaaacacctgacgaaaaaactggtccacacaaaagaccgtagccgttgtgaggctgggcgcgcgcggatactcatcaaggccagggctctgcccaccaacaggccggatacatttacgcagaccaaactcatcacacttcttgcttgcaatcgagcggcggaccataca

SEQ ID NO: 7027 - DNA, 1370 bp, unidentified
  source 1..1370: mol_type = unassigned DNA; note = element_ae6a4ff
  misc_feature 1..2: note = core
  misc_feature 3..83: note = LE
  misc_feature 84..1106: note = CDS
  misc_feature 1107..1370: note = RE
  misc_feature 1080..1357: note = bridgeRNA
tgatggggtggatgcccctcccgctggcatcgcaatgtgccatgttggttttggaagaaaccacgatagaggaggaaacatccatggggaacgttaacattataggaattgatttagcaaaacgagtttttcaattgcatggtgcaggtgctgaggggacagtattgtttcgcaagaaactgtcacggtctcaatttctcaagtttttgtctaagcaaccaaactgtattgttgcgatggaagcctgttccacatcccattactggggtagagaaattgtaaaacttggccatgaagtgcgccttatcccgccaatttatgtgaaacctttcgtcaagcgacagaagaatgacacaacagatgcagaagccattgctgaagcagcagtacggccaaccatgcgttttgtagctgtaaagacagcagaccaacagtctcacgccatggtctttcgtacgcgcgaacttcttgttggtcagcgaacgcagctaatcaatgctttgcgaggtcatctggctgaacacggtattgtagctgctgttggtattgttcattttggcaagcttgttaatgcaattgaagacgaagaacttccagaaatagtgcgaacaatgagccggatgtttgttgatcaaatctccatttgttcacagaagatatccatgctgaataaaacgatccgcacctatgcggctgccgatcaaggggctgctctattgcagacaatgcctggagttgggccaatcagtgcaatggcgatcaaggcttttgcaccttcaatggaagagtttaaaagtggtcgagactttgcggcgtggcttggattggtaccacggcaacactcaagtggtggcaaggaacggttgggacgggcttcaaaaatggggcagcgagatatccgcagattacttattaccggtgccatgtctgttgttcaatgggcgggccgcaaaggaaccactgcaggctcgtggcttgatcgtatgatggctcgtaaaccgcttatgctggttgcgatagcactggccaacaaaatggctcggatgatctgggccatgttaacgagaaatgagatttaccgagatccagtgatgattgctacgtaaaatacacacgatctgctggaagttggtagaatgtgagtaggtgaaaggactgtaaggaacacgatcaacgagatggattgggaaaaccagaatttaacacgggatttaaaaatccgtaatagtgatttggacccaacccgcgtatctccataccggctagcagcaattaaaaagctgcaattaaaaggcctgacacatgactgcacctgatcgcatgttcaaaacagaccaaaaacagcttgcatcaaacggggcatccacaca

SEQ ID NO: 7028 - DNA, 1359 bp, unidentified
  source 1..1359: mol_type = unassigned DNA; note = element_ae77a96
  misc_feature 1: note = core
  misc_feature 2..83: note = LE
  misc_feature 84..1121: note = CDS
  misc_feature 1122..1359: note = RE
  misc_feature 1128..1351: note = bridgeRNA
caatgggatggagtcctcctcacctaagtccgcgccatgcgccatactgagagggtgaggtcaccggctgaggagagtatcccatgagcatttcacgcgttggtgtcgatattgccaaatccgtctttcatgttcacggcgtcgatcgtcatgaccaggtcgagtggctcggcaagtacaagcgcgacaaatggcttgatgccatcgtcaagcgcgtccccacgggagccgtgatcgggatggaggcgtgtgcctccgcccaccattgggcgcgtgagctgcaggcacgtggctatcacgtcaaactgatcgccgcccaattcgtcaaaccctacgtcaagagtaacaaaaacgatcgtgtcgatgccgaagccatctgcgaggccataggacgtccgagtatgcgcttcgtcgccgtcaagaccgtctcacagcaggatattcaggcggcgcatcgcatccgcagtgaattggttcatcagcgcactgccaaggccaaccagatccgaggtctgatcggtgagtacggattggtagcgcccatcggcactggccagctgcgcacggccttgccgcgctggctggaagatgccgagaacggcctgaccgatgacttccgtgtcttgttgtcgggtctcgccgaggagctacgctatcttgatgagcgcatcgctacggtgaccgagcgtatcgaacgacacgctcagaccgacccggttgccaagcgactgatgaccctgcggggcgtcggcacattgatcgcgagtgcgttggccggcgctttgggtgatgctcaggccttcaagtgtggccgtgattttgccgcctcgctggggctgacaccgcggcagcacagcacgggaggtcgtgaccgcctactgggcatcagtaagcgaggcgacagttatttgcgcagcttgctagttcatggggctcgcgcggcattccgatggagcgaaggccggaaggataacctcagccactgggtcaggcagttggctgaacgcaagcacgtcaatgtcgccgtcatcgcgctggccaacaagacggcacgcattgcctgggcgatcacccgccatgaccaggcctatgaccctgacctggcatcgcaggcggcgtagttccctaccatcaacgattgctgagcatgctgctagatggcgaataggtcgaaccgacgtcagaaaacccctgtggaccgctgagccgtagagctcgtgtaagcgaatgggagctgacgtgcgaatagcccacttaggtccgatgccgctggcatccttgaaaagaccggatatacgtgtgcagtcgtacctaccgaccatcgcgcctcatgctggcaaacgaggaggactccatata

SEQ ID NO: 7029 - DNA, 1399 bp, unidentified
  source 1..1399: mol_type = unassigned DNA; note = element_ae7c82e
  misc_feature 1..2: note = core
  misc_feature 3..86: note = LE
  misc_feature 87..1130: note = CDS
  misc_feature 1131..1399: note = RE
  misc_feature 1159..1397: note = bridgeRNA
tgatgtgatggacgactccctcccttcggggcaggcatatgccaaagtggagaggtcgtgacttccacggcaaaggagcgtttatcatgaagatagcgactattggactggatctcgcaaaaaccttgttccaggttcatggagtggattcgcagggacatatcgtcgtacgcaagcaacttcggcgcgctgatgtgctgccgtttttcgcgaagcttgagccgtgcgtggtaggcatggaggcatgtgggtcatcgcattattggggccgagaactcacgaagctcggacacaccgtgcgcctgattgccccgcagttcgttcgaccttacgtaaagaacaacaagaccgatgccgcggatgccgaagcaatctgcgaggcggttaatcgaccgaacatgcgctttgtgccgatcaagacgcaagcgcaacaaacgatgctttcactgcatcgggcacgcgccgggctcgtcaaatcacgtacggcattggccaatcaaatccgcggcttgctcagcgagttcggtatcgtgttaccgcagggcatcagactgctcgggcaaagggccatcgaagccctttccaatcgcgagtatgagcattgcgaacagttccgaaccttgattcagatactcgtggagcacttacgcgaactgggcaacaaggcagccgaactggagggacgcatccgcgcgatgcatcgtaccgatgaggcaggacaacttcttgaaacaatacccggggtcgggccgctcaccgcttccgcgctggcagcttcaatcggtaaccctcgagcctttcgggacggccgcgaactcgctgcatggctgggtctggtcccgcgccagcattcctcggggggcaagccgcgcttgctgggcatcagcaagcgcggcgatacagcgctacgaacgcttctgattcacggagctcgcgctgttattcgcatggcagccaccaagcccgaaatggcagattcgtgggtcatgaaattatgtcgacgccggcacgaaaacatcgctgcagtggcgctcgcggcaaaaaatgcacgaacggcgtgggctctgctggttcgcaaacaggtctatcaagttagccatgttcccatacgatctggcgtgacggcttgacagctataacttctaacatcggaacaacatttaacttccagaggttgcttgagcagacttaaattcgatgacaaaacggtcggaccgtggtgggccaaacccgctttgcaccaagggcaactaagcccgtggctctgatggggtacccactcgcggatattcatcgtgggcctgcagcaagcgctgcgaaccgagcccggatacatggctgcaacctcgacccaatgccagagattcagactgcttgacaactgggagtcgtccataca

SEQ ID NO: 7030 - DNA, 1646 bp, unidentified
  source 1..1646: mol_type = unassigned DNA; note = element_ae860ee
  misc_feature 1..2: note = core
  misc_feature 3..297: note = LE
  misc_feature 298..1332: note = CDS
  misc_feature 1333..1646: note = RE
aatcaaccattcggccgcgttgcgtccgcacaaatagggatgaaagcgtgcagacaaacggccgcctttcttgtaaaattatgttgaggaggatgcacactacaacgcacggtgggaggagtcgtagactgcatttcaaacctaaaacagtatatcaatcagtgctggaaccgccttttcaagcacaaataagtggcgtcttgagcccgtacactaaggattgttttaacacctgttaaattgcttggaggttcagtccctgcattctcctcacaattttatagaggaggttttgttgtgaaagtcgtattcccaacctgctgcggtgtagatgttcacaaaacattcctggttgctaccatcatcaccacccccgcagacagcttgcagcccaactatcagaagaagcgattcagcacctttaattcggatttgaaccgttgtgcggactggctgctggaacacaattgtctggatgtctgcatggaatccacggggaagtattgggttccggtattcaacatccttgaaaagcgtggtattcgggttgtaatagcgaaccccaaatgggtaaaggctgtaaagggaaacaaggatgatacgaaggattccaaatggatcggggatttgtttcgcattggccttgtgaaaagcagcttcatcccagacctgaatatccgcattctgcgtgagtttacccgctaccgctataagctggtgtccatgaaaagcagtgagaaaaatcgctttcagaatgcgttcacagtctgcaatgtggctctggattctgtcgtgtccgatatgtttggtaaatccgcaactgcaattacggattacctcacatccgacgagtcctttgacgccgaacattgtgtttccctgttacagcgctccctcaaaaagaaggctgaacaagtactggaatccattgaaggcttttccattgccgatgagcagaaggcccgcatcaaaatcatccgtgagcatcatgatttcattgaggaaatgattgccacggtagatacccgtgtcaatgagatggttgcaaagtatgaaggaaacatcaatcttctttgcaccattccgggtattgaccgtaggtctgcaattaccatcatctctgaaatcggcacggatatgggccagtttggctcctcaaaacggctttgctgctgggctggcctgacacccggcaacaatgaatctgccggaaaaaagaagtctgtgcggatttcccgtgccggtgtatacctgaagcctgctttggtacaagtcgctcacgctgcggtaaaggacaacgatcatccttactacaagctgaaatacgagtgaattgccaagcgcagaggcaaaaaacgagcaattattgccattgccagaatgattctgactgctgtttattccatgttctgcaccggcgaagtgtggaatcctgtggacctctacaaagtcgatatgccgggatgtttgaaggagcagcagcttgccaaagcaattaagcaggctacgcgcttccttgaaaagcagggattatctgtggcttagctcggattgaatacgctttgaccttgcaaaacaagctgtttgcaaggatgttttcgtgcgccttctttcctctgcgctggtcaggtactcactttcacact

SEQ ID NO: 7031 - DNA, 1476 bp, unidentified
  source 1..1476: mol_type = unassigned DNA; note = element_ae8ec79
  misc_feature 1..2: note = core
  misc_feature 3..135: note = LE
  misc_feature 136..1206: note = CDS
  misc_feature 1207..1476: note = RE
gaggtggcatgaaagatgccgcgcccatcgagagaacggatcgctgacatgccgatgatcttgggacagtcacgttttgcgccgtttggcttatctttcccttgttttgacgaacttaaggaaggagtgcaaaacgtgactgcaccttatgattatcacattggcgtggattaccacaaaagctacagccacctgattgtccaggattcctgcgggaagacattgcgatcggggcgagtgaagaacgaccgccagtctctcggttcgtttctggaacggtatcgccagaacagtcatgctgtgatggaagccacccgcaactggatggtgatgtacgactggctcgacgacatttgtgatgatgtcgttctcgcccacccattgaaggtcaaggcgatcgccgacgcgaagatcaagaccgacaagatcgacgcgacggtgctggcgcatctgctcagagctgatctggtgccggaggcatgggctcccggagacagggtgcgggagttgcgcctcgcacttcgagagcggatgttctatgtgcggctgcgcacgatgacaaagaaccgggtcgtgaccgtgttcgaccgctatccggagcaaacggcgcaattgaagaaaccgactgatctgttcggcaagacaggccgccagcagctcgctgcgattgacgtttcagaaatcgaccgcgtccagatcgatcgtgggcttgaattcatcggcgacatcaatgagcggatcaagcagtctgaagccacgatccgggctatgacgaagaccaatggcaaggtgaagcttttgaagaccatccccggtatcggggagttcttcgccaggctgatcgacgccgagattgacgacatcagccgtttccgcaatccgaagaagttggccgcctatgccggacttgtgccctcgacctattcgtcgggcggcaagacttaccacggcaagattatcaagcagggcaacaagtggctgcgctgggcttttgtcgaggccgttcagccggccatcgcgacagacccgcagcttcgcgcccagtacgaacatctgaagttcagaggagtgaacaaagcgcgtgttgcgatcgcgcgcaaacttttgacgatcaccttccagatcctgcgtgaccagcgcccttacgagcggcgcggtaccaacagcaaagaaggtccgtcgtcgacgatatcccggctgtcctgattgtcttctagcgagcccggcacgtccgggccgcgctcttcaggagaatgggaagccgggagccgaacgccactatgtgaccgaaaccgacaaacaggccggtgttaggggcacgaattggagaatggttcagcaccgcaggacggcaaaggccccgtcctgcgaacgaagaagatttagccgatcggcgaaaatgccggtctcaacataacagagcccagggaatgcgacgcagaataagcattttgccccttgagttctttcattgga

SEQ ID NO: 7032 - DNA, 1358 bp, unidentified
  source 1..1358: mol_type = unassigned DNA; note = element_ae92ed4
  misc_feature 1..2: note = core
  misc_feature 3..163: note = LE
  misc_feature 164..1099: note = CDS
  misc_feature 1100..1358: note = RE
  misc_feature 1108..1348: note = bridgeRNA
ttatggatggcccgcccctcccgccggcaccagtgtatgatgccggtgtccaagagaggaaggagcgagccatgcaaataatgatccttggtattgacctgggcaaaacagctgcagcgtcgttggcctgaacgaaagtgggaaggtcgtcgttcgacggcggatgcggcgtgacggggtcatctcgttcgctgccaagctgccgccatgcgtcatggcaatggaagcttgctgtggtgcccaccatatgggccggtcactcgtggcgtttgggcatgagattagactcatgtcgccggagtatgtgcgaccttacgtcaaggctcagaaaaatgacgaccgcgacgcagaggcgatcgccgaagccgcaagccgcccgaccatgcgttttgtcgaactcaaaagcgaggagcaacttgacattcaaaccctccatcgcgtgcgcgaccgtttggttggtgagcgcacttcattgaccaaccaaatcagaagcttgcttttggagcgtgggctcgtcgtggcacaggggcacgctcgattaagtttattgcttagcgaactacttgacaccgatgccggcacgcttagcccgcgcatgatgttcctgctgcatgacatgcgcacacgttgggaggaactcgatcggcgcattgctgcgtttgatgctgaatttgcgtccatggctcgaactgacgagcgagctcggcgtttgacggacattcccgggatcggggcattgaacgccacggcgcttgtcgcggctgtcggcgacgcaacgacgttttccaagggacgcgacctcgcagcgtggttgggacttgtgcctcgccaggccactaccggcggaagaccgaagctcttgggcatcactaagcgcggcagcagatatttacgcaagatgctgatccagggcgcgagatctgccatgccctcgttggcaaggagcgacaccgccgtaggggcgtggctgcgagggcttctcgcacgtagtcactccaatgtcgccgttgtcgcactggccgcaaagatggcgcgaaccgtctgggccttgctccaccacggacgaagctacaaggtcatgtcgataacgactgcctgagacacataaacagcgctcatggcgaaaacgacgcccgatgcgccgaactgcgagtggtagaaggaagatggcctgacagtcgatcggcgtcctgaaaacctccggcgctaaatggccttcgaggccggcccctttatgaggatgaggacgcgcggatctccatcttggcagtggccagcgcgccaacatgccggatacgtttgtgcagactgttcacaccagcatccgattatcgcttgcaaacggggcgggccatacg

SEQ ID NO: 7033 - DNA, 1547 bp, unidentified
  source 1..1547: mol_type = unassigned DNA; note = element_ae97137
  misc_feature 1..3: note = core
  misc_feature 4..290: note = LE
  misc_feature 291..1529: note = CDS
  misc_feature 1530..1547: note = RE
  misc_feature 92..282: note = bridgeRNA
tagcggttcagcgtcgctgacgcgccgtggtggtagaaagtcgtcgttggctcgccttaggctctggttccggtaggtggttaggcggatcattgaggtgtctgccacggtcgacgccggtccaagcttggtgctgtagttgagcctgtgagctagcgtggcgtggaggacttccacgggaaccgtggattgttgccggtgagcacgagtgttagattcctgaattgatttccctgtcctccccgcggcagacaccaattatcgagtttaagggtgtcaggagaatcatcatggatatcgtgcatgaccgggcggtcgggatggatatttccaaacgcgacgcgaaggtttgcctgcgggttcctggtaaacgggccggaacattcaccacgacggtgaccagttggggtgcaacaaccagccagatcctggcacttcgggacttcctggaggccgagcatgtgagcacggtggtgatggaagcgaccagtgattactggaaaccgttcttctacctgttggaggaaacactgcccgttgtgctggtcaatgcgaaagcggcccggaacatcccgggacgtaagaccgatgtctccgacgcggcgtggttggcccaattggccgcgcacgggcttctgcgggcatcgttcattccaccggagcccatccgggagttgcgggatctgacccgcacccgctccattgccatcagggaccggactagggaaatccagcggctggagaagttcctggaaggctcgggcatcaagctttcctccgtggtctcggacctgaccggggtctcctcccgggccatgctcgaagccctcatcaacggcgaacgggatccgcagatcctcgcggggctggccagaggaacgctcaaatctaagatccccgaactcgtcgacgccctcaccggtcgcttcaaggaacaccacgcgttcatggcacggctgcacctggatcagatcgacgcccagagccgcagcatcgacgccctcaccgagcggattgaggaggcgatgtcaccctttcgcgcagccagggaattcctggccaccatccccggagtgtcccagcgcgtcgccgaagtgatcatcgccgaaaccggtgcggacatgaccgtcttcgaaacccccggacgactcgcatcctgggccggggtctgtcccggatccaacgaatccgccggccggatcaaatcagcgcacatcctgcccggcaacaagtacctcaaagccgcccttggtaccgccgcactctccgcttcccgcagcaaaaacacctaccttgccgccaaataccggcgcatagccgcccgccgcggacccatgaaagccatcgtggcgctacagcattccatcctcaccgcggtctggcacgtgctcgccgacggcgaatgctacgcagaccccgggcccgaccactacacccggctggacccggccaaagccaggaacaaagccatcaacaagctaaaaagtctcggctacaacgtcaccatcaccccgggaaccgcagcctgactcaccttactttcgtat

SEQ ID NO: 7034 - DNA, 1373 bp, unidentified
  source 1..1373: mol_type = unassigned DNA; note = element_ae9842c
  misc_feature 1..5: note = core
  misc_feature 6..250: note = LE
  misc_feature 251..1321: note = CDS
  misc_feature 1322..1373: note = RE
  misc_feature 31..228: note = bridgeRNA
cttttatttttacaaagaattattaaaggttgattatattgttgttcaaacaaggtataatcgacttgcatacgagacgaagacgggctaggtaagatattgaatctataccgtaaaaaaggattggtccgtatgcttttattctttggagtttgaacagtacttaaggcagccattgagctagcttgtataagagaaaaggaaaaacgaggaagaattagtcgataaccacattaattcataaatcgttatgagagtacaaaaacagtgtattggaattgacatttccaaagacagcttcacggcttgtttctgtttattacaacaagatggacacatacaattcagtgatgtaaagaaattcaagaatgacaaaacaggctttaatcaacttgtaagatggacaaggaaagtcaaagatcctgttttaccaataagctttctaatggaagctacaggggtttactatgagaatttagcctatcatttatatgatattaagcaagtagttcatgttgttttacccaacacttcaaagcattatttttcaagtcttaacattaaaactaaaacggatgaattagatgcaaaagtgttaagtcaatttggggttgagagaatgcataagaaatggattaaaccaaatgaaacctacttacatcttagaaacttatgtagatactatgttcaactacaggaacaaaaaacagccttgggcaacatcaagcacagtaaagaaagtgcacatgatgttcagaagttaattcatagaagtaatactaagttgattaaagaaatagacaaacaaattgctcaaataaagaaagagatagaaaaactgattagacaagatgagcaattgagtgctagagtagataaactactgactataaaaggagttggaatacttactatagcaactattattgcagagactcttggatttcagtttgtgaaaaatattaaacagttagctagttacgcaggttatgatgtagtacagagagagtcaggaacatcaataaaaggtaaaacaagaatatctaaaaaagggaaccgatacatcagaaatgctttgtattttcctgctatggtagcgtgcaggtataatgaaaacttgaaaaaaacttacctgcgaataattgagaagaaaccatctaaaatgatagggcagatagcaatacagagaaaactactgctcttaatttatactctatggaaaaaggatgaaaattatgatagtaattttgttataaagagtagctccacagaaggctgtgaagctacgcaggatagaataatcgaaaccgttcttccttagaaatacaaaaataaaatatttttcctgttttacttggattttaaaacagtac

SEQ ID NO: 7035 - DNA, 1668 bp, unidentified
  source 1..1668: mol_type = unassigned DNA; note = element_ae9871e
  misc_feature 1..4: note = core
  misc_feature 5..273: note = LE
  misc_feature 274..1530: note = CDS
  misc_feature 1531..1668: note = RE
  misc_feature 12..308: note = bridgeRNA
ttgctacaattgtgttggttctgaaaggttcacagccagtgagctatacagacgcccaaacctaagctacaattgagatgtgcagagagaacgctgccctgcttgagctaccacgctcggaatcgcaaactgttctccgccatctccattgcagcgttcgattgacgcaggttgagttatcagcgactcttgtcactgtacattcgtgtcacaaagcaagctgaatcggtgatgggcatcaggcggaacaagcacaaaaaggaggccggaaaaatgaagtcaatggaaatcacagccgtaggtattgatgtttctaagagcaaaagcacagttgctattcgcaggccaggtggagtaattgttgcacgtccatttgacatatctcattctaaccatgatcttgagaaactggtctccatactgaaaacgacaggaggagatatccgcgttgtaatggaacacacaagcaactattggaagccaattgcattaacgctgaaggaagcaggcttttacgtttctgttgtaaatgccatgttgattcacgatttcagtgacaattccatccgaaaattgaaaacagaccgtgcggactccttgaaaatcgccaactatgcactgacgttttggaatgagctcccacccttcaatgatgaggacgaaaccagacttgtgttgagagagcagtcacgaatgtatgaaagattggcttcgacagcaacatcccttcgcaatggcctgattgcactggcagatcagacgttcccttcgattgatcaggcttttggacacgcaatcaagaatgcggatggtcatgaaaagtgggtcgatttcttttcaatttattggcacagagactgtgtactcagactttccattgaaaaattcacagaatcttaccgcaaatggtgtttgcggagaaattataaatttcgtacgaatacagcgcacaagttgtatgctctggcacaggatgccgttcctactctcccgaaaaacaacggaacaaaggctttagtattgcaggcttgcaagagcctgaatgctgtatgcgaggcgaaacagtctactcaagaagaaatgaaccgattggcttcgctgcttcctgaatatgaagttgtcatgcagatggagggcacaggacccattacaggccctgctctaatggctgagattggtgatgtcagacgtttcaaaaacaagaaagctctcgttgcctttgccggcattgatgcaccaccgttccaatctggaaactttgaatccaagtcacgtcacgtttccaagcgcggctcacctcatttgaggcgcgctgtattccttgtagcaaatattattctaaccttatcccacaaagataacagcgtcttttgctttatggacaaaaagcgcgctgaaggaaagcactactacgtctacacgattgctggcagtgcgaaatttctgcgaatctactacgcacgggtcactgaatatttgcgcacccaagagatacctgttgctgccagctgtctaaacggtaacagctaacgctattctttagtttgaaaattctgctgacaggctacacttgtcggcttattaaagttgccggatgctcactgcacccggcaacaattatttttgtttaaattttctgcttttacctcttgacacactttagcaggt

SEQ ID NO: 7036 - DNA, 1438 bp, unidentified
  source 1..1438: mol_type = unassigned DNA; note = element_ae99bad
  misc_feature 1..2: note = core
  misc_feature 3..226: note = LE
  misc_feature 227..1423: note = CDS
  misc_feature 1424..1438: note = RE
  misc_feature 10..222: note = bridgeRNA
gctctacctttctgtctgggttggtcctcccgttcgtagggtggggacgcccagggaggtgggtgtggcttgtagccggctgccgttcgtggctttcgatgcttggccgcctgcctccccacgacgactcggccgccgattgggaagtgcgaatgtgtcgctgtgtagagccttgccggcgaggtcgtcagtggtacttaaggaaagtacgacctgatggagcacgatgagccggatatgggtagggaccgactgtggcaagagccaccaccactgcctggtcatggacaccgacggtgacaccctgctgtctcgacgggtgcccaacgacgaacctgagctgctggaactgatcggtgatgtcttggacatcgccagtggagaccaggcgacctgggcgatggacatgacgggtggtgaacccgccttgttgatcgagttgctgctcaaccacggccaggaactcgtctacatccccggtatcgcggtcaaccgggccaccgacagctaccggggcgtgggcaagaccgatgcccgggatgccaaggtgatcgcggatcaggcccgtatgcgccgtgatctgcagccgatccgacccgccgacgaagccgccattgagctacggctgctgaccgaacaccgctctgacctggttgccgaccggacccggaccgtgaaccggctgaagtccctgctcaccggcatgttcccggccctggaacgtgccttcgacatgggcaccaccggcgctctggttctgctcacgggctatcagacaccggtggcgatccgccgggcgggcaagcgacgccttgcgacgtggctgcgcaaccgcaaggtccgcacccccgacgccgtcgcggccaaagcactggatgccgctgaccgtcaacacaccgccgttgccggggagaaggccatcgcgaggatggtccacaccctggcgaaggaggtaatgaccctcaacgagaagatcgccgagaccgaccagctcatcgagggacggtttcgcgaacacgaactcgccgaggtgatcgcttccatgcccggcatcgggccgatcctcggagcggagttcctcgccgcggccggcggcagcttggatgccttccccaccgctgacagactggcgaccttcgccggggtggcacccgcgccaaaagactccggccagatcagcgagaaccaccaccgccccaggcggtatcaccgacgactgcaacgtgtcttcttccagtccgccatggtcagcatccgctgggatcccaactcccgccgtttctacgaccgcaagagagccgagggcaagcatcacgtccaggccgtgctcgctctcgcccgccgccgtgtcaacgtgctctgggccctcatccgtgaccgacggtgctacaccgtcacaccaccagttactcatgccgcttgacttccagattgggaa

SEQ ID NO: 7037 - DNA, 1435 bp, unidentified
  source 1..1435: mol_type = unassigned DNA; note = element_ae9f8c4
  misc_feature 1: note = core
  misc_feature 2..231: note = LE
  misc_feature 232..1422: note = CDS
  misc_feature 1423..1435: note = RE
  misc_feature 14..241: note = bridgeRNA
ctacttgttccattgacccaggaccggtgcctggcgaggctcggtctaggtgcccgggtcgtcgctctcacatcggctgccctcgctgaggcgtgtggctctcatttggcctgcgtgacccgggcactgacccagagcagggagaggctcaagaggggtttgctcagctcgaagtagcggtgccctccctagctcgacaaccacatcggatcgagtttgttgggagcggggatgaagcgcgaatcagaacgggtcatgatcgggatggatccgcacaagcggtcggtgacgatcgaggtgatgaccgccgaggaacgggtcgtgggcggcggccggttcctcacagatgtcgccggcttcaagtcaatgctggagtacctgcggcggtggccggaccgggtctgggcgatcgagggctgcagcggcatcggtcgccacgtcgtgctacggctgctggctgatgaccaggaggtcgtcgacgtgccaccgaagctgtccgcgcgagtgcgggtcttctcgaccggtcagggccgcaagacagacgccactgacgctcactcggtcgctctggtcgggacccggatggctgggctgcgaccggtgctcgatgaccagcagctcacggtgctgcgcatcctggtcgaccgccgccggtccttgggtgaggaccacaccaggatgatcagccaactgcaccacctgctgcttgagctgatcccgggcggagcgaagaaggacctctcagctgcccaggccaaggccctgcttgcaggggtccgcccacgcgacgtcgccggcaaggtacggcgccgggtcgccgccgagctcatcggcgacctcgagcgtgtctatgcccgcaggaaggctgccgacaaagagcttcgcgacctcgtcgccgcgaccgggaccagcctgatggaactgaacgggatcggcccttcgggcgcggcacgcctgctcgtcgagatcggtgacatcactcggttccccgaccgcgaccacttcgcgtcatggaacggcaccgcaccgatcgatgcctcctcaggtgaccaggtccgccaccggttgtcgcgggccgggaaccgtcagatcaaccgggtcctgcacatcatggcgaccgtccagctccgcaacccgacggagggacgtgcctactacgaccgccgcaaaggcgacgggaagacctcgatggaagcgatgcgggccctgaaacgacggctctcgaacatcgtctaccggaccatgctcgacgacacgatcgcgcacgcgacaaccggctcgaggacgggcccgggagggcaaacgggaaacgactctgactccagcgcgaccggctcacatcccggcaccggctcttcggacaagccacttcccggacccgccaagacccaccctagaaccccactcccggccgcttcttgacacagaggggagc

SEQ ID NO: 7038 - DNA, 1557 bp, unidentified
  source 1..1557: mol_type = unassigned DNA; note = element_aea074e
  misc_feature 1..2: note = core
  misc_feature 3..249: note = LE
  misc_feature 250..1215: note = CDS
  misc_feature 1216..1557: note = RE
  misc_feature 3..226: note = bridgeRNA
ctcgtattatatagtagtagtgtttatagaccctctccaaggtctgtatgctatactattggagatactgtggagttttctttctcttaccacttgatggttttaaaaaggctacaaccacagtctctttgtatatttgttaatcagttagataccgcatgacggtttatttagaacgagcttacaatcgcaaaaagtgccgttggttctataaacagtatcaaaatatttactcaaggaagattttttatgatatacgttggaattgatgttgctaaggacaaacacgactgttttattaccaattcagatggtgaagtagtattcaaatcttttactattcctaacaaccgtgatggttttgaaaccttatttcagaaagtacaatccgtatcagataatttaaccaaagcaaaagtaggacttgaagccactggacactatagttacaatcttctgggattccttcttgataaaggtttgccgacctacattatcaatccattacataccaatctttacagaaaaagtctaagccttagaaagacgaaaacgggtaaagttgatgcctataccatcgcgtctatgattatgtctgacgtgaacttgaagtcctactcagacacatcttatcacaatgaggagttaaagtcattaactcgttatcgttttgataaagtaaaggaacgtgctaaacttaaatcttctgtatctaggcttgtttgtatccttttcccaaaatcagaaaagctcatgccacaacttcatatagtatctgtctatgccttattatccgaatttccatctgctcatgctgttgcatctgtacatctttccagacttacaaatctgctctatgagagttcacgtggcagatatagcaaagatactgcgattatgtttcgtaacgctgccagaaactctatcagctcaaatatgcctgcaaagtctctggaactgaaacataccattaagctcattcagaaattaacttctgagattgccgaaattgaaaccaaaatcaaatccattatagatgagattaattctccgattctgacgattccagaaatcagttacaacatgggtgccatgattattgcagaaattggtgatttcagtcgttttaactcagccgacaagatacttgcctatgccggatatctccatccacttaccaatcagggcaactggataattgttattcccatatgaaaaagcgtggttctcactatcttcgatatgccaccaaatatgtctgtcatttggatgaatcttttggagcatacctcgttaagaaacgagcagaaggttaacattataatgttgctttatcccatgccacaaagaaacttgtaagaaccatttatgcaatggaaaaatcaaagcaaacataccgtattgtagcctaattcttttctgtaaatatcccctagttgagtgcctaaagtgacactctatttgtcatgcagttttcaaggtacaaatatatctgaaatgcatttctgcaattcattcataaatcttttattttagacttgacttttaatagttagt

SEQ ID NO: 7039 - DNA, 1383 bp, unidentified
  source 1..1383: mol_type = unassigned DNA; note = element_aea95f2
  misc_feature 1: note = core
  misc_feature 2..66: note = LE
  misc_feature 67..1104: note = CDS
  misc_feature 1105..1383: note = RE
  misc_feature 1161..1377: note = bridgeRNA
taatgggatggtccgccgcccccgctcgtcaggagctggggtatagctgaatgcaggaggccatctatggaaatacacacaatcggcattgatctgggcaagacgatctttcatctggtcggtctgaaccagcgcggagaagtggtcgagcgcaagaagttctctcgcgcgcaattgctgcgtttcacggcgaaccggcaagtgcacctgatcggcatggaggcgtgcgggggctcacattttctcggccgggcgttgcgcgagcagggtcacgaggtgcgcctgattccggcgcagtacgtgaagccattcgtgaagacgaacaagagcgacttcattgacgccgaggcgatcgccgaggcggtgggccgcccgacgatgcgcttcgtgcctatcaagagcgatgaccagttggacctgcagtcgctgcaccgggtgcgcgaacgctgggtcatgcgccgcacggcggtagtcaaccagatccgtgggctgttgctcgagcggggcatcacggtgcgcaaggggcggcgacatctggatgcaaccttgccggagattctggaagacgcgtccgggaagctgtcggccgcattgcgtttgctgctgaagcaattaagtttggaactggagcaattggctacacgcctggaagaggcggagacgctgattcagctgacggcgaagaacagcgaggcgtgccggcgcctggacgcgatccctggcattgggccggtgactgcgaccgcgctcatcgcggccatcgggaacggggcagcgttccgcaagggccgggagttcgcagcctgggtcggcctggttccgcgagaacactcgaccggcggcagacagaagctgcttagcatcagtaaacgtggcaacgcctacttgcgaaagctgttcgtgcaatgcgcccgctcggtgctgcagcagagcagcaaacaatcggcgcgtctgtcggcgtggctgggacaactgaccgcgcgcgcccatcgcaacgtcgtctgcgtcgcgttggcaaacaagttggcgcgcattgcctgggccgtcctcgccacaggccaagactatcggcccccggagctaacggccgttgcgccggactgaccgaaccctgttgaaaggaaagccgcgcgagattctgcgaagtccacgaattcctgcccggtctgcgggcgaacattgagatggcacaacggtccaacccggcgctctcgaaacccgatatcggaaatggtcttctgagaccgtccagttagaagggaagagagcgcagcgcattccatcttggccaggagttattcactccaacaaaggccgtatacatttgcgcagaccaacccgccaccctcatttttcgcttgcgacgaggcggcggaccataca

SEQ ID NO: 7040 - DNA, 1299 bp, unidentified
  source 1..1299: mol_type = unassigned DNA; note = element_aebf3df
  misc_feature 1: note = core
  misc_feature 2..75: note = LE
  misc_feature 76..1086: note = CDS
  misc_feature 1087..1299: note = RE
  misc_feature 1087..1298: note = bridgeRNA
atggacacctccccacaaagacttcagtgagccatgctgtaagtgcaaaccaacagcaatatgaagaggtgtcccatggaacaaattatcggaattgatctggcaaagcgagtttttcaggtgaatatcgtatctgcgcagggtgagaagaaagcgaataaaatgatcacccgtgaaaaattgacggcgtttattgttcagcagcctccgtcccgtattgtgatggaagcgtgcggcagtgcaaattactggtcacgccagttcagacaatacggacatgaagttaaacaaatcagtccacagtatgttgcccccttcagaatgggcagtaaaaatgacaaaaatgatgcagctgcaattgtcgaagctgacagtcgcccgggtatgcgctatgtgccggagaagtctattgaacagcaggatattcagtgtctgcaccgggttcgccagcggctgatgaaaaacaaaaccgcgctgattaaccagatacgggggctaggcctggaatacggtatcgccataccggaaggggctcataaaattatggcccacctgcctgagcacctggaggatgcagaaaatgagctcaccacgctcagccgggagctgttccatgagatgttgcaggaacttcaggacaatcagcagcggattaaaactctggatctgcgccttgcgcttatcagccagcaaaatgaggataccctcagactgaaaagcatacctggtatcgggccattaggggcttcagccttgacggtagctctgggcgacagcgctgattggcattttgccagctatctggggctggttccgaaggagcacagcagtggtggtaaagtcagactactcgggataacaaaacgcggagatggttatctgcgaggactgcttattcatggcgcccgctcagtggtttaccgggtcatcaaccttccggaagaacgatgtggaggtctccagcggtggctgaaaggtattattgcccgaagtggcgtaaacaaagctgtagtggcgctggctaacaaaaatgcccgaatagcgtgggcgctaataaaccaaaaaacagagtatatcgttaagtaactaactgattttaataagtccaaagagttgatgtgctgacaggtagaaccgactctctgtgaacctgacaaatagctgggctgctaaaagccatggcactaatgaggacagagagtacggatgttcatcagggctcacgaagccggatatatgtgtgtggctactttgtcagaaagagacctgccggtgcttgcatcggagaggtgtccatat

SEQ ID NO: 7041 - DNA, 1252 bp, unidentified
  source 1..1252: mol_type = unassigned DNA; note = element_aec3ccf
  misc_feature 1..2: note = core
  misc_feature 3..244: note = LE
  misc_feature 245..1237: note = CDS
  misc_feature 1238..1252: note = RE
  misc_feature 10..184: note = bridgeRNA
cttgtatgttgaatcttattgagttaataattttatcagtttaccgggtaggctgttccgccctagaggcagcattgtctgacctcgtttgtagagtagccccccgcctcattgctcaactcgaagagtatcaggaagccttgtataacaaggacttcgcatcacaaggtcgaacgaagcatcaagtgcgaggtcggggagccggtgactattctgacttatttcatattcaaaggggaagcatatgagcggatttgttgggattgatgtcgcagcaaagacttttgatgttgtggccagaattgacggcaaagcgaataaagtcgagcagttcagtcaaacgcctgatggccatgctgccgttgtccgtaagttgcaaaagcttgctcctgagctggtcgtcatggaagcgaccgggatttattacctcgaccttgcggtggcattggctaaagcgaatttaccggtgtcggtgattaatcccaagagttttcatcactttgcggcgatgaagctcaacggcaacaaaaccgatgcggtagatgcggcgttgctggctgagtttgcacagtgtatgtctccgcgattatggaatgcgcctcaagacgaattactcggacttcgggacattggccgacagctcaaccggttaacagctagtcgcacccaggcgaagaatcgcctgcatgcgctgacatcaaaaagcatgaccttgccgatgctgattgaagatgagcaggatggcattgagcagctggagcggcgtattaaacgcctgactcaggcagcactggcactgattgccggcaacgccactttggctgcacactttagtcacataaccgcagccaaaggtattggtgagaccagtgctatcgccattctggcagagctgtgcgtgttgccgtcaacaatgaaatcaccgcaggtcagtcgttatgccggactggatgtgcgtcatacgcagtcgggcagcagcgtcaacaaaccagctcgattgagcaaagctggcaatgtgtatctgcgggcagccttgtatatgcccgcaatgagcgcagtgcgtcatgacgtcagagccaaagctttttatgaagcgttgaccggccgtggcaaaaagaaaattcaggcgcagtgtgcggtgatgcgtaaatatctgacaggtatctgggcctgtatgcaggcccagacagccttcgactcaacattattgttcagtgaaatacacattaaaaattgacgaggaacagagtat

SEQ ID NO: 7042 - DNA, 1633 bp, unidentified
  source 1..1633: mol_type = unassigned DNA; note = element_aec505d
  misc_feature 1..5: note = core
  misc_feature 6..279: note = LE
  misc_feature 280..1491: note = CDS
  misc_feature 1492..1633: note = RE
  misc_feature 14..299: note = bridgeRNA
ctcctacaatataaaataaggttataggcacggcagccagccgtgtctattgccgtttcatgtttaactgctaaactgagagagtattggaaagacgtgtctaccgagatactgataaaatcacgttcgtcaaggagtcagtcgtccgctctctcaatagcagagttcgatttgcgcaggtagtcccgccatttggtgagttcgtgtaacccgggagattgaataagcattgaataaagagcgttatcagtaccaactaaaatatcaggaggaatcgaaatgaactcaatcggaatcgacgtatcgaaaggcaaaagcatggtagcaatattgcgcccattaggagaagtagtacaaaaatccgttgaagtaatccacagcacaatcgaacttgaaaggttagcctatcaaatcatcggactcggagaaaatacacgcgtcataatggaagccacaggacggtatcacgaaccggtcgcggctgctctgcatgaaatgggcatatatgtcagtatacttaaccccatactcatcaagcagagtggcggcggcagtgtccgtaaggtcaagagcgacaggaaagatgcgcttaaaatcgccaaatacggacttgataactggaaagatttgcgtgaatatactcctgttgatgctgtcaggcagcaacttaaattattcagccgccaatataatctgtacatgaaaacatcattggcactgcaaaataatctaatctctctgcttgacaagacctttcccggtgcaaacgaactctttgacagcccgacccgcgctgacgggcatcaaaaatgggtagattttgtcacgcttttctggcactgcgattgcattacccgcagtagtcagcaaaccttcactgagcgttatcagaaatggtgcaaacgcaaggggtatcatttctctaatacgaaagcagaagatgcctacatcgccagtgccggacatttccctacgcttccgaaaaacgcgaatactaaactgctcatcacatccgccgccaacgcgctcaccgaagctcaaaaggttctcatgtctatcaaggctgaagtcctgcgcttggcgaaactgatgcctgaatacaacgctgtgattgccatgtacggtgtaggtgacattacggcagcgcagctcatggctgaactcggcgatgtcagacgctttgaaaatcgtggtgcgattgttgcttttgctggcattgaccctgaagtcaaccagtccggtaaaatcaaatccgagagcaaccctgccactaagcgcggctctcctcatctgcgtaagacgctgtatcagattgccacaacacatttaaggcgttcgcctgctgatgaacctgtatatcaatttttagacaagaaacgtaaagagggtaagccttattttgtttacatgactgctgccgctaataaatttttgcgtatttaccacgcaaaagtcaaagaatacctcaataatttagacgtgcaatcttaatttatctatcatttattttataggcgggatttttttaaaatctacttttccgccttgatttgctttgccgttttttcttttgtgaaccatctgtaaatcgtttttaaatgttttcaaaatcgcttgacttttgtttgcagga

SEQ ID NO: 7043 - DNA, 1362 bp, unidentified
  source 1..1362: mol_type = unassigned DNA; note = element_aec6085
  misc_feature 1..2: note = core
  misc_feature 3..75: note = LE
  misc_feature 76..1101: note = CDS
  misc_feature 1102..1362: note = RE
  misc_feature 1077..1349: note = bridgeRNA
tgatggggtggacgccccccgacggcattgatgtgccagagtggtggtgttgtgaaccacccgagggaggcgtccgtgacagaggttagcaccatcggcctggatctggccaagaacgtctttcaggcgcacggcgcgaatgctgccggtgcgccgatcttccgcaagaagctgcggcgggagcaggtgctggccttcttcgctgctcaaccaccctgcctcgtggcgatggaggcctgccctggcgcgcatcattggggccgcgagatcggcaagctcggtcacacggtcaagctgatcgcgcctgcctacgtgaagcccttcgtcaagcgccagaagaacgacgcggccgatgccgaggcgatctgcgaggccgcgcagcgtccgaccatgcgcttcgttgccgtgaagagcgaagccaagcaggcacccgcggtgatcttccggacccgcgacgtgctggtcggccagcgcacccagctcatcaacgccatccgcggccatcttgccgagtacggcctgatcgcgccgcaggggcccgcccacatcgagcggttgatcgcgcagatcgaggatcccgcttcggacattcctccggccgcccgcgcaagccttgccgtgctcgtctgtgcgttccgccacctgcaggaacagaccgcagccctcgatgccgagatcgccacacgcgcgaaggccgacgatacggctcggcggctgatgagcgtgccgggcatcggcccgctgatcgccaccgccatcgaggctctggccccgcccgtagagacgttccgttcgggtcgcgacttcgccgcctgggtcgggctgactccagtacaacgctcgaccggcggcaaggagcgcctcggccgcacctcgcgcatgggcgagcggacgctgcgacgcctgctcatcatcgcggccagcgcggtggtgcgctgggctaagcgcaagggcgtcccggccgactcatggctcggccaaatactcgcgcgcaagccgccgatgctggtcatcgtggctgtggcgaacaagaacgcgcgcatcgcgtgggcccttctgagaaagggtgggatctaccgagctccggccgtcaccgcgtaggcgggacggacgcgaggctgtcggagggcgtgaggaggtcgacggacaggtatggcgcaacgtcggtgagacggagttgggagaatcaggcgcatggggagcgcttcgagcgcgctgtagtgatgtggtcccgactctcgcactcccatacgggcccgcggcatgtgacccgccgcattagaggccggacacatggcagcacccgatcaagcaccgcgcccgtccagagattttgcttgcacccgagggggcgtccacaca

SEQ ID NO: 7044 - DNA, 1448 bp, unidentified
  source 1..1448: mol_type = unassigned DNA; note = element_aecbaa8
  misc_feature 1..2: note = core
  misc_feature 3..238: note = LE
  misc_feature 239..1333: note = CDS
  misc_feature 1334..1448: note = RE
  misc_feature 6..214: note = bridgeRNA
ctcgtattatagtgtcatagccatttcataggatttaggctatgctgtttaggatactgtggattggttgcccctccctaccacttgatggttttttgaaggctccaaccacagtctctttgttaacttgttgatcagttagataccgcacgacggtttatgtagaacgaggttacaactgcaaagagccctgtggatccaaacagtatcaaaacctattattgaaaggagtgacgctatgatccttgttggaatcgatgtctctaaagataagcatgactgcttcatctcaacctctgacggtgaagttctgttcgatgtcttcaccatcgctaacacaatggatggtttttcagatctttatgaaaaaatctcatctgtagctgacgatttttccaaagtaaaagtaggtctcgaagcgaccggccactatagctacaacatcctgggattcgttcttaataaaggtctgaccacctatgttattaatccgttacatactaatcttttcagaaaaggtcaaagccttagaaagacgaaaacggatagaatactcaagtcattgacccgttatcgcttcataaaagtccaggagcgagcaaagtacaagacttccgttgctcgcctcgtaaacatcctttttccggagcttgaggatgttgtctcctcgctccatatgaagtctgtatatactctcctgtctgagttccccggtgcctcacatattgcctcagcccatctgacacatttaacccacttactgtatgttgagtctaaaggtcactatggaagagacaaggctattgagatccgtgaagcagcgagatcatccatcgggtcagttatgcctgcgaagtcgctggaactcagccacaccatcaacctcataaacatcttaagcaacgagatcgatgagatcgaagcagagatcaaatgcatcatgaatgagattgattctccgattttaagcattcccggcataagttaccgcatgggagctatgatcattgctgagattggagactttgaccgtttttcgtctccggaccagattctggcatacgcaggcatgtcaccatcgacctaccagtctgggcaactgacatcttcccatgcccacatggagaaacgcggctccaaatatcttcgctatgcgttgttcaatgcaacgatatatgtttgcaattgggacccaactttctcagcctatcttgctaaaaagcgagccgaaggcaagcattactatgtcgctattactcatgcagcaaaaaagcttgttcgcctgatctatgctctggaaagcagtggcgagcagtacagaatagctgcgtgatccttacaatatgctctgcttggcgtctttgacgccttttttgtcatgcagttttcaaggttctgatatatctaaatggatttctccaaattaggcttgatttttaatagttagt

SEQ ID NO: 7045 - DNA, 1352 bp, unidentified
  source 1..1352: mol_type = unassigned DNA; note = element_aecd6c8
  misc_feature 1..2: note = core
  misc_feature 3..73: note = LE
  misc_feature 74..1099: note = CDS
  misc_feature 1100..1352: note = RE
  misc_feature 1119..1348: note = bridgeRNA
ttaatgagatggtcagcccgatccccacgaagcggtacgctgagtggggattgttctttctgggagacctctcatgagcaccgtcacgttgattggcattgatctgggcaagcatagcttccatctgcacggacaggacgcgaccggcaggatggtgtttcgtaagaagtgctcgcgccagcagctgtttgcattgttgagcaacacgccgcgcagcacggtggtgatggaggcctgtgcgggcgctcactggatggcgcgccgcattcaggcgcagggccaccaggccaagctcatctcgccccagttcgtgcgtccgttcgtgcagggcaacaagaatgacttcgccgatgcgcaggcgatttgcgaagccgcgtcgcgcccgagcatgcggttcgtgagcgcccgcaacgaagcccaacagaccgtctcggcgctgcatcgggtacgagagtcgctggtgcgcgaacgcaccggcgtgatcaaccaggtccacgcttttttgctggagttcggcatcagcctgccgcgaggccaagccatcatccgacgcctgccggcagtgctggccgagcatgagctgccgccccggctggtggcgctgcttgagcgccagcaagaacatttcaagtacctggacgagcagatcggccagatcgaacgcgagctgtgccagcaactgcgcgaggacgagcgcagccagcggctgctggagatccctggcatcgggccgatcacggccagcgtgctgatgaccgaattgggcgacgcgcagcagttcggttcggcacgccagttcgccgcctcggtaggcttggtgccacggcagtacagcacgggcggcaaacccacgctattgggcatcagcaagcgcggcgacaagaatctcaggcggctgctggtgcagggcgcacgcgcgatcatgcagcgcattgaccggcgcgcggatcggctgggcatttgggtgcgcgagctgctggcacggcgccactcgaacgtggtggcctgcgcgctggccaataaattggcgagaatagcctgggccatcctcgccaacggaacgaactaccgaagtgagcaggctggtagcgcagcctgatcttcatcaccgttttacgcagtcacttcctggttttgcggcgcgagtacgtgaagacataaacggctcaacggcctggcaagaaacctgacacaaaaatcagcacctggatgctgaggccttttttaggtttgccgggcgcgactctcatcatggagcggggacctgtccccaaacaactccgaatagatttgagcaaagcccaatttacgccaacacgaacttgcttgcaaaaatcgggctgaccatagat

SEQ ID NO: 7046 - DNA, 1330 bp, unidentified
  source 1..1330: mol_type = unassigned DNA; note = element_aed56ea
  misc_feature 1: note = core
  misc_feature 2..213: note = LE
  misc_feature 214..1185: note = CDS
  misc_feature 1186..1330: note = RE
  misc_feature 35..204: note = bridgeRNA
tcttaagtttgatttcagttaattttattagataaaccagaaagaacaaaagagaggattaaggtcaatatagccagaggaactttagattccgtcaacattgatgatcacctctcttttccacttttagttcgttcagttctgtgagacctttggatctcgtttttaagttgttgaagcctaggtggatcgttctttcccaattaaatatctatggataaatatagtaaaatccacggtgtggatatcagtaaggatttctttgatgtaattgacgatctgggcaaccactaccagtttgacaacagcctgaatggtttcaggaagtacctcaagacattggacgctgagagccttgttgtcatggaggcgacgggctattaccactatctgctggctcagttcctgcacgactctgacatcgccgtctcggtagtcaatccattgtcggtaaagcgttttctgcagatgaagcttaccaaggtaaagaccgacaagagcgatgcaatgggcatcagggactatgcaatggtcaatgaggttccgctctacgatggcaagggagccgtacaggcggaatgtctacaattgctggccctgatggacatctacctcaaacagcgcactcaggtcaaaaacaagatccacggagagaaggtactgggcacgccttcaaaagcggtgtttggttccttaaaaagaaccttgaagatgctggacagggaactggtctcgctcaacgagcgcctattgtcgctggtcaagcaggatcaacaggtacagcttaccaatcttaagagcatacctggtctgggcgataggacatctgcgctgttgatcgtactcacagagggctttaccaagtttgacaacgcctcacagctgcgtaactatgccggcatcacacccacgataaggcggtctggcagcagcataaggggtaggagcagaataagcaaggtgggcaaccgaaagcttcgtaaccacttgtttttgtgcgctttctctgcaagtagacacaacaaggcatgtagggagctctacgaacgtatcacggccaagggcaagagcaagaagttggcacttatcgccgtatccaacaaactattgaaacaggcatttgccattgcaaaatccggcctgccctatgacgatggctacgtttcccgtctggtcaaggagtagaaatgaagttaaaaaatactggtggtgttgatggcttgttggactggaggcaaacctgatagggtttgtcccatttcaacaatgccacgtagccggatcgtgcctaaaattaacgagtaatttgcttggttttaaactcagttct

SEQ ID NO: 7047 - DNA, 1184 bp, unidentified
  source 1..1184: mol_type = unassigned DNA; note = element_aed960d
  misc_feature 1..2: note = core
  misc_feature 3..203: note = LE
  misc_feature 204..1169: note = CDS
  misc_feature 1170..1184: note = RE
  misc_feature 6..208: note = bridgeRNA
cttgtatgtttagccacgatcagcgcggtagagtttgattgccgatgaggtggccagactggcccgtgcagtttgtcgccgcgctggggtgttcgagcccgtgagtgagaaaagaacgcacggatgccgcgctggtcttcatcaagcccgaacggttacacgcgccgccgagcgcgcatgcacaagcaggggattcgaagatcatgtctgcaacctcagtggtagtagtaggcatcgacgtcgccaaggcgcacgtcgattgcgcagcgttgggtgcccaactggctccacgccagtttgtcaacgacatcgacggccactcggcgctcgccgcagcgctgcagccgctcggcgtcgtattggtcgtgatggaggccaccggcggctatgagagcgccctggcgtgtgcgctgcaagcggctggctacgcagtcgcggtggttaaccccaagcaggcacgcgacttcgccaaaagcatcggccgactggccaaaactgatcgcattgacgccgaagcgctggccgagttcgcggccacgctgctgcgccgcggcgatctggagcgcttcatccgaccgctgcccgatgtccagcaacgcgaactcgcggccttggttacgcgacgacgacagttgctcacgatgctgggcgccgagcggctgcgcctgcagctcgccaccgccaaagtacgtctcagcatcgaggccttgatcgaggccatccaggcacagcttgacgatctcgaagcacagatgcgctcgcatgtccgcgaacactttgccgcattggacgatctgttgcgctcggcgcgcggcatcggtcccattgccagtgccacgctcattgccactttgcccgagcttggccgcctcaatcggcggcagatcagcgcgctcgtcggcgtggcacccatggctaatgattcgggcacggtacgcggccgtcgacgcgtggtaggcggtcgctttgaagtacgccgcgtgctctatatggccaccctctccgccatcacccacaacccaaccataaaaacgttctaccaacgcctgatcgcggccggcaagatacccaaagtcgccttggtagcttgcatgcgcaagctgctcatcatgctcaacgcaatgatcagaaccaacacgcagtgggcgaaggcgccccatcacgcttgactttcgagacggtta

SEQ ID NO: 7048 - DNA, 1098 bp, unidentified
  source 1..1098: mol_type = unassigned DNA; note = element_aeda0c5
  misc_feature 1..2: note = core
  misc_feature 3..165: note = LE
  misc_feature 166..1089: note = CDS
  misc_feature 1090..1098: note = RE
  misc_feature 1..164: note = bridgeRNA
cctgtgtgttcgggatgtgcgatggtgtgaacgggcgggagatcgttgggctcctggtcgttgcagaccgtaagcgggcctgatccccgcccgtcgcttcacacccaacctgaacagttgatcgaggccgcagcaacggacctcgcagcacaggagtaggcaatcatgatcatacatcctggctttgtcggaatcgacgtttccaagcagtatctcgatatctttgaagacggtcgcaccgagcggctccccaacacgacgcagagtattgcggaccatgcggtccgttggcgcggtcgttttgtgctgttcgaggcgaccggacgctacgacagacacctgcgtcaggcgctggaggctgcggacatcgcgttcgcgcgggtcaatccggcgcgtgcccgcgacttcgcccgcgccaccgggcggctcgccaaaaccgaccgcatcgatgcgcggatgcttgcggcgatggcgcagagcttgggccttgcgcgcaagggcgcgagcgacccggaacgcgaagcgctcgcgcgcgcccacaagcggcgggatcagctcgtacacatgcgccagcaggagcgcacccggcttacggagtgcgacgaacccgccctgcgcgccgacctcgtcgctcacacgcaatggctcgacgtccagatcgcccgctgggatgccgagatcgaacgcttgctggcccagtcggcatccttggcgcaagacgctcgcaggctgcgctcgatcgccggcatcggcccggtcgcgtccacgaccctgttggccctggtgcccgaactcggatcgctgtcgcccaaaaagatcgccgcgctcgcaggcctcgctcccttcaacgccgacagcggccagttccgaggcctgcgccggatcaggggcggccgcaaacgggtccgcgacgcgctctacatggcggcggtgtccgccgctcgctataatctacgcctcaagccgctctacaggcggctgcgcagcgccggcaaacccgcaaaggtcgccctcatcgccgttgcaagaaagctactcatcatcgccaacgcactcatgcgcgacaaaaccaccttcaaaccagcctgaacacagttg

SEQ ID NO: 7049 - DNA, 1364 bp, unidentified
  source 1..1364: mol_type = unassigned DNA; note = element_aedb6d6
  misc_feature 1..2: note = core
  misc_feature 3..75: note = LE
  misc_feature 76..984: note = CDS
  misc_feature 985..1364: note = RE
  misc_feature 1083..1352: note = bridgeRNA
tgatggggtggacgccccccgacggcatcgatgtgccaaagtggaggtgttgaacaccacttcagggaggcgtccgtgtcggaagttaccacaatcggtctggatatcgccaagcaagtttttcacgcgcacggagctgatgctgctggtcgagcggtgttcagtcgccggctcacgcgaggcaagctgctcgacttcttcgcggcccacccgcggtgcctggtggcgctgcaggcgtgtggtggcgcgcatcactgggcgcgcgagcttcaggcgataggtcatgaggtccggctgattccgccggcttacgtgaagccctatgtaaagcggcacaagaacgatgcggtcgatgcggaagcgatctgcgaagcggcacagcgaccgagcatgcggttcgtggcggtcaagaccgagcagcagcaggcggccgcgctggtgttccgcacgcgagaccttgccgtgaagcagcgcacccagctcggcaatgcgatccgcgggcacctggccgagtatggctgggttgcgccgaagggatcggcccacctcgcgatgctggcggacctgcttgatggcggggagatcggcgagacactgcctgaggccgcgcggccgatgttcgcgatgatggtagatatgctggctgggctcgacgagcggatcgcggcgctggacaaggagatcgcgcgtcgcgcccgtgaggacgaggtggcgcgccggctgatgacgatccccggcattggtccaattaccgcgaccgccatcgcggcgatcgcgcctccggccgaaacgtttgccaaggggcgcgacttcgctgcctggctggagtttggtaccgaagcaggcgtcgaccggcggcaagcagaagctcggcgcgatctccaaaatgggggagcgaacgctgcggcggctgctcatcatcggcagcagcgcggtcgtgctccaggcgagcaagcggggcgcgccggcgggctcatggcttgaaggcatgctcgccagaaagccgcgcatctggtcatggtcgcgctcgccaacaagatggcgcgcaccgtctgggcattgctggtgaggcaagaggattacagagctccggtcgtagtcacggcgtaagccgaggcaggccagaggcgtcggagggcgcagtcggtcgaaggagggtatggcacaacagtcggcgagacggggcggaagaaccagatagacccatcgtgtccaagaacacgcgattgtgaaatggttccggtccgcgaactcccatacgggccagcagcttcatcgctgcattacaggccggacagatggcagcatccgactctgtgtcagaacttccaaataccgcttgcaaccgaaggggcgtccacaga

SEQ ID NO: 7050 - DNA, 1166 bp, unidentified
  source 1..1166: mol_type = unassigned DNA; note = element_aeddc59
  misc_feature 1..2: note = core
  misc_feature 3..158: note = LE
  misc_feature 159..1160: note = CDS
  misc_feature 1161..1166: note = RE
  misc_feature 3..192: note = bridgeRNA
cttgtattagcgcgaatcggtattgtgcgggcgttccgagaggaatgacctgctccgggcgcgcacccggagcaggtcgccggtcgtcggatcgcacgctcccgagccacaagggctgctgctgagcaggatcgcgatcggctcttcatcggacccggatggttgaaggaaccaagggttcgcatcacaaggaagggtcgaagaagatgagcaagaatagcaccgtgtgcgccgggatcgataccggcaagtacaagctggacgtggcgatcgacgaaagcgcggatcagctgcaagtcgacaatagccccgcgggctatcggtgcttgtcggcctggttgcggcagcgcgaggtcgagcgcattgggatcgaagcaagtgggggttatgagcaggcggtggtttcgttcctgcgggcggacggctttgttgtcattgtcttccaaccggtgcaggtgcgcgcctacgccaagttcgtgctgcaacatgccaagaacgacaacatcgatgcggtcctgatcgcccgctgcacggccgcagccacggacatccacgaaccgccggatgcgcgtttggcgccgctggcccagcgtttgacgatgatcgagcaactcaccgaggatgtcgcccaactcaagacccgccgagaggcctgccgcgacacgcgtatccgcgcattctggaagcaggagatcgataggctcaagagactgttgcaaggcgaactcaagcaactggtcgccgccattcgcgagcatcgcgatctcgccgaccggctcgatctgatcgccagcgtggacggcgtcggcccgcgcacagccgtcgccattctggtgcgcatgcccgagatcggccgcgtcagccgcgaacaggccgccgccatcgccggccttgctccctatgacgatgacagcagccaacgacgaggtttgcgacatatcaaagggggacgccaacgattgcggcagagcctttacgcggcggcattgccggcggtcttctattggaatgcccaactgaaagctttgtacaaacgactgatcgcagctggaaaaactcacaagctcgtcctcgtcgcctgcgcccgcaagctcctaatcttcgtcaatacggtcgtcgcccgcggcaccccttggacgtctgccccagcaaccacataatggttg

SEQ ID NO: 7051 - DNA, 1594 bp, unidentified
  source 1..1594: mol_type = unassigned DNA; note = element_aedfdb7
  misc_feature 1..2: note = core
  misc_feature 3..277: note = LE
  misc_feature 278..1471: note = CDS
  misc_feature 1472..1594: note = RE
  misc_feature 10..254: note = bridgeRNA
gtataatatatttaggttaataaaggcaacctataatcctttttaactgataaattatacataaaagtgtataattaagttattagatagagtattgtcgttctctccttgagattcagagctcgtacttgaaagactgacacctctgtctgataaactgattacgaataagttggatgttgactaacttgattagtacttcgaatatggaacaaggcagtaacgtttatcagtttagaggaactatctaaaatacattgtttatgggtgattaaaaatgttttatttaggtattgatatcgggaaaaacaatcatgtagcttctttaattgatgaaaaatgtaacaccatttttaaggctttttctttcccaaactcttacgtcggtggtaatagcttacttgataagcttgcttcctttaacatctctgttaatgatgttgaaattggtatggaagctactggtcattactggttatctatttattcttttcttgttgaaaaaggttttgttattcatgttattaatcctattcaaactgatggttggcgtaaaggaactgaaatcagaaagcgcaaaaccgacatcatcgattctatactaattgcagatcttattcgctacggtgatttcttagaaacttctttagccaacgaagatactatctctcttcgcaatctttctcgttttagaaattacctcatcaattctataggtgaccttaagcgtaagaccgtttgtgttttagatcaagttttccccgaatatcaatctatcttttctaatatctttggacaaacgtctaaggaaatcttactccactttaatacgccggatgattttgaaaatatttcttctgaacaattgcagcaggttttgtctgaaattactatgaaaaaatttgctatggataaaatcaatgaaatttcttctgctgctaaaaaatcttttggtattaagttttgtttggatagtttttctctgcaattaagattattaattgagcaaattaattttatcgaaaaacaggtcacagatgttgaagagcagatatcagctttacttgataaaatcaattctcctattactacaatacctggcattgacaacgtaacagctgcaacaattttaggagaaataggagatatttcaaggtttaaaaatccatcaaagcttgtagcttatgccggtattgatgcttctatatcacaatcaggagaatataacagtacaaataacaaaatgagtaagcgaggttctccttatcttaggaaagctctttttagtgctgcattagttgcctctaattgtgatcctgtttttaaggctttttaccaaaagaaacgttcagaaggcaaacatcaccttacagctattggagctgtagcacgcaagctttgctatactatttgtgctattttaaaaaacaactgtgcttttgaagtaaaacttcctaaaaatgattgttagtaaatcatactaattacatatatttacttttaacttggtattaccaggtttatttgtcatgcatttttattcaccctcttggcaaaatttttttgttttttctctattgactttttatagttg

SEQ ID NO: 7052 - DNA, 1345 bp, unidentified
  source 1..1345: mol_type = unassigned DNA; note = element_aee3633
  misc_feature 1: note = core
  misc_feature 2..63: note = LE
  misc_feature 64..1089: note = CDS
  misc_feature 1090..1345: note = RE
  misc_feature 1111..1333: note = bridgeRNA
tgatgctgtggacggctctccagccccgcgggagcataagctctcgcagagatggaggagagcatggatcaggcagtcacgatcgggttggacattgcgaagtcggtctttcaggttcacggtgtcgaccggagcggcacagtcgtggtccggcggcaggttcggcgagcgcaactccttccgttcttcgccaagctgccggcttgcctgatcgggatcgaggcgtgtgccacggcgcatcattgggcgcgcgagctgatcaagctcggccaccaggtccggctgatgccgccgagctatgtgaagccgtatgtcaagcggcagaagaatgatgcggccgatgcggaagcgatctgcgaagccgtgacccgcccgaccatgcgcttcgtcgaggtgaagagcgtcgatcagcagggcatcctggtgctgcatcgtgttcggctcatgctcatgcgccagcgcgtccagctgtcgaacgcgatccgaggccacatggcggagtttgggctggcggcgccgatcgggagggaaggtctgggggctctcatcaggctcatcgccgacaaagacgagcgtgtgcccgccgaggcgcagatgtgtcttggaaggctggctgctcaactcgcgctgatcaacgatcagatcttggaaacggatcgccggatcagaactaacgcccgcgcgaccgagatcggccgcaggctgatgggtgtgccgggcgtcggtcctctcctggcgagcgctctcgtagccaccataccggatcccaaagcgtttcggtcaggccgaaactgggcggcatggatcggcctcgtgcctcggcagaactcaagcggcgggaaggagcgcctgggcggcatcaccaaacagggcgaccgttacctgcgccagttgctggttgtcggggctctggctgtcgtgcgctacgcgcagcggaacggaacgcggcggccatggctggtccaactgttggcccggcgaacgacaaagatcgcgaccgtcgccttggccaacaaaacggcccggatggtctgggcgatcatgaccaccggtgaggcctatcgcgagccggtctcgcgggccgcatagagatcaggcgaaccgcaccgacgagcttgggaagggcgaaacgaacgtaacgcagccagccggtcgaaccgaagaacgggaaaacccacacgcgccacagcgccttcaagcgcgcggttttggtcgggacccgtcctcgcggaaggcattatggccagcggccatgcgcgccgcaccaacaggtcgaacacatggccgcaccgaccagccctgcagaacgctcgaaagcccttgccaacggagagccgtccacaca

SEQ ID NO: 7053 - DNA, 1077 bp, unidentified
  source 1..1077: mol_type = unassigned DNA; note = element_aee46d4
  misc_feature 1..2: note = core
  misc_feature 3..222: note = LE
  misc_feature 223..1062: note = CDS
  misc_feature 1063..1077: note = RE
  misc_feature 6..201: note = bridgeRNA
cttatatctcgatcattgtactcagggtattatgctccccgactgatcatcgggaagtcgtgggtgagatggaaccctccctcgggcttcgagcctgtccaatagattcatcccccacgacttatctcccgccttcaagactggacggtatcctgtgcctggagcacgtatctataaggaaggtcatggcggtttcctgattcacccagaaggagatagcacgtgcaaattctcacccctgtcggcattgatgttgcttcccagaaatttgacgttgaagtctggaaaggtaaagcagcctacaaatccaaagccttttctaacacgcctaagggtttcgatgcgctgaaaaaatggcttgagccgttcggtgactgccatatatgcatggaagcaacaggtgcttacagtgagccattgtctactttcctggctgatgcaggttacgctgtaagcgtggaaaatccagcacgtataaaatcattcggctgcagtgaactgagtcgtaacaagacagataaaggcgatgcacgcatgatcgcacgttattgtaagctgcatgttcctgtgttgtggcaaccgttgccgctgaatgaaagaaagctgaaagcgttggtcaaccggctaataaatctgaagaatataggcaacaatccaagtcttaagcaaaacagggaactgttggaatcgatccctgggatagctggcgtgttgagtagcacgatattgggttattttggtgatatgtcacggttcgatagcagcaaagctatcgtggcttgggctggtctgaatccgatgttgcaggagtctgggctgtggaaaggtaaaagtcggatatcaaaggtgggcaacgccatgatacgtaaagccctgtatatgccggccctgacggcaatgcgctataacccagcaataatagcgctgaaagagcgtatgaatgcacgtaataaatcagggaaagttgtcgtgtgtgcggcaatgaagaaactattgcaacaagcttacggagtgctgaaatcaggacaggtgttcgatgctggaatatgtcttgcaagataactggcaagacggtat

SEQ ID NO: 7054 - DNA, 1202 bp, unidentified
  source 1..1202: mol_type = unassigned DNA; note = element_aee5134
  misc_feature 1..2: note = core
  misc_feature 3..215: note = LE
  misc_feature 216..1199: note = CDS
  misc_feature 1200..1202: note = RE
  misc_feature 33..196: note = bridgeRNA
tcctttagacttgcatgtattattttcaatagaaaaagagaggataggttcaggtacactataataagttcttgatcgatcaatcaatatgctgatacagacctgagcctatctaatcatcaaattttcaaatagaaattagggatacgagcccattattaaggaattgaattattgatgatctcctctcttcattattaatcaaaaataaaggtatgacagatttaattatcggtatagatatcagtgcccagacattggatatctgtatcagagagcaacgatgtgatcagttcttcgtgatcaagaataaggtgggtgccatcaagaagttccttgtaccattggtgagtaaggacaggaacatactgctgggtatggagaacactggaaggtacaattacaatctctatgaggtcctgcggacgctggagctaaagacctttgtgatatatcccttccatttaaagaaaagcctgggacttgtcagaggaaagaatgataaggtcgatgcagagcgcatcgccaattttgtcgagaagaatcataaggaactcgatccgtggaaaccgtgcagtgaaacgatcatggagatgaagtacgtgatgactgaaagaagatcgaagataaagacacgcgccaggctgctccagcagcaaagagacctgaaactgatcaaggatccaaggctcaagcgcagacttgtcaatatgttcaacaagagcctaaagctggtaagccaacagataaaggatcttgaagccatcttggaagagttgatagacatggatcaaaccataagggaacagatagaactggtacgcagtgtgccaggtgtgggaacggtgctctcgacggctatcgtcatcaagaccgaaggcttcaacacctacaccgatcccaggaaacttgcctgcagtgctggcgtggttcccttcaactatcaatcgggaatatcactcaaatctagaaatagggtgtcccacatggcagataagtccatgaagaccttgttgcacatggccgccatgagagccgtgagactcgaatgtgacctcaagtactattaccagagaaaaattgcagaaggaaaaaataagatgagtgtattaaatgccgtcaggaacaaaatcattcacatcatctacgcactgatcaaaaaccaaactatttataaaaatagcttgtcattgtcatagaaa

SEQ ID NO: 7055 - DNA, 1216 bp, unidentified
  source 1..1216: mol_type = unassigned DNA; note = element_aeebf04
  misc_feature 1..2: note = core
  misc_feature 3..382: note = LE
  misc_feature 383..1201: note = CDS
  misc_feature 1202..1216: note = RE
  misc_feature 12..196: note = bridgeRNA
cttgtatcttggcgcttgtggtggttagctatcgccacacgaggggcggacgagcttcggtcctccctgacggcgttgaccctgttccgtagataaagccgccgctcctcacctctgcagccatctggacactggacggtagcctagggcgatatcgaccctgcatgcacaaggtaagtgggctcagttggcatcgccacgggatgggaagcctatgttttatttgggaattgatgttgccaagctgaagttggactgcatgctgttattggatttggagcgtgacaagcgctaatccaaagtcgttccaaacaccgccgacggggtaaagacgttgattcagtggtgcgccaagcaaggcgcgcaggcgcagcggatccatgtgattctggaggctactgggccgtatcacgagcaagcggctacgtggttgtttgattcgggcatgatggtatcagtggtcaatccggccaacgtgcataacttcggcaaggccttggcggtgcgctcgaagaccgatgcgctcgatagtttggtgctggcccgttatggcgccgcagtcaaacccggtaaatggcaggctgcacctatgcacgtgcgcgagctgcgtgccttgttgggccgtcttgaagcgctgacgaaggatcgcgcgcgcgaactaaatcggcaggagaagcttcaggctggcgcggcgcctacgctggtggaaagctcaatcgagaagagcctggagttctacgctgctgagatcgaacggctggagaaggcgatccaggatcatatcgaccgtcatcctgatctaaaggaagacagtaagttgttggagagcattccaggggtagggataaaagtcagccgcacgatgctggcggtgatgcatagccatcagttcaagagcgcggagtcactagctgcttacctggggctggtgccggtacaacgccagtcgggcagctccttgcatggccgtagtcgcctatcaaaagccggtaatgccggcgtcagggcaatgctgtacatggccggtgtcgtggcagcccaacacaatccgcatatcaaggcgctttatcagcgtctgctagcggcgggcaaagccaagatgtcggccataggcgcctgcatgcgtaagctggttcatctttgctttggcgtaattaaaacccgcgaaccttaccgcttcgactttcctgtcactgcttgacagtcgagacggtat

SEQ ID NO: 7056 - DNA, 1378 bp, unidentified
  source 1..1378: mol_type = unassigned DNA; note = element_aeecc8f
  misc_feature 1: note = core
  misc_feature 2..280: note = LE
  misc_feature 281..1363: note = CDS
  misc_feature 1364..1378: note = RE
  misc_feature 1..290: note = bridgeRNA
cagtcaatggattaaggccagttcccgggtggcctgactcgaacaccgatcgaccctccggttaagctggcgccgtgaggcgcccggtgcggcctgacccgcactccgatcgaccgacgtgtctttccccggacctgtcggccgcccgggaacgccttgcggtgagggttcacctcgccgttgcctgtgacccgagaagggcctgaccattgggtcaagtgactgtcctgtccatgcaactggtctggtgaagccgttcggtcgaacctggagggcaagcatggacgggaaggaagaagcagacgcccgcattgtcatcggaggcgtcgacacccacaaggatttgcacgtcgcagccgtcgtcgacgttcatgatcgcgtgctggggacgcgctcgttcgcgaccacccggcagggctatcggcagatgttggcatggatgcgctcgtttgggagtgtccagcgtgtcggagttgaatcgaccggcagctacggcgccggccttctgcgcttcctgcaacaggcgggggtgaccgtcctggaggtgacgacacccgatcggcaggatcgccgaaagcgaggcaaaagcgacgacctcgacgcacagagcgccgctcatgccgccttcgctggccagcgcaccgtcacaccgcgaagccgcgatgggatgatcgaggcgttgcgcgtgttggtggcctgccgcaagacggcggtgacggcgcggcgcatcgccctgcagatgatccacaacacaatcgtggccgcgcctgacggactgcgggaccaattgcgaaccttgacccgaatgcagctggttcgcatgctggcagcgtggaggcccgacctcactgcctaccgagaagtcgaggcggcctacaggatcagcttgaaatccctcgcccggcgttacctcgaattgcacgacgaaatagccgatctcgatgcgatgattgccgcgatcgtcgaggagctggcacccaacctgatcgagcgcaactcgatcggccatgtcggggccgcacaactgttgttgactgcgggtggcaatcccgaacgcatgcgtaccgaagccagcttcgctgccctgtgtggcgtcagccccgtccccgcttcgtccggcaaaacgatccggcatcgcctgaaccgtggcggcgatcgcagcgccaacagcgctctccacatcatcgccatcggcaggttacgcaccgatcagagaaccaaggacttcgttgctcgccgcatcgccggcggccattccaagctcgacgcaatccgctccctgaagcgctacctggcgcgagaagtctttaccctgatcatgcagcgccagaggcagataaacgccacccgaatcgccgcttgacaaacagaagggcgt

SEQ ID NO: 7057 - DNA, 1578 bp, unidentified
  source 1..1578: mol_type = unassigned DNA; note = element_aeee139
  misc_feature 1: note = core
  misc_feature 2..246: note = LE
  misc_feature 247..1443: note = CDS
  misc_feature 1444..1578: note = RE
  misc_feature 6..220: note = bridgeRNA
tcgtattataaggtcaatcagatatttctggttggcctattttttataggttattctttaggtagccggggtaggacgttcgcgcccttggaactttgattccgtccattatactgtccaccccctacttgtagaaacatgtttgaggctggttgggacgttgatcccgcataacaagcgaagctatgaaactacaagatagacaggggctgccggcaaatacagtaaaaggagatgtgataaagcatggatccagtcattggcctggatgttgcaaaaggagaaagccaagtccaagctttcctggcaagaaagcaaccttttggaaaaacctttaaatttaagcatgataccaatggtttacgtgattttcatgtattttaccaggaggtcaaattaaacgctgaaacagatcctgtagtcatttttgaatctactggacactatcatgaacctgtacttcagtatcttgaggaaaggaggataacctactatttagtgaatccagtggtttcttacgaaactaaaaagagtagtcttcgaaaggttaagtcagacccagctgatgctcgacatttatgcgaactttactacaaagaagatctagaaacattccaccgaaaaaatgttcaaaccatgaacttacgtaatttatctagacaacatgattcattaacccgaaattacgtacagttaaagctgcagtttcaaacgattctagatcaagtttttcctgaatataaaggcgtttttgggaatttgtattcacaggtatctttaaaaattttgcttttatattctacttccgactgcattttaaaagccccaacagatgaaatagcaagtatgatgcatagtctaggaggaaaacgttcatatgcatggttttgggaaaaagcgaataagcttaaagaggcagcagaacgaaacccgtttaagaaaaccctatataaaagccacttagtgaccttaaagatgtacatccaaatgcttcttcaacaaaaagagtttctatccatcctagagcaagagatagatgcattggccacggagtttgaagagtataagattctccgttctataccaggagtaggatgtaagattgcggctacactcatctccgaaatcggggaaatcacgctatttagtcatcctaaaaagctagtggcctatgcaggaattgatccaaggatttttcaatcaggtaaatttacagctaccataaaccgtatcacgaagagaggctctaccaagctacgacaatctttatatacagccgttcagtgtggattaacgaacaatcgaaacaccaggcttagagagttttacgacaaaaaaagaagtgagggaaaacctcacaaagtagccataatagcctgcgccaacaagctattacattggatttatgcaattcttaaacataaagagccttttaaagtgtaatgaatgttaatttattacactaattacaaaaacttcaaattagggctttgaagtttatttgtcatgcctaaattcattataccatgattaattttaatattttaaatgaaaaatgttgacttatattagctggta

SEQ ID NO: 7058 - DNA, 1497 bp, unidentified
  source 1..1497: mol_type = unassigned DNA; note = element_aef1e2e
  misc_feature 1..2: note = core
  misc_feature 3..250: note = LE
  misc_feature 251..1477: note = CDS
  misc_feature 1478..1497: note = RE
  misc_feature 13..246: note = bridgeRNA
ctaatgagttctgggagtgagccgtccggcaaactcctggtgggtaggtagccgccagctggtgagcactcgttgcgcctggacgtcgagtcctgttgaaagatcgtgccccggctggtcggtgtggagagtcgatcgctgatgggatgtcgtgcccgcccggttgtggcgtgagtactgcttcattaggtcgctgatggttctcctcctggctaccgaaggtgagtcggctcgataggcgggagacgcgttgctgttcgtaggagatgactgggcggaggaccatcacgacgttgaggtgatggatgcttccggccgccggttggccaaggctcggctgccggagggcgtcgcggggatcacccggctgcacgcgatgatcggccagtggctcggcgacgacaccgaggacgtcgccgcgcaggtgaagatcggcatcgagaccgatcggggtccgtgggtgcaggcgctgatcgccgccgggtacacggtgtacgcggtcaatccgttgcaggcggcccgctaccgggaacgtctggcggtgtccggggccaagagcgacacggctgacgctcacatgctggcggacatggtgcgcaccgactcgcaccagctgcgcccggtcgccggtgacagtgccgaggccgaggcggtcaaggtcgtcacccgaatgcataagacgctgatctgggaacggacccgcgccggccagcggctgcggcacgcgttgcgggagtacttccccgccgcgctggctgcgttcgaggacctcgacgccgccgacaccctggagctgctggccaaggcacccgacccggccagcgccgcccggctgagcttggcgcagatcagcgcggccctcaaacgggcccgccgccgcgacatcgctgccaaggccgcggcgattcaggccgtgctgcgcgccgagcacctcggccagcccgccgtggtcaccgccgcctacgccgtatcggtgcgcgctctggtcgcgctgttggtcaccctcaacgagcaggtcaaggctctgcaggggcaggtggaggcccattttggccggcacccggacgctgagatcatcttgtcccagcccggattgggtgccgtcctgggcgcccgggtgcttgccgagttcggcgacgaccatgcccgatacgcctcggccaaggcccgcaagaactacgccgcgaccagcccgatcacccgcgcgtccgggaagaagaagaccgtcgcggcccggttcgtacacaacgaccggctcatcgacgccctgatgacccaggcgttcacgtccctgcagaactcccgaggcgcccgcgcctactacgaccagcaacgcacccgcggagccagctacaacgcagccctgcgccagctcgccaaccggctcgtcggcatcctgcacggatgcctcaaaaccggcaccgtctacgacgaggcgaccgcctggccgcatcacctcaacaaggccgctgcttgacattcaagatcctgggatgt

SEQ ID NO: 7059 - DNA, 1380 bp, unidentified
  source 1..1380: mol_type = unassigned DNA; note = element_aef4c7f
  misc_feature 1..3: note = core
  misc_feature 4..89: note = LE
  misc_feature 90..1112: note = CDS
  misc_feature 1113..1380: note = RE
  misc_feature 1116..1367: note = bridgeRNA
tgatggtgtggatggctccaccccgacggcatcgcaatgtgccatgctggaataattaggaaccaacagaaaagaaggagccatccaccatggatatgaccacactcgggatcgatatcgcaaaatctgttttccaattgcacggcattgacgccgacggcgccgtcgttgtgcaaaagaaactacgacggggcgccgtgctcaactttcttggaaaagtggggccttgcctaatcggaatggaggcctgcgcaacctcgcactactgggcgcgggagattgcggctcttggccatgaagtgcggcttatcccaccggcctatgtgaaaccctacgtcaaacgccagaagaatgatgctgcagatgccgaggcaatttgcgaggctgtcacccgaccgaacatgcgttttgttccaatcaagaccgaggaacaacagagcgttcttgtcctgcaccgggcccgtgatctgttgatgcgccagcgcaccatgatcctcaatgccatccggggacatctggccgagtttgggatcatcgcggcgcaaggtccgcgtcaggtcatgggtatgatcgcgcgactgcgggacgacggtgatgccagcttgccggagattgcgcggtctgcccttctcgcgttgggagctcatcttgaggccttggccggtgagatccgagccttggagcgccaactcattgtctggcaccgggcggatccgacgagccagcggctcgaaacgattccaggtgtgggtctcatcaccgccaccgctctggcagccagcgtatctgatccgtcggtcttcaaatctggtcgggagtttgcagccttcctcgggctggtaccacgacagaactcatccggtggcaaagaccgcctcggacgaatatcgaaaatgggagataggtatctgcgaaaacttctggtggtcggggcaacctcggtgatccgaagagcagggagcaaccctacaaaaaccggcgcctgggtgcgatcgcttatggaacgtaaacccgcaagggtcgtcacggtggcgatggccaacaagactgcgcgtatcgaatgggcagtcatgacacgcggcgaagcctatcgcgcctcaccaatcgcctgaggtaataagaacagcggcggcaacacgctgccgtcacgatatgcaggggcaaatatgaatgatgatgattgaacggaaccgcaaccgggacaccccgaggtgctgtcagggctttaaagctcgttagtctgattagggacccggtacgcggacttcatcaaggccagcggtaacatcaaccgcatcaaaaggccggacacatgaccgctctccgtaacgatcaacatcagtcgaaaaaaaaccttgcataaacggggccatccacaca

SEQ ID NO: 7060 - DNA, 1367 bp, unidentified
  source 1..1367: mol_type = unassigned DNA; note = element_aefc601
  misc_feature 1..3: note = core
  misc_feature 4..85: note = LE
  misc_feature 86..1120: note = CDS
  misc_feature 1121..1367: note = RE
  misc_feature 1139..1355: note = bridgeRNA
tgatgctgtggacggcgccactctgcggcatcgaggtgccatagggtggttgcgttgaagcgaatcactttgaggggagccgtccatgggcgaggttatcacgattggtctggatatagcgaagtcggtgtttcaggttcacggggttgatgggctgggcgtggtggtgatccgcaagcgtgtcagccgagccaagatgctggagtttttcgccggtctaccgcggtatctcattggcatcgaagcttgtccggcggcccatcactgggcccgcgagttgcaggccatcggtcatacagtgaggctgatgccaccgagctacgtaaaggcctacctgaagcgcagcaagaacgatgcgaacgatgctgcggcgatctgcgaggcagtgacgcggccatcgatgcggttcgttgcggtcaaaaccaaagagcaacaggccgcactgatgctgcatcgggcccggcagttgctggttcgtcagcgcacgatgttgagcaacgccatccgtggccatctttcggagcttggcatcgtatcggccaagggccgcaatggaaccgacgagctgcttgagatcattggcaaggatgcagacagccggatccccttggcggcccgcagtgttctcaaggttcttgcatcgcaatacgtcgcgatcggtgtcgagatcgcctcgatcagcaagagcatcctggcctggcatcgcgcctgtgagccaagccgccggctcgaggagatcccaggtatcgggccgatcgtggctaccgcccttgttgccgagatcagcgactggatggcgttcagctcgggacgtggtctggccgcctggattggattagtgccgaagcaacacacgaccggcggcaaggacaagctcggcagtatcaccaagcagggcaatcgatacctgcggtggctgctagtcaatggcgccatggccgtcatccgctatgcgcagaagcacggcaccaagaagcatccctggctgggtcagttgatggcgcggcggccgaccaaggtggccgccgttgccttagccaataaaatcgcccggataacctgggcgattatggttcgtggcgacagatatagggagccggcgctgatgccggccgcgtaggcagcgggagttcggcactaacaattggcaagggcatgacgacgtaatgcagaaacggtcgttccgggggatgggagaacccgcttgggtcatcgcacttcgagtgcgggctttcgattgggacccgttccgcgcagagcattagggccagcggccagacctgccgcaatcacaggccggacacgtgaccgcacccgaccaatgctgcaagccgtcagaaagttcttgccagggcgccgtccacacg

SEQ ID NO: 7061 - DNA, 1286 bp, unidentified
  source 1..1286: mol_type = unassigned DNA; note = element_af03049
  misc_feature 1..2: note = core
  misc_feature 3..317: note = LE
  misc_feature 318..1274: note = CDS
  misc_feature 1275..1286: note = RE
  misc_feature 28..252: note = bridgeRNA
ctgacttgttccattggtggtgggatgctgcgggatctgcagtcttgtagcgtccagggtgtcagccggcacaggtccgcaagctccttgccgcccgttgcgaacgggttggctcactgatagcgtgccgcgccgctgacacccgcccggggcgtggctcgacagaggcatgcaaacacttcaagtcagggtgcccgccacgggtgatccatcaccgacgtcggcgaaaggaacccggacatgatcgttatcggcatcgaccctcataaatcctccataccgcctcagccatcgatcccacgggttgtcagctcgcggtgcggcgtttcgtggtcaacgcaggcacggccaagcaactgctgggatgggccgcgcaatggtccgaacgcagattcgctatcgagggcgccaacggtctcggccgccgaattgcccagatcctggtggccggcggcgaatccgtggtcgatgtcccctcgacactggccatgaaggtcagggtactttcgaccggcggtggccgtaagagcgacccggcagatgcgttcgccgtcgctgtcactgcactccgtcaggagcatctgcgcccagtcgctgccgaaaaccagagcacaattctgcgcctgctggccgaacgccgcgaagacctcggccacgaacgcgcccggctgctcaaccgcctgcaccggctgctgcgcgagctgataccgggaggagttgagcccggccttagcgccgaaaaggctgccgccgcgatgcgtaccatccggccggcaacagccaccgacgcggtcagacgcgaactcgccagggaattgctggccgatctgcgacgcatcgacgccggcatcaaaaacaacgaagcacaaacccgcgacgccctggccgcgtccgccacgacactgcaggaaatcccaggagtcggggtcgtcctcgcggcgaaactcctcggccatgtcggggacatcaccagattccccagcgcctcacacttcgccagctacaccggaacagcacccctggccgcctccagcggccaacaaaaccgccacagactcaacaccggaggcaaccggcagctcaattccgtgctgcacaccatggccgtctgccaaagccgtgaccccggaccaggccgggagtactacctgaagaaaaccgccgaaggaaaaacaccccgcgaagcccgcagggcacttaaacgacgcctctccaatgtcctctacaggcggatcctgcacgatcaccaccaagcccaaaaactggctgcttgacacacagaggcg

SEQ ID NO: 7062 - DNA, 1353 bp, unidentified
  source 1..1353: mol_type = unassigned DNA; note = element_af1863f
  misc_feature 1: note = core
  misc_feature 2..74: note = LE
  misc_feature 75..965: note = CDS
  misc_feature 966..1353: note = RE
  misc_feature 1121..1349: note = bridgeRNA
taatgagatggtcacccccacaccctgcgagggctaggctttcgcaggatgttttgttttcggaggccatcatcatgagcgagtcagcgctgatcgggatcgatctcggtaaacacagtttccccctgaacggccaagacactgcgggccgagaggtgtttcacaagaagctcaagcgaacccagatgatgcagtttttcggcaacctgccgagctgcgtcgtggtgatggaggcttgtgctggggcgcattttgtcgcccgccagctagcagggatgggacacacgagcaagctgatttccccacagttcgttcgccccttcgtcaagggcaacaaaaacgaattcgttgacgcagaggccatttttgaggctgcatcacgcccctccatgcgttttgtttcgcccaagaccgaggctcagcaaacactttcagtgctgcaccgtatgcgtgagtcactggtgcgtgaccgcactaaaaccgctaaccagatgcatggtttcctgctggagttcggcatcagcctgcccaaggggctggcaatcatgaagcgcttatccagcgttctggccgagcatgagctgcctgttcggctgacggtgttgttgcagcgtctacacaatcacttcgtctacctagatgggcagatcaaggagctggataaagagcttgcttaccagcttgccgacgatgatctgggcagacgtttgctgagcatgccatgtgttggcccgatcaccgccagcctgctggctgtggaaatgggtgatggccaacagtaccgatgcagccgagatttttccgcgtccgttggactggttcccaggcagtacagcaccggtggcaaagccaacctcttgggcatcagcaagcgtggtgacaagcacctcaggcagctactggttcagtgctccagggtttatatgcagagacttgagcatcggaaaggtccgctggccgagtaggtgcgctcattgttgatgcgacggcactcgaacgtagtggcctgcgcgctggccaacaagttggcacggatcgcttgggcgataacggtccaccatggcgagtttgaaacggggccagccagcatggctgcctgaccccgttgttgcagcaccacgattcacccttcaggttttgcgatagctgacaacagatgatgtgaacggccaaccggcctggcgaaggtcctgacattaaaatcggctttagaagccgacggcttttaagggtcgccaggcgcgactctcatcgtggcgctggggtatgccccaaacagacgccggatagatttaagcaagccaaccacttcacccgttaatcagtattgcaaaaatgggggtgacaatagat

SEQ ID NO: 7063 - DNA, 1282 bp, unidentified
  source 1..1282: mol_type = unassigned DNA; note = element_af1bb3c
  misc_feature 1: note = core
  misc_feature 2..208: note = LE
  misc_feature 209..1270: note = CDS
  misc_feature 1271..1282: note = RE
  misc_feature 77..213: note = bridgeRNA
actcagttcattatgctcaagaacatcagcccaatctaacccatgcagagattggcgaacataattcctttgcgttgacctgtcgatttgatgtgccctagcattgccgggcccagcgtcagtgacctaataggagccttgtgctgcatcttgagtgtcctgtcctgcgtatggggttggtagtgcatattccttggaggaatgagccatgaacaattccagaaacaaagctgaagttatccttggtgtagatacacatctggatacccatgttggggttttacttaacgcacaaggacatctgctgggatgcttgatggtcacgaccaatatcagcggatatgagagactcgtgacttgggcaaactctttcggatgcttgaagagagcaggcgttgaaggcacaggcacgtacggtgctggcttggcctgtgtactgcgtaagcatggtgtcgaggtcttcgaagttaatcgtcctgaccgctccaaacgcaggctccagggaaaatcggatcctaccgatgctgaaaatgctgcgcgatcagtgctttccggtagtgctaccgcgatagcaaagacccagtcaggtgcggcagaaatgatgcgtgtggtatcagtggccagacgcagcgccgtcaaagccaaaacgcaggcaatgaatcaactaagagcgctgcttgtcagtgccccccagaatgttcgtgaacggctctggaagagcaaacccgctgactgtgcaaagggatgtgcacgagtgaggtcattgggtagcacagaattcctgcatacgttaacgactaccctgtgcctgctggccaagcgttggttgctattggcagacgaagttgaaaaacttgatgccatgttggatgccttgacccatcaacatgctcgccgtctgcgcgagcaatttggcgtcggccctcaaaccgcagcggtgctgctttcaacggctggcgataacccggaacggttaagaaatgaagcatcgcttgcggcactttgtggggttaaccctttacccgcatcctctggaaagaccgtacgacatcgcttaaaccgaggtggtaacagtgcagcaaataatgcgttatggacgattacaatggtccggatgcggggagatccacaaacccaatcttacgtcgcacgacgtagcgcccaaggcttatcttcgaaagagatccagcgttgtttgaagcgctatatcgtcagagaactctacccattgctcttggccgatttagctgactcagcgcgagcttgttgacataggagcgtc

SEQ ID NO: 7064 - DNA, 1401 bp, unidentified
  source 1..1401: mol_type = unassigned DNA; note = element_af22068
  misc_feature 1..2: note = core
  misc_feature 3..79: note = LE
  misc_feature 80..1117: note = CDS
  misc_feature 1118..1401: note = RE
  misc_feature 1115..1388: note = bridgeRNA
tgttggggtggacggcccccgaacggcatcgaaacgtgccagagtgagtcgttaagatctcaaacaaagggagccgtccgtggacaagattatccgtatcggcatcgatacgtcaaagcacgtctttcaactgcatggcgtgaacgccgccgagcgaccggtcttgcgcaagaaaatgcgccgcagagagatgatcgacttcttcacgacctgttcgccgaccgtgatcgccatcgaagcctgtggtggctcccatcactgggctcggctgttgacctcgctcgggcatgaggtgaggttgattgcaccgcaactggtcaagccgtacgtcaaaagaagcaagaacgacgccgccgacgccgaggccttgtgcgaggcgatgagccggccgacgatgcggtttgtgccagtcaagtcggtcgatgagcaagccgcactcatgctggttggcgtccgggatcgtttgatccgcaaccgcacccaactcgcgaacgccatccgtgggtatgccactgaattcggcattgctgccgccaaagggctggcccatcttcctttgctgcttgaaaggatacaggctgacgagaccgtaccggagcttgcacgggaattgtttgccagccaggcggacgaatacgcccggttggaagagaagattgccgacgtggatgcgaagctcgaggcatgggagcgcaacgacgaacgcagcaaacgtctcaaaaccattcccggcattggcccgatcggcgcggcactcctgatcatgaagaccccggcaccggagctattccaatccggccgtcagttcgcagcctggatcgggttgacgccgaaagatcactcgaccggcggcaagctgcgcctcggctgtattacgcgagcgggtgatgaggcattgcgagcggcgctggtggtcggggcaacttcggtcattcagcacgcacggcgaaccggtaaggcgtccgtctggctgaccgaactgctcaagcgcaagccgccgaagctggcagccatcgcactcgccaacaagatggcgcgaatcgcctggaaggtcctggtctcgagcgaaacatacaatgcaaaatcggcatctatagtcatggcaggcgtcgcatgaaggtcggccagcatcgaagagtttaaaactgggatctgtgttgagttgctgatgccggaacttgcaagataggtgcagatggtgtgatcgatcgatccacggcgcgagatactccgtgtaagcccatggcctcctacaaggtcgcttatgtgtttggaactcacgttgcggaagccatcttggccagcgttcatgtgcgagcgcacaacaggccggacgtatggacgcaagcgatgcggtcaaatccatctaaaatatcttgcgagcagggggccgtccacgta

SEQ ID NO: 7065 - DNA, 1268 bp, unidentified
  source 1..1268: mol_type = unassigned DNA; note = element_af26ff3
  misc_feature 1..2: note = core
  misc_feature 3..257: note = LE
  misc_feature 258..1253: note = CDS
  misc_feature 1254..1268: note = RE
  misc_feature 33..204: note = bridgeRNA
cttgtatgttgtgtctggccgggcgagagaggttatgctcgttcggctgaagaagcacttccggggaggccgaccgctcctgaaggcagggctcgccctgaccttgtatgtagagaggccccccgcctcattgcccactacgaagagtatcgagaagccgacaagtcggacttcgcattacaaggttgcagcggcatgaagttcgaggtcggggaaccggaggccattgccacctaattcgcttgaggggtgggaaaatgagtgtctgtatcggcctggatatcggttcacgcacttcgatcgcaggggtgcgtaaagatggccagcctgctgggcaatgggatatcgctcagaccgccgccggtcgtaaggctgcggtgaaaaaactgcaggccctcaagcccaaggcgatcgtgatggaagctaccgggatctactacctggacttggccattgagctgcacgctgccgacctccccgtttcagtgatcaaccccaagagcttccataattttgccaagttgatgctggtgaacagcaagacagacgcaatagatgcccagttgctgtccgaatacggggagcgtatgaccccgcgtttgtggacgcctccaagccctgtacagcttgagctcagagcccttggccgccacatcaatcgcttggtagggcaccgcaccagggcgaaaaatgagctgcatgcattgcaggcgaccgctacgaccccgtcaatgctgatcgaagatcaagaagatgcggttgccgcactggacaaccgcattgagcgctttcgcaaggcaggacgcgagttaatcgcccagtgttcgaggcttactcgacagtacaagcagctcctcgcaggcccggggatcggagaagtctcggcactggcggccttggctgagctgaccacgctacctgaaacgctcaagtcctctcaggtagctcgccatgctggtctcgacgttcgacagacacaatcgggcacgagcattgataaacccggtcggctcggcaagagtgggaatgcatatctaagggcagccatgtacatgcctgcattgaccgcggtgcgctgcgacccttatgcaaaagctttctacgagtcgctggtcagcaggggcaagaagaaaatgcaggctatcgctgctgtcatgcgcaaatacctgactggtatctgggcatgcatgcgcggggatgagccatttgatacggccaagcttttcagccctgagcacctcaggaaagcttgaccgcgaacagagtat

SEQ ID NO: 7066 - DNA, 1179 bp, unidentified
  source 1..1179: mol_type = unassigned DNA; note = element_af2a178
  misc_feature 1..2: note = core
  misc_feature 3..306: note = LE
  misc_feature 307..1173: note = CDS
  misc_feature 1174..1179: note = RE
  misc_feature 22..217: note = bridgeRNA
cttgttatagcaatcgcggctattatcgcggggttccggaaggaatgccctgccgcagactgcaatcggcagcagggccgctggcgatctgatcggacccgccctgagccgcttttggctgccccgtagcgtgatcgcgccagcgtcttcatcagacccggatggttgctggaactttcaggttcgctaacaaggcagggacgacgaagatgcagaacgctaccacaaaacccgccacggctggaatagacacttcgaaagctaagctcgacattgcagttcttaagcaacggtcaatgctggcaggtgcagaacgcactcaatggctggcaacagctcgcagctcatctcacaaaagccgacatcacgcgcgttggcatcgaagcaacaggcggatacgaacacggcgttgttgcacatctcaggcaacacggctttaccgtgctcgtgctccaacccgttcaggtcaaagcctatgcccgcatgcatttgcggcgcgccaagaacgacaaaatcgacgctggaacaattgctgcctgtacagcagcgctgaatcaagaccaacgccaaagcgacgaacggctcaatgatctcgcgcaaaatctcactttcgtcgagcagatcgaggaagacattgcccgcatcaaagtccgtcttgaacacatcgatcaaccgagattgaggcgcgtagcagaggccgatatagcccgcttgacaaagcgccgcgccgcagaacttgagcgcatcgcagcttccctgcgcacccacgacgattttgcgcgccgcctcgatctcgtcttgagcgtaccaggcatcggcgagcgaactgcgatctcgctgatcgttcgcatgcctgaacttggccgcgtgtcacgggaagaagcggcggcactcgcagggcttgcacccttcgatgatgacagcggaaaacacaaaggtcatcgccacattgcaggggggcggggccgtgtcaggaggtcgttgtatgccgccgcattgcccgcagcattccgctggaacccggcgttgatcgctctctacaagcgcctgactgcgaagggcaaagcacacaacgcggcactcaccgcctgcgccagaaagttgctcatttacgccaatgctgtcctggccagaaacgcaccctggatcaaaaattcagcgtcgtatctttaatggttg

SEQ ID NO: 7067 - DNA, 1442 bp, unidentified
  source 1..1442: mol_type = unassigned DNA; note = element_af515c8
  misc_feature 1: note = core
  misc_feature 2..145: note = LE
  misc_feature 146..1186: note = CDS
  misc_feature 1187..1442: note = RE
  misc_feature 1213..1440: note = bridgeRNA
aaatgaaatggacgcctcccgccgatgaataaattctgcggtatgagcgagtgaaggtgaaaggtggatcctcacgcgcccacggcatcaaagtgccctaaagtgaaagtgcagaactttcggggcaagtcggaggatccacatcatgaatgctacgcctaaaacggtggtcggagtagatacggccaagaatgtctttcaaatctatacggtcgacaaggacacaggtgaattaaccagtaagcagctcaagcgctcccagtttttatcctggtttgcaaatcgtgaaccttgtctagtcgggatggaagcgtgcggcggttcgcagcattgggcgcgcaagctgcaagggctgggtcatgaggtcaagctcatggcagggaaaacggtcaaggcctttgtacctggcaataagaacgatgcagccgatgcgcgcgcgatttgggtggcggcgcagcaatcgtgcgtcaaggccgtggccgtcaagactgaggagcaacaagctgtgttagcgctgcatcggatacgccggcagttggtaaagaatcgtacagcccaacgtaacgagttgcggggcctggtggcggaatacggcgaagtatttgggctcaggaaagcaggttttgaagcagggatgaaggaagctctggcgcggttgtccgagcgtctgccggcgatgctaatcgacacgctgcgggaacagtgggatgaattacacaggctcgatgaacgcatcgcccgtatcgaggcccggctgttggcttggctgcgacaagatcgtgcggcgcgagccatcgccgaaattcctggcgtcggcctgctcaccgcgacagcagcggtagcgacgatgggacagcctaaaacattccggtctgggcgtgaattcgccgcgtggatcgggctagtaccagcccagaccgggacaggaggaaaagtccggctgctcaagatcagcaagcggggcgacatatatttgcgttcgcttttggtgcaaggcgctcactcgatccagcgacatgcgaaagtcttgccaacatggctgcaggagatcagcaaacgacgaccatcgaacgtggtgacgattgcgcttgccaacaaaatggcgcgcacgatctgggctgtactggctcacgagcgagcttacgacagagcatacgttagcgttagaccaggcacgttgaactgagggattcacatgtagccacgaaaggattacacctcacaagttgcgataggtagtaacagcgatgacagacaggtcagaccgggactcacgaaacctgtgttcacgttagggccttaagcccggtacagaaatgaggagtgggtcagcggatttcatcggggccagcggcttgccgcaaccaaggccggatataaaactgcgactttcctactctgccattgctcgaattaccttgcaaaagggaggcgtccatata

SEQ ID NO: 7068 - DNA, 1819 bp, unidentified
  source 1..1819: mol_type = unassigned DNA; note = element_af57143
  misc_feature 1..3: note = core
  misc_feature 4..111: note = LE
  misc_feature 112..1401: note = CDS
  misc_feature 1402..1819: note = RE
  misc_feature 1479..1761: note = bridgeRNA
gagcattcctgtaatgaataaaaatcaatatcgacaaaaaaatacccccttggtataatacggagtatcagaggtcattctgatctctaaaaaaccaaggaggtatctaacatgaattatactcaaaacgaaaagattatgcaagtaaaaaattcaacgttggtagttggagtggatattgtaaagaataaacatgcagcaagagccttcaattttagagggatagaatatgataaggcaatcttttttgaaaacaatgaagcaggttttaaaaaacttctacactggattagaaaaataagtgagaaggaaaataaaactgatgtaatagttggaatggagccaactggtcattactggtttgccctggaagaatatttaagaaggaaaacagacttcttaagagtggtagtgaatccagctcatgttaaaagaattaaaactcttgatgataattcaccaactaaaacagataaaaaagatgctaaagtcatagctaaattggtagtagaaggtagatattctgtgccacatatgccagaaaaagagtatgcagatttaagagttgcaatgagtcacagagaaagattagttaaagatataattgatctttcaaataaagtgcagcagctgctagataaatattttccagagtataaaaaagtttttaaaaagtgggatggaaaggcttcagttgcagttttaaaagaactctttttacctgaattgatacttgaaaagactgatgaagaaatagttgaggttttcagaaagggtgccaatagagctgtaggcataaaaagagctagaaagcttaaaaaggcggctttaaactcagttggtattaaagagggggcagaatttactcaatttgaattaagaaatctactcgagcaatatgagcttttaaataagcagaaagacctgcttgaagaaaaagtagagaaacttcttgaaagtatgccagaagctaaatatatggagtcagtaaaaggtgtagggttcatgacagtagcaggattcattgcagaagttggagatgttaataattatgatcatccaaaacagatacagaaacttgcaggtttaaacttaaaagaaaacagttcaggtaaacatcagggtcaaaccagaattaccaaaagaggaagacccaaactaagagcattactgtacagagtaatgatgccgatgctggctaacaatctagaatttaaaaagctgcatgaatactatattactcgaagagataatcccttaaagaaaaaacaatcaatgattgccttagcctgcaaactgattagaatattttttgcacttggacaaaaacatattatgtatgatggtgaaaagttgatgaatgatattgagaaaaatttaagcttacaggaagcagcttaagtattaagtgtattgttgtaaatgaattagttgatttaagaaagctcgtttaaagttgagtagtagaactttgaaagaggaagactggattagccggaatatatttatccattagggcttagcttaagttaagacccggtaaaggagcagaaccggcctccacccatggaaaggtagaacgaaggaatgttgggacatagatcctgggagatatgggaggtaagaccaccatggtcttgtggagatccgaagcgaccatagaggaattttttagaaaaaagctaaattttttaatcgggtcgtctctatatttccaaaaattaatttttatgacttaagtttctatttttctaattcaaagaaaattgaaaaactgcgaatgagctagtatttaagagataaacttaatttaaagagg

SEQ ID NO: 7069 - DNA, 1625 bp, unidentified
  source 1..1625: mol_type = unassigned DNA; note = element_af5a1c2
  misc_feature 1..2: note = core
  misc_feature 3..517: note = LE
  misc_feature 518..1492: note = CDS
  misc_feature 1493..1625: note = RE
  misc_feature 7..230: note = bridgeRNA
ttcgtattataaggtcagccagataagaaaatatttctggttgaccatttgttatatggttttattataacggtagccggggtaaaacgtaactgctcgtgggacttgatcccgtcaactaaacagtttgccccctacttgtagaaacatgattgaggctggttgggacatagatctcgtataacaagcgaagctgtgatactgcaagaaggattaggggtaccggttaatattaatatttggaggggattgagaatgaatccagtcattggtctggatgtgtcaaaaggagaaagtcaggtacaagcattcatagataaagggaaaccataccgtaagagctttaaggtatcacatattaacgaagggcttgagtcccttgtacaattcattgaaggtttgacagctgagacagggaagaaacctccggttattctggaagcaacaggacactatcaagctcctattgttcattatcttgaggaacggggctatctcttgatttgttattaacccattgatttcttacaaagccaaaagttccagcctgcgaaaggttaagacggacgcagccgatgcttatcttctgtgtgaactgtactataaagaggaacttgaaccctataaaaagcgcggtgttcaactcctaaacttacgtaatcttacgagacaacatgagaatattactggtactttaattcagacaaagttacaatttcaagcgattctagatcaggtattccctgaatttagaggagtgtttggagatttatattccgttgtgtccctgctaactttaaaggaatttccctcgtctgaagatattctaaatgccagtgatgaggtcttgaccgaaaagatccacgggaattgtaagagtcgttcactaagttgggctagtgataaagcagcccaaatcaaagctgcggccattcgaaatccgtttgagaaagccgtttatcagagtcacattttgagccttggaatgtttattaatattatcctccaatacaaagagcacctatcaatgttagaatccgagatagatgcccttgcgcaagaagttgaagaatatgaagttatcaaatcaattcctggtatcggagaaaaaatcgctgcaacgattatatccgagattggggaaattgatcgatttgaccatccaaagaagctagtcgcattcgctggagtggatccaagcgtttttgaatctggtaaattcacagctactaagaatcgaataaccaagcgtggctccagcaggcttcgtcacgcgttatatatggccgtacgttgtgccattcgagactgtcgtaagaagaaaacgagtgatgaaattatccctcgtaataagaagttacgtgagttctacgacaagaaacgtgatgaaggaaaaccttttaaggtggctgtcattgcttgtgtgaataagctcttacattggatttatgccctgttaaaaagcaacacattattccaagatgtagtttagtcactacgtctatctaaatagtccagaaccttccatgtgttgagaaatggtaggttatttagtgcactcatttttagtatatcatttgtattttaacttttttattgaaaaatattgacaaactattagctgg

SEQ ID NO: 7070 - DNA, 1481 bp, unidentified
  source 1..1481: mol_type = unassigned DNA; note = element_af5befe
  misc_feature 1..2: note = core
  misc_feature 3..211: note = LE
  misc_feature 212..1222: note = CDS
  misc_feature 1223..1481: note = RE
  misc_feature 13..194: note = bridgeRNA
cttgtatgtaataagcatgtggtggttagctaccatcgcatgaagcggagagagcttggccctcgccccaaggcagtgaccttcatttggcagcaaaagccctccgcttcacctttcacgccagcattaacattgaacggttgccaagagcgatgactctgtatgtacaagggtaataggcgtgatggtccagtgaaaggagaaaacttctatgtttcagttaggtatcgatgtcagcaagaaaaccctggatttatgcctattgcgggaaggtgtaaaaggcagggtcaaaactcgcaagcttaaaaacgatttcaatgcaaccagtaccgtgatcagctggctctgcaaacaacaatgtgaacctaccgatgtccatatcattatggaagccaccggtgtttatcatgagtcgcttgcatacggccttaacaaggctggggccagagtatcgcttgccaacccataccgcagcagagaatttgcacgtggcatggatattttgacgaacaatgacagcgttgatgcttatatgcttgcctgttacggtgcacttaaagagccggaaccatgggttcctccacctgagaatgttcgttatctcagtgcacttttgcgtcgccgggatgcgctagtcactgacaggagccgcgaaaaaaacagacttgaaaaatgcaggatgacggacattcctcctgttattgctgaatcgatcgacaatgttcttcgtaacctgagtacagagattgaacatctagacgatttgattctgactcacctcgaccaacatgctgaattgaagaaggattttgacctgctaacatcgataaaatccgtgggttttcagttaggtctgaatatgctggttatcttgaggggtcatcgttttgacaccgcagagcaagttgcggcatttttaggtgtggtgcccgttgaaaaatcgtccggcacgtcagtaagaggtaaaccgaagttgtctaaaatcggaccgcctgaaattcgggcgaaactgtatctggcgtcgctatgcgggctgaggtttaacccggtgatgaaagcgatgtatgaaaggctatgtttatgcggcaaggcaaaaatgtgtgccattggcgcccttatgcgaaaacttgttcactggtgttatggcgttctgaaaacacaaaagcctttcgatgcggaatatctgtcttccgatgcgcgtagcgcatataaggcggtatgaagtcgttttatatggctctgtagttaaaccgccgaggcccggcgtaagccggtgcaggatcattaaagatcctgatcccccctccgccctgcagagccatgcagactaacagcgataaaaatgttgattcaagccttttaaccccgttagcgcggcgtagccgcgatgtatcggggacttagcgctggcagcttgctgacagcgcttaggggctgtatttccaaaattgacgcaacttttctttgacggaacacggtag

SEQ ID NO: 7071 - DNA, 1364 bp, unidentified
  source 1..1364: mol_type = unassigned DNA; note = element_af74b25
  misc_feature 1..2: note = core
  misc_feature 3..30: note = LE
  misc_feature 31..1110: note = CDS
  misc_feature 1111..1364: note = RE
  misc_feature 1083..1352: note = bridgeRNA
tgatggggtggacgccccccgacggcatcgatgtgccagagtggaggtgttgagcaccacttgaaggaggcgtccgtgtcagaagttaccacgatcggtttggatatcgccaagaatgtattccacgcgcacggtgcggatgagcgcggtcatgcgcttttcagcaagcggatcacgcggggcaagctgctcgatttcttcacgtcacagccacggtgcgtggttgcgctggaggcatgcggcggcgcgcatcactgggctcgcgaactgatccatctcgggcatgcggttcggctaataccaccgaaatatgtgaaaccgttcgtgaagcgcagtaagaatgatgcgatcgatgccgaggcgatctgtgaagcagcgcagcggccgagcatgcggtatgtcgcggtgaagagcgagcagcagcaggcggccgggctggtctttcggacccgcgatcttttggtgcggcagcggacccagttgatcaacgcgatccgagggcaccttacggaatatggctgggtcgcgccaaagggcccctcgcatgtggcgatgctcgccgacgtgctcaaagaggacgagatggccagttcgcttccggaagccgcgcgcaccatgttccgccttatgcttgatctgttgggcgagctggatggcaaagtcgcggatctcgacaaagagatcgccagacgcgctcgcgaggacgaagtatcgcgcaggctgatgaccattcctggcatcggcccgatcaccgccaccgcgattgccgccctggcacctccggccgagaccttcaccaagggccgggacttcgccgcctggctcggccttacacctttgcagaaatcgacagggggcaagcaaaggctcggcgctacctcgaaaatgggcgagcgcacgctcaggcggttgctgatcatcggcagcagcgcggtcgtgctgcaggcgagcaagcgcggtgcgccagaaggctcgtggttggcgaaaatgctggccagaaagccgcgcatgcttgtgacggtggcactcgccaacaagacagcgcgcatcgtctgggcgctgctcaccaggcaggaaaattacaaggctccggtcgcagcaacggcgtaagccggggcggaccagaggtcgtcggaggcgtagtcggtcgaaggagagtatggcacaacagtcggcgagacggggccggaagaaccagcgaaaaccagtgtgccacaagcacgcttccgtgatgtggttccggtccgcgaactcccatacaggcccgcagctccatcgctgcatcagaggccggacagatggcagcatccgactacgtgcccaaaccctcaattaccgcttgcgtctttcggggcgtccacaga

SEQ ID NO: 7072 - DNA, 1397 bp, unidentified
  source 1..1397: mol_type = unassigned DNA; note = element_af81ef5
  misc_feature 1: note = core
  misc_feature 2..89: note = LE
  misc_feature 90..1115: note = CDS
  misc_feature 1116..1397: note = RE
  misc_feature 1165..1389: note = bridgeRNA
caatgggatggactcctcccacctatcggcatcagagtgccagactgatatgattaaacatatcagacaaactagcggaggagtccgacatgaatattaaacgaataggtatcgatttggcaaaacaggtctttcaagtacatggcgttgatggtcaagaaaaggtcgtattacgcaagcagttacgtagagtccaattgttggattactttaaaaagctgccgccctgcttgattggtatggaagcctgtggcggtgcgcattattgggcaagagagctacaaaagctgggtcataccgttaaattgatggcgccgcagtttgttaaaccctacgttaaaagcaacaaaaacgacgccaatgatgcggaagcgatctgcgaagcggttgcgcgtcctaacatgcggttcgttgcgattaagaccatcgctcagcaagatattcaggcccttcatcgcatccgcagtgagcaagtgaaacagcgtaccgcgaaagtaaaccagattagaggtttgctcgccgaatatggtattgtcgttggtcggcgtgtggatgtgcttcgtaacgccttaccgcagttacttgaagagactgaaaatgggttgactgctgactttaaagtgctgcttgatgggttaagacaagatcttgttacgctggatgaacgtgttgatgacctggataagaaaataaaaacgctggctactagcaatccagccgccaagcgtttgcaacagattccgggcattggtccgattatcgccacggccttgatctgcgcaatcggagatggtaagcaatttcaacgtggaagggacatggcctcctggctgggtctaacacccagacaacacagcagtggaggcaaagatcgactgctgggtatcagtaagcgtggcgatgcttacttgcgcacgctgctgattcatggtgctcgatctgcgttaaaagtcgtgggaaagaaagacgatccgcgcagtcgctggttgcaaaacttatgtagcagacgcaataaaaacattgccgctgtcgccttggctaacaaaaatgcgcgtatagcttgggctctgctgagcaaagaaaccgattacctgccggagggcgaaccggcttgagttcgaaggcgagccttcaaacccaagccggttgagataaaggaacccatccacccacgattgtgaagcaataactactgatggaaaacaggtcgaaccggcgtttgcaaaaccttacgaatccgcagtgccttgagcacgatagggcgattaggagcatacgcgcgaatagcccattatggccagagcacaaacgctcaattcataggccggatatacgtgtgcagtcgtaccccaatccagaagtaattaagtgcttgcaaaacgggaggagtccatata

SEQ ID NO: 7073 - DNA, 1616 bp, unidentified
  source 1..1616: mol_type = unassigned DNA; note = element_af834e0
  misc_feature 1..2: note = core
  misc_feature 3..276: note = LE
  misc_feature 277..1485: note = CDS
  misc_feature 1486..1616: note = RE
  misc_feature 13..296: note = bridgeRNA
ctgttacaatataattgacgggtaaaaccttgcaagccagtaagggtttacacgtacttgttacttaagctatactgaaagcagtaattggactgacggaatcctccttgggataagcgcccgtaatatagactgtcatccatgctttcattatagcgttcggtttatgcaggttgagccacggtatgtgcgttcgtgtcaccaaacagattgaataggtaatgagtaaagtgtggtttgcccgattacaatttcaattcaggagatgcatttattatgaacgcagtaggtatagatgtttccaaaggtaaaagtactgttgttgtactacgtcccttcggagaagttgtggcttcaccttttgatgttgctcacaccggaagtgatttgaaggcattagctaacttcataaagaaacttcccggcgagactaaggttgttatggaggcaacaggaaactattatgaacccattgcccgctacctccacgaacaaaatatatttgtttccgtagtcaatcctgtgcttatcagtgactttggtggaaacacgttaagaaagcctaaaaccgataagaaggacgccttgaaaattgcttcttatgcgttaagctattgggttgatctgaagaaatatgttcctcaggaagacttaagaaagtccttgaaactgctgaacagacagtatcaacaggcttctaagttaaagaccatgatgaacaataacctcatatcattacttgacctgacatttcccggaatcaataagctgttcacatcaccttccagagaatcagacggtcacgaaaaatgggttgactttgtattggcatttcctcactgtgatatgatctcaaagctaactatcaagtttttttcaaggaagtacaagaagtggtgcaacagtaattcttatcacttcaccgaagcagcttgcaagaaaatatatgaatactccaaagagtgcatcagtagtgtatcttcaaaagaatcaactgcatttgccgttatacaagctgcaagaatgctcaattcagctactgagaactgccatgttattcagcttgaaatgaaccgtgtagcagctcagcttcccgaatacagcactgttatgtccatgtatggcgttggaaaagctatggggcctcagcttatggctgagattggagatccaagacgttttcatagcagaaaggcaatcaccgcttactttggttatgacagtgagaataatgattctggtcagaaagtatcgatatcaaattcgatgaccaagaaaggtgcaagtgctctgcgaagaacacttttcatcattatgcaggtattgttacaaaacaagccgattgataatcctgtgtacgatttcctgatcaagaaacaatccgaaggcaagcattactattcatacatgaacgctgctgcaaacaagttccttcgcatttactatgccaaagtaaaagaagttttaactgctgcagaaacctaagcgtaagtcgaacaactcaaagaatacttttttcaggctgctgcttcagcagcctttttgtcgtactcttttttactttgaaaaatatttttcatttttttcaatttagggattgacttttatttgcaggt

SEQ ID NO: 7074 - DNA, 1514 bp, unidentified
  source 1..1514: mol_type = unassigned DNA; note = element_af8cf08
  misc_feature 1..3: note = core
  misc_feature 4..246: note = LE
  misc_feature 247..1188: note = CDS
  misc_feature 1189..1514: note = RE
  misc_feature 3..220: note = bridgeRNA
cttatattatatttagcgcagttagctactgccaaagcccaagtggtatacttggaataagccactgtggattagttcatttcctccaatcgcttgacgatttccgaaaggatctaaccacagctttttgtttcaattggtaatgagtttgataacgcatagacgttttatctcgtctaaggtaacaaggcaaaaagttcgtagataactaagtagacttgaaatactatatctggaggtactcccatgctttatgtgggcattgatgtcgctaaaaataaacacgatgttacagccttgaatgtttcaggaaaaactgttcttaaaccactcactttttcaaataataaagctggttttgaactcttagatctgtctcttcgacagctcaaccaagactgtctcatcgctcttgaagatactggacattatgcctttaatctactgaacttcctgcatgaacaaggatataaagtttacacctacactcctttgctcatcaaggaatttgccaaatcattatcacttcgcaagactaaaacagataagaaagacgctcatggcatcgctcttaaacttctttctgaccccaatcgtgaacaatttcaacacgataatcggcaagtagaactaaaaatactggctagacatattcatcgtctcaaaaaaaaacagtctgattggaaagtacaatacactcgttgtcttgatatcatctttcctgagttggataaaatcgttggaaagcattcagaatatacctaccaactcttgacacgctaccctaatcctcagaaaaggcttgaggcaggatttgataagctgatagaaattaagcgattgaccgcttctaaaattcaggatatcctctcagtcgcacctcgttctatcggaacaacatctcctgctcgtgaattcgaaatcatcgaacattacaagaggctcattgacaaggcggaaacatgtgtcaatgacttgatggctgagttcaactcggtcatcacgacggttactgggattgggggtcgtttaggggcggtcattttagccgagattcgaaatattcatgcctttgataatcctgctcaattacaagctttcgctggactggattcttctatttatcagtcaggtcagattgatttagcaggaagaatggtcaaacggggttcccctcatctgcggtaggtactcatacaagctgccaaagcatgccctcgcttttcacctgcttttaaggcctatcttaagactaagttagaacaaggaaaacattacaatgtagccatcatccaccttgcaaaaaaacttatccgaaccctgttttatatcctaaaaaagagctgccatttgacgaacaaaaagtgatgtaatttctgaaattaacacaggattacctttgaaaaaatggactttttcaatagctttttgccgtgctctaaaatcatcgccaaatcatcaaattgaaataagaaatagtttagataaaactattgacttttcttatagtttgt

SEQ ID NO: 7075 - DNA, 1418 bp, unidentified
  source 1..1418: mol_type = unassigned DNA; note = element_af9573d
  misc_feature 1..4: note = core
  misc_feature 5..201: note = LE
  misc_feature 202..1404: note = CDS
  misc_feature 1405..1418: note = RE
  misc_feature 1..192: note = bridgeRNA
ctccgtaagttgttgggcggcccgggagggccgggtgtggctcaagagcttctgccttcagtggctcgccaggagtggccgcctgactctccggggcgccctggctgctgattgagatgtgcgcttcggtcgctgattacggagatgacagcggggtgttcctcgggccgacggctcgctgttggaagtgaggaggggcgagtgagggagcgacggtcccgggtctgggccggcatcgacgcgggcaagggccaccactgggcggcggcggtcgatgagaccggcgcgaccttgtggtcgaagaagatcgacaatgacgagtcggcgattctgaccgcgctcggcgagatcctggagctcgccgatgaggtccactgggcagtggacatctccggcacatcctccgccctgctgctggctctgctcgccgcccacggccagcaggccgtctacgtgcccggccgcacggtcaaccgcatgtcgggcgcctaccggggcgaggcgaagacagacgcccgcgacgcctacgtcatcgcagagaccgcccgtcagcgccgggacttcgccgtcatcaacgtgcccgctcagctgaccgcggacctcgccctgctgaccggccaccgatccgacctggtcgccgaccgggtccggctggtcaaccggctccgcgacgtgctgaccggcatcttccccgcgctggagcgggctttcgactacagcagccacaagggcgcgctggtgttgctgaccggccaccagaccccggccgctcttcgccgtcgcggccgggcccgactcacggcctggctggccagccgcggcgtccgcggcgccgacgcggttgccgcgactgcgatggaagccgcgcgggcccagcacaccgcgctgcccagcgaggatgtcgccgcccagatcgtcgccgacctggcagcgcaggtcctggccctggacgaccgactcaagcggatcaacaagcagatccgcgacacgttccgcggtcacccgcaggcggagatcatcgaatccctgcccgggatgggcccgatactcggtgccgagtccgtcgtgtccgctggcgacttgtcggcctacgtcgacgccggtcacctcgcgtcggcggccgggctggtgcccgtcccgcgtgactccggccgacgcaccggcaaccttcaccggcccaaacgctacagccgccgcctgcgacgggtgttctacatgtccgcgcagaccagcatcatccgcgagggcccgaaccgggacttctacctcaagaagcgagcagagggctgcaaacatgtccaggccgttattgccctaccccgccgacgagcgagtgtgttgtgggctctgctgcgtgacggacgggtattcacctccgctccgccggtcacgcaggcggcttgacttcgtcattgaga

SEQ ID NO: 7076 - DNA, 1182 bp, unidentified
  source 1..1182: mol_type = unassigned DNA; note = element_afb53c2
  misc_feature 1..2: note = core
  misc_feature 3..192: note = LE
  misc_feature 193..1179: note = CDS
  misc_feature 1180..1182: note = RE
  misc_feature 28..184: note = bridgeRNA
tcctttagatttgcatttaaattttttatattttaaagaacggaaaaggtacactatctatacactctaagtttttaaacttatacattcgattcagaccttttccgttcagttataaactcaaatagaaattagggattagaacccattatcaaggagttgagttataacataatctctaaaaccaaagttatgaaaaccaattcaaaattcattgggattgatgttagtaaaaaaacattagacatctgtattttatctgatcgaaaggagttctttaaaattgataataccccacaatccattgaagaatttttcactggaaacctatctaaaaaaactacccattatgtatgtattgaaaacacaggaaaatatggttgggctttaatgaaactaatgcctgaatttaactgtttattttatgttgttaatccactgcatttaaaaaagagtatgggattgataagaggaaaaaatgataaaatagatgctcttagaattgctaaattcattaaaagtaatcatacagaaatagttgcttttattacacaaagaattgaaattaaggagcttcaggtattgctaaccgagagaaaacatagaatcaaacaaagaaaatccttagtaataaaaaataaagaatatctatccttaagtgatgagaaattaattaaaaaactaacccagaaaaataatagattgattaaagagcttgacaaacaaatcaaggaatttgaaaaaagtatacaagaaattataaagcaagatcaaaaattatcaacgttacagaaacaacttgtatctaccccaggagttggaaaggttttagcttggaatttgttagtgaaaaccaatgaatttaaaaccataactgagccaagaaaacttgcctgttatgccggtgtggctccttttgaaaacatatcgggaacatcaatatttagaaaaccaagagtatcctcttttgctgataaagatctaaaaagattattgcacttgggcgcaatgagcgctattcgtttaaaaaatgatttaagtatttactataatagaaaagtagaagaaggtaaaaataaaatgagtgtactaaatgctgtaagaaacaaaattatacacatcatttttgctttgattaaaaatcaaactttttatcaaaaccgcttgaatttgtcatagaaa

SEQ ID NO: 7077 - DNA, 1399 bp, unidentified
  source 1..1399: mol_type = unassigned DNA; note = element_afb84d9
  misc_feature 1..2: note = core
  misc_feature 3..79: note = LE
  misc_feature 80..1165: note = CDS
  misc_feature 1166..1399: note = RE
  misc_feature 1118..1387: note = bridgeRNA
tgttggggtggacggctcccaacggcatcgcaatgtgccagaatgagttcgttgaaagctcaatcgaaggagaccgtccgtggaagagattatccgaattggcatggatacgtcaaagagcgttttccaattgcatggcgtgaacgcagtcgagcaaccagtccttcgcaagaagctttcgcgtagggagatggtgaaattcttcgagaaaacgctgccgactaccatcgcactcgaagcctgcggaggttctcatcattgggcgaggctgttaggttcgttcggtcatgaggtgaaattgatcgcgcctcaattggcaaagccctatgtaaaacgcggcaagaacgacgcggcggacgcagaggctttgtgtgaggcgatgagccgacccacaatgcggtttgtgccggtgaagactgcggaccagcaagcggcattgatgctggtcggtttgcgagagagactcattcgcaatcgaacgcagctcgccaatgccatccgcggctttgccatggagttcggcatagccgcagccaagggcatgtgccgcatcgaaccgttgctcgagcggattgcggctgatcaatccctgcctgcattggcccgcgagctttttgccatgcatggcgttgagtatcgcgacttgcttgccgaaacgaaggcggtcgaggaaaaactgaccgcgttgcatcgctccgatgaatgcagcaggcgcctggcccaaattccgggtgtcgggccggtcggcgcatcgcttttgatgattaagaccccagatccgcggctatttagatctggtcgagattttgccgcctggatagggctcacaccaaaagaccattcgactgcaggcaaggtcaggcttggggtgatcacccgtgccggtgacgaaatgctgcgaagtatattggtggtgggcgccacttctcttctccagcacgtcagagcaggtcgaagcaggcatgcttcccgatggcttatcgagctcctgcaacggaaaaaaccgaaattggtggccgtggcgctggccaacaagatcgcccgtattgcttggaagctcatggtgagcggcgagacttacaggcgtacagaaggacaaagcgcaacagttgaatttaggagattggccatcacggtgagcagggacgtcaccgtgctgagctgatgctgtgaacttgcaagtgaagagcagatggtgcgatcgatcgatccaagacgcgtgacactccgttaattccactggccttttaaggtcgttgccgtgttaggaacgcgcgttgcggaaaccatcttggccagtggtcatgtgcgaccacacacaaaggccgcacatatggaagcaagcgatccgatcaaaaatatctgcagaaaacacttgcaacagggagccgtccacata

SEQ ID NO: 7078 - DNA, 1438 bp, unidentified
  source 1..1438: mol_type = unassigned DNA; note = element_afba894
  misc_feature 1: note = core
  misc_feature 2..62: note = LE
  misc_feature 63..1100: note = CDS
  misc_feature 1101..1438: note = RE
  misc_feature 1216..1432: note = bridgeRNA
taatgacatggtccgccgccgaaacctcatcggaggtataagggatgaacaggaggtgttccatggaaattcacacgatcggcatcgatcttggtaagacggtttttcaccttgttggtcttaactcgcacggcgaagttgtggtgcggaagaaatgctcccgcaaccagattttgcgcttcaccgcgaaccttcacgtgtccttgattggtatggaagcttgtggaggtgctcactttctaggccgtgctctgcgcgagcaaggacatgatgtccgtctgatgccggcccaatatgtgaagccctacgtaaagacgaacaaaaacgacttcatcgatgcggaagcttgtgccgaagctgtaggacggccgaatatgcgcttcgtaccgatcaagacggatgatcaacttgatctgcagtccctgcatcgggtgcgggaacgctgggtggcacggcgcaccgcggtggtcaaccaaatgcgtggattgctgctggaacgtggcatcacgatccggaagggtcgccgctacatagaggagtcgttgcccgggattctggaggatccggagaacaagctgtcgggcgcattgcgggtgctgctgacgcaactgcatctggagatgcaatacctcgaccgacaggtcgaggaatccgacaagctgatcctgggcatcgccggagaactggaaccttgccggcggctggtggcgatccccggcatcggtccgatcatagcaactgccactatcgctgcgatcgggaacggagcggccttcaagaagggccgcggatttgctgcctggttgggagtagttccaggggaacactccactggaggcaagcaaacgctaaccggtaccagcagacgcgggaacaaatatcttcgaaagctctttgtgcagggagcacattctgtcctgctccagaagacgaaacaatctaccggcctgagcaagtggctagatcaactcacatcacgcaagcgtattcaagtggctacggtagctatggccaataagatggcgcgcatggcttgggcggtactgtccaaaggagaagcctatcggcctccgctgctgccacagactgctggagactgaaatgaccggcctgcagatgacgcctgtcacaagcacaggcttggaaatcgctgcgcgattcccacatccgcagaccagcggcgacggctgactgaactgagttttttaaatccagccaggtttgctggcgaaccatgagatggcacaacggtcgatcccggcgctcccgaaacctgtacccgtcaacagcctagccaaggccgtgtcattaaatagaacgagggcgcagcgcattccatccaggccaggagacaattctccaacaaaggccgcatacatgtgcgcagaccaacacgccactcccatttttcgcttgcaaaacggcggcggaccataca

SEQ ID NO: 7079 - DNA, 1214 bp, unidentified
  source 1..1214: mol_type = unassigned DNA; note = element_afbfcd3
  misc_feature 1..2: note = core
  misc_feature 3..212: note = LE
  misc_feature 213..1199: note = CDS
  misc_feature 1200..1214: note = RE
  misc_feature 12..190: note = bridgeRNA
cttgtatcttaacagcggttatgattagctaccataacctgaggcagaatgagtttgtgcgcgtccctagggttaaccttgtgtcaaagagaaaaccttctgtctcgctgctgatgccaatctgaacactgaacggtagccaagggcctcgaccctgaatgcacaaggcaagtgagctcagttggtttactttagccattcggagtaactttatgtttttcataggcattgatgtttccaaagccaagctggattgcagcctgttagtggatgtctctagcagtaaacgccgggccaaatcggttgccaattctaaagccggcgtcggcgaactcctgtcctggtgtgcgaaacagcacgccatgactcaagaacttcacgctatcctggaaggcacgggagtctatcacgaacaggcggcgctggctttagccgatgccggagtcaccgtctcgattgtcaatccggctcaagtcaaagactttggccgtagtctcggtgttcgcactaaaaccgatggcatcgatagtttgatcttagcccgctacggcgccttgctcaagcccaagatttggaccccgccgtccagagaggctcgaaccttacaagtcttattgtcccgccgtgaagcgattgcccaagacctgcaacgcgagcgcaaccggttggaaaaagccgatgttatcgatacgccatcccgcgtccatcagtccattgtcgattctgttgcctttctggagcaacaactcagcaagctccaacaagacatagacaaccacattgacaggcatcccaacttaaaagccgaccgtgatctgttgctcagcattccagcagtcgggccgcaagtcagtaatcacttgctgtccattattcatacccaccacttccaatcggctgagcaattggcagcttatctcgggctagtgccggtggagaggcaatctggctcatctgttttaggtcgacctcgcttgtctaaagcgggccctgcacagatgcgggctatcctttatatggcagctatcgtagcaacccgttataacctccaccttaaagcactttatcaacggctacaggaacggggtaaatcgaaaatgtccgctctatgtgcggtaatgcgaaaactggtgcatttgtgctttggcgttcttaagaccagagagccttaccgatctgactatggcgttaaagcttgacttttaagacggtat

SEQ ID NO: 7080 - DNA, 1504 bp, unidentified
  source 1..1504: mol_type = unassigned DNA; note = element_afbffa3
  misc_feature 1..3: note = core
  misc_feature 4..262: note = LE
  misc_feature 263..1483: note = CDS
  misc_feature 1484..1504: note = RE
  misc_feature 7..250: note = bridgeRNA
ctaatgggacttgatcggcgagtctccggctggaactggagcaaccggacaacgctggtcaccgagccgctggtgggtgagcactatttcaacctggagtgtggatcgactcctaaccctagatcgtgtccccaccggtcggcgagggttcccagaatgctgatggggtgtcgtgccaccagagcactgatccattaggtcgccgtccggatccctcgaggctcgccgacagtgtccgatcgagcgcgaacaggagaaccgaatgatttttgttggagacgactgggcggaggatcaccacgacatccacgtgatggacgccgacgggaaacggttgacctcacgccgattacccgaaggactggcgggtatcagtgggtttcacgatgtgattgcctcgtacgcccaggcgcccgccgaggtcgtcgtcggcatcgagaccgatcgcggcttgtgggtgtctgctctggccgcggccggatacaccgtgtacgcggtcaatccgctcgctgctgcgcgctaccgagaccgccaccatgtctcgggtgcaaaatccgacgccggcgacgccaaactcttggccgacctcgtgcgcaccgacaggcacaaccaccgcaccatcgccggcgactcgacctcggccgaggcgatcaaagtattggcccgcggacatcagaatctgatctggtcccgtaaccggcagaccaacgcgttgcgctcgtccttgcgcgagtactaccccgccgcactcgaggccttcgacagtcttcatcacggcgacgccgtcgcggtgctctcgcgtgccgcctcgcccgccgaagcatctcacctgagcgcagcgacgatccgatcgatcctgaaaaaagctgggagacaacgcaatatcgaatcacgcgctgaagaaattcgcgttgcattgcgtaccgaccatctcacggcaccacctcctgttgccgctgcgttcgccgccaccacccgctcggcggtggcgctgatcgcggagttgaaccgtcagatcgtcgacctcgaagcccaactgacccgccattttgaaacacacccggacgccgctatctacctctccctgccaggaatcggtgtcatcctcggcgcccgggtgctcggtgaattcggcgacgacgtcgcccgctacaccaacgccaagtctcgcaagaattacgccggtacgtcacccctgacagttgcgtcgggcaagaagcgggccgtactggctcgtcatatccgcaaccggcggctctacgatgccatcgaccagtgggcgttctgcgccctcaaccagagtccgggcgcacgcgcgttctacgaccaccaccgcgctgccggagacctccaccaccaagcgctccgcgcactcggcaacagacttgtcgggctcctgcacgggtgcctacgtcaccacaccgaatacgacgaacacaccgcttgggcacaccgcaccgggcaacaaccagccgcagcttgacaagttacggacccgggatgt

SEQ ID NO: 7081 - DNA, 1381 bp, unidentified
  source 1..1381: mol_type = unassigned DNA; note = element_afc69d5
  misc_feature 1..2: note = core
  misc_feature 3..87: note = LE
  misc_feature 88..1122: note = CDS
  misc_feature 1123..1381: note = RE
  misc_feature 1148..1367: note = bridgeRNA
gatggggtggatggctcctgctcacggcatcacagtgccaaattgtggaagcgatcaagcaaccacgagccaaaggagccatccgctatggaaattaccacaattggccttgatctggccaagaatgtttttcaggtccatgccgttaacggcgccagtgaagttgttgtgaagaagacgttgcgccgtgtgcagatgcgaaggtttttcgagcagctcgatccctgcctggtcggcatcgaggcgtgcgggaccagccactactgggcgcgcgagattaccaggcttggccacgaggtgcgtctgatgcctccggcctacgtgaagccttacgtcaagcgtgggaagagcgatgcgagcgatgccgaggcgatctgcgaggcggtgacgcgtcccacgatgcgatatgtcgcgatcaagtcgcccgagcagcaggcggcgctggcgctgcaccgcacgcgggacctgttcgtcaaacagcgtacccagctggtcaacatgatccgcagcctgctggcggagttcggcattgagatcccccgtggcatcgggcaggcgctgatgctcgccaaacgcatcgctgcggatgacgtgccgaacataccgccactggcctcaaaggtgatcgcaggcttggctggacaggtcctggatctgcaggcccggctgcgtgagatcgaactcgaactactggcctggctgcgctcgaacgacatcgccaagcggcttgcaacgatcccagggatcggaacggtgtgcgccacagcgcttgcggcctctgtcaccgacccgcatcagttccgttccggacggcagttcgccgcctggctgggcctgacccctttacagcattccagcggcggcaaagaacggctgggacggatctcgaagatgggcgacaagtatctgcgacggcttctcgtcgtcggcatgacttcgctgatccggcgcgccaagtacaagcccgaagccgtcgatccttggctcgccggcctcttgtcgcgcaagccggctcgtctggtcaccgttgcgctcgccaacaaggcggcgcgggttgtctgggccatcatggtgcgtggtggcgtttatcgtatgccggcaggtgtcgcgacacccctctgacggtatacccagccgaacaccaacccagaggttgcgaggacgatgcgatgtgatggcgaaccggtcagactggggatgaggacaacccgccgaatgtcgagggcgtcacagcccgataagcagaatgggaccttatccgtgcataccatcagggccagcggtcatgtacaccgcagcaacaggccgaacacaagactgcacccgaccaccacgccaaaacatcaatttaatccttgcaatgcgggagccatccacacag

SEQ ID NO: 7082 - DNA, 1300 bp, unidentified
  source 1..1300: mol_type = unassigned DNA; note = element_afc9256
  misc_feature 1..2: note = core
  misc_feature 3..180: note = LE
  misc_feature 181..1143: note = CDS
  misc_feature 1144..1300: note = RE
  misc_feature 24..193: note = bridgeRNA
cttgtgtcggcaaaaactggcagaatgtgcgaacgggcggaaccgcccgttgctggaactgagcccgtaacgccccaaagcggcagagcctgtatgagagcgagggacagctccggtgtcttcctcaacccgaacagttgcaagggccgttgagcccgtaccgagcaaggaagggagtggatgatggcacaaaatggtctcgttgtcgtcggcatcgatgtagcaaaggacaaggtcgatgcgtgcattcgcgagttggcgctgcggcagacgtatccgagcactgcccagggtcatcgcaagctggttgcctggcttcgcaagcacaaggtgaacagggcggtgatggaggccagcggcggctatgagcgcgattgggggaaggtgctccgcctggccggcatcgccgtacggatcgtcgaccccaagcgagtccgcagctttgcgcagtcggccggacgcctggccaagaacgatacgattgatgcagagatgatcgcttggttcgcagagacgttcagcgaggcgccgggccaagtgcacgatgccgcgcgcgaagagctgcaggcgctggtgaaagctcgtctcaatctggtcgatctcaagatacgactggaagctcaaaacgagcatgctgcaccaggacaggctcggaaagcgcggacccgtatcttgaagagcttgctcggggaaattgccaagctcgaagtcgcgatctcggcccaggtcagggccacacctcatcttgccgaacgcgccgagatcgtcgagagcgtgccgggctttgccgaaacgagctcagcgaacctcattgctggaatgccggagcttgggcaagtgagcgacgagatcgccgcggcgttgttaggcgttgccccttatgacgatgatagcggaaagcgccgcggcgaacgccacatcaagggcggccgccgttgggtccgaaacgccctctacatgccgtgcctcggcgcggccacacagaacaatcctgtcttcaaggcctactatcaacggctacttgccaaggggaaggagccgaaggttgcgctcgtcgcctgcatgcgaaagctgatcatcatcctcaacacaatgatcgcacgccggcagaaatgggatcccagccgttacgcactgaattgagcgagcgcacttcaccgcgctcggtcctagaccgagcgcatgcctagccaacagaccggggagcggacggcgtcaaggccgtaagccgccgaaggcgggggcgcgcctcgcgccagccttgaggccagccgatcaccggtctacttcagcacagttg

SEQ ID NO: 7083 - DNA, 1662 bp, unidentified
  source 1..1662: mol_type = unassigned DNA; note = element_afcae56
  misc_feature 1..2: note = core
  misc_feature 3..292: note = LE
  misc_feature 293..1567: note = CDS
  misc_feature 1568..1662: note = RE
taatctccattccgccgctttgcggcggcacaaatagtgatgaaagatttctctttcccctacactgtgcaataatagtttcaagaagctatactacaaagcacgggaggaggagttgtagaaacctttctcgttttaagacagcatattaatcagtgtaagttctgccttttcaagcacaaatgagtggcatcacgaatccgtacactaagaattgtttaaacgccttggtttaattgtgtggcagttcagtcaatggcttcttatctttttacgaaaggagcgtttgcttatgaaagtcacttttcaaacttgttgtggcgtcgatgttcacaaatcttttctcgttgccacaatcattaaaacatctagcggcattgaaccttcctatcagaaaagacgtttttctactttcaacaattctattcttgaattcaagaagtggttgcttgaaaatgaatgcctctatgtctgcatggaatccactggtaagtactggatcccagtcttcaatattcttgaagatgaaatcaatgttactattgctaatcccaagtgggttaaagctgttaaaggtaacaaggatgacacaaaggattcgaaatggattggagatttgttccgtttaggactggtaaggggcagttatataccttgcaaaaaaatccgtattttacgtgaatttacaaggtatcgctacaagcttgtttcctgccgttccagtgaaaagaatcggtatcagaatgcgcttactgtttgtaatgtcgcattagactctgttgtttccgatatctttgggaagtcatccacatccatcattgactaccttttagagcagtctggaacttctattgaccatgaagtgattgcatcaaaacttcttaagcgcctcaaagctaaagaagatgctgttattgaatccattgaaggatatcagatgactgattcccaaaaatatcgtatgcacctcgtccgtgcacatatggattatatcacagctgcgatcaatgatgtagattctgaaattgaatctttaatcgcttctgatcctgattatgaaaatgctgtcgagttactctgtaccattccgggtgttaaatatgatagtgcaatcaccatcatctccgaaatcggtattgatatgtctcaattctgttcctctaaacgtttatgttgctgggctggattaactcctggcagcaacgaatctgcgggtaagaagaaatctgttcggattacacgtgccggtgtctacctcaaacctgcattagtacaatgtgcccatgcagccgtgaaatctgacaaatccccttactacaaaaagaaatacgaatctcttgtaaaacgtcgtggtaagaaacgagctatcattgcaatcgcaagaatgattcttactgctatctatcagatgctgtctactggcgagcagtggaatccgagcgacctttacaaagttgatatgcctgaagctttactggaaaagcagaagcaaaaggcaatcaaacaagctcagaaactgctaattcgtgaaggtttattgcctccaaccgaaccaatagcttcttgatttttgattactacatattgctttctaaaagttgcctttacaggtaacttgtttcagtgcgtcactttttggctgccctctactttctttcacac

SEQ ID NO: 7084 - DNA, 1185 bp, unidentified
  source 1..1185: mol_type = unassigned DNA; note = element_afcb3f3
  misc_feature 1..2: note = core
  misc_feature 3..210: note = LE
  misc_feature 211..1170: note = CDS
  misc_feature 1171..1185: note = RE
  misc_feature 23..209: note = bridgeRNA
cttgtatcttggcagtcggtagagtttgcagacattctgatcggggcgccagctcgatgcggtctaggtggcaaacaccgttcgttagccggagcggtgctctgatcgtccgtcgcgagagcccgaacagttgcgggggccgaccgttgggtcgagcccgaattaccacaaggatgggccagggcgacgctcaccgcgaccggaggaagcatgttcgtcggcgttgatgtggccaaggcggaactggtcgtcgctgtccgtccgggcggtgcgcggtggacggtcacaaatgacgaacggggcgtgcggacgctggtggagcgcctccgcgaggtgcccccgaccctgatcgtgctcgaggcgacgggtgggtacgagctgcttggggtcgctgcgctcgcagccgccgagcttcccgtggtcgtcgtgaatccgcgccaagtgcgcgacttcgcgaaggccaccggccagctggccaagacggattgcctcgacgccgacatcctggcgcgcttcgccgagaaggtccgccccgcgctccgcccgatcgccacggcggagacccaggaactcgacgcgttgctcacgcggcgccgccagctgcttgagatgctcggcgccgaacgcaatcgcttggggcaggtcttcggcaaaggcaaacgaccagtgaagaagagtctcaagacgcacatcagctttctggagcgggaactccgcatcgccgattccggcctggacgatgcggtgcggcgctcgcccgtctggcgcgagcaggatgacctcatgcagagcgtaccgggggtcggcccggtactgtcgcacagcctgctggcggatctgcccgagctcggccggctctcgcggcgcgccatcgccaagctcgtcggcgtggcgcccctgagtcgcgactctgggacgttccgcgggcgccgcttcgtgcagggtggtcgtgcccccctgcgtggtgtgctgtacatgggcgccttggtcgccgcacggtggaaccccgtgattcgcgcgttctaccttcggttggtcgccgccggcaagccgaagaagctggccttggtggcgtgcatgcgaaagctgctcactatcctgaacgtgatggtccgaacgcagacgcggtggtcgatgcaggccgcagtcccaacgctcgtcggcacttgactttccagacagttg

SEQ ID NO: 7085 - DNA, 1186 bp, unidentified
  source 1..1186: mol_type = unassigned DNA; note = element_afd64aa
  misc_feature 1..2: note = core
  misc_feature 3..209: note = LE
  misc_feature 210..1181: note = CDS
  misc_feature 1182..1186: note = RE
cctgtatcctttcttaagaagcgttacaatgttttctggagacgatcgtgcttgccttagcttcgagctactggcggggaatatcgctccaatacttcaccattcgcctattgctggttacgccttcgagcgtacgaacacctacaggcctgcgattggtttctttcttctcttttctcttctttctttgacaacttaacatcaccccaatgaaccactcaatcggcattgatgtgggaaaggcggagctggtcgcatgcatcagggcttctgatggcaaaacggcgattccagctccctttcccaattccattatcggactcaaaaagctcattgtccacttctcgaaaaacaacatcggcactgacgaccccatactccttgagtccaccggaccgtatcactggaaagcggcacgaacgcttaccgacaagggctacttggtgaaagtagccaatcccttgcacaccaagcagatggcgcggcactctatccgcaaacgcaagacggacaaagtagatgctgggcatctctcgttcctcgcttcgcaagaatacggctaccgcttcgtcgagacggaggagatggcgcggaagaaagcactggtgcggcactactggaaactgcgactgaccgccaccaatcactccatccatgaacggtatctcaaagagtatcgcggcattggcacccactctatatccgacctcatcttgaaaaagtgcgagaaactcaagcaggaaatcattgacgaatgggacaagggtaatgacgtgaagtacctcgactcgattcctggccttacgccctttctcgccattaccattctagcggagcttctgccgattcagcgcttcgagcgcattgaccagattatcgcctatgccggactcgacccgtcggtgaagcagaccggcggcaagaaaggggcgcacggagcgatatcgaagcgcggctcgcctaccttgcgggaagctctgttcctcgccgcctttggctcgttctccaaacaaccgatgaaaacgctgtatgatcgttacaaagcacggggactccatcacaacactattctctgcatcatcggacgaaagattctgcgcatcgccgtatcgctcctcaaaaagcgcagaatgtttgacccgagaaagctatccgcagtacaccatttgacggggacataactggt

SEQ ID NO: 7086 - DNA, 1646 bp, unidentified
  source 1..1646: mol_type = unassigned DNA; note = element_afd95bc
  misc_feature 1: note = core
  misc_feature 2..227: note = LE
  misc_feature 228..1520: note = CDS
  misc_feature 1521..1646: note = RE
cctgttacaataaatttgtctctgagatatggtaaccagccataagcaagggacatctcgttgcctaagctgtagaatgggaaggtaatggtctgacctattcctccaagggcttttatgtccgtacgaaagtcagtcagtcatcctcccgttcgcagtgttcgatttgtgcaggttgagtctgagtgttcgcgtcagcaaacagatggaatcggcaatgggaaaagatggccttcatccattgcaaattgattctgggagtgttgagcatgaacgcagtaggtattgatatttccagcaaaaagagcaccgtagcagtactccgtccttttggtgaagtagttcgagttccctttgaagtgagccacagcgctgagggccttgccagcttagtccagcagttgaaagcccttgacggcgcaacccgcgtggccatggagcacactgggcgttactacgaagccgtggccaatgcgttatatgaggcagggttcttcgtcagcaccgtcaatccactgctcatcaaggagtatggtggcaactctctacgtaaggtcaaaacggataaagctgacgctgtgaaaatcgcccggtacgcccttgacaactgggctgagttgcgggattatactcctatggaccggattcgttatgacttgaaaacccttaatcgccagttccatctggcctccaagcagaaaaccgccacttccaacaatttgattgccctgttagagcagtctttcccctgcgtccgcaagtgctttgacagccctgttcgcagggatggaacccagaagtgggtggacttttctcatgatttctggcacgccgactgcgtccgaaaacacagtttggctgcctttacggaacgttaccacaaatggtgcaagcgccacggctacaacttcaagcagagtaccgcgcagaaggtctatgacttggcaaagtccgctgtggtgctggtgtccaagggaaacctgaccaaggtgctggttcaggaagccgccaaccaactcaccactatttccaagtctgtggagacttaccgggctgagatggaccgcctggcttcccatctgccggaataccccgtggtgatgggcatgtacggcgtgggagactccctgggtcctcagctcatggcggagattggagatgtgcgccggtttgagcggaaacagtctctggtagcttttgccggagttgaccccatacccaaccagtctggggagaaaaacgtccgtagcaacaaatcctccaagcgcggttcacctcacttgcgaaaaacgttattcaatgtgatgacctgctgcttacggaaggcgccggcagacgagcccatattccaatttctggaccgcaaacgcgtggaaggtaaaccttattacgtctacatgaccgccggggccaacaaattcctccgccgctactacggcaaggtcacggagtatttctccaatctggaggatctgccgccggtggatatggactctaccgggttactgaaacgtcaatagtctctttctgacttctcaggccgacgctgagcggcggcctttttgtgttgctcatttttacccttcctctctctgcatattttcttctgtcaactcatcttaggggcttgattttttatttgcagg

SEQ ID NO: 7087 - DNA, 1377 bp, unidentified
  source 1..1377: mol_type = unassigned DNA; note = element_afdcbc7
  misc_feature 1..2: note = core
  misc_feature 3..89: note = LE
  misc_feature 90..1106: note = CDS
  misc_feature 1107..1377: note = RE
  misc_feature 1077..1363: note = bridgeRNA
agatgggatggttgccgtcctccccgaacggcatcgcgatgtgccaacgtgttggttgagaaacagccacgaaagagagaggacggcatatgaaggatacgatgattggcgtggacctggcaaagtctgttttccagattcatgcggcttcactgacgggcgcattggcgttccgcaagaagggccgccgccgacaatttctccagttcatggcgagccagccgccagcgttggtggtgatggaggcgtgtggcagcgcgcattactgggcgcgtgagctcacgaaggccggccacgaggtgaaactgctcgctccgcaatatgttcgcccattcgtcaagcgccagaagaatgatgccgccgacgcggaagcgattgccatcgccgcccggcagccggaaatgcgctttgtggcgccgaagagcgaagatcagcaggcgcgcgctgttttgttccgctgccgcgaccggctggttcaccagcgcaccgaactggtcaatgccctgcgtgccacgctttatgagttcggcctggtcgtgcccaaaggcatcgcccatctcaggcgcattgaagcattcgtcgcagacgagagcgtggagattccgacgctcgtccgaagcgagtgtcgagatcttctggagcagatcgacgaacaatcggttcgcattaaggaaaagacccgcgccatggcgggactttcggatgaaagtggtgttgcacagcgcctggagacgatgccgggggttggaccgttgacggcgctggccgtggaggccttcgctccgtcgatggagactttcagcagcggccgcgacttcgcggcatggctcggtcttgttccccggaagttttcgtccggcggcaaggaacggctcggccgagtctcgaaggccggccaggccgatatccgacggctgttgatcatcggcgccatggcgcgcgtgaactgggcgagccgcaagccgcccgtgcctggcagttggctggcgcgcaagccccgcatgctggtggctatcgcgctggcgaacaagatggcccgtacgatctgggctatgctgacgaagcaggagaattatcgggatccggttctgtccgccgcggcatgagatgaccgcagtcgcgcacgaacggaaccggtaagggagtgtgagaaggcgacgacccatatgggcgcatgatcgagccgatccggatcaggaaaaccagttgactgctccgtgccgttgagcacgcacgtgagatttggacccgatccgcagatcaccatatcggccagcggcttctgacaagcggcgttcacaggcctgacagaagaccgcattcgatcactcgtccaacaggtcagatacttcttgcatcacggacggcaaccacaga

SEQ ID NO: 7088 - DNA, 1536 bp, unidentified
  source 1..1536: mol_type = unassigned DNA; note = element_afe937c
  misc_feature 1..2: note = core
  misc_feature 3..264: note = LE
  misc_feature 265..1515: note = CDS
  misc_feature 1516..1536: note = RE
  misc_feature 6..240: note = bridgeRNA
ctaatgggggtgcaccgaaggccctgtgggcaagactcggtgtccgagccgccggcgggtgagcactgcacggccccggccttcgaggtctaggtctagatcgtgcccctgctggttggtgaggaggcttggatggctggtgggatgtcgtgccgggctcgcctgtgggtgggtggagcactgatccattaggtcgctgctggtctcctccggggctcaggctggtgtgcgtctggtgatcctgctggtgatcgtggaggtgtggtgctgttcgtcggtgatgactgggccgaagctcatcacgatgtcgagctcgtcgatgaggccgggcgggtgctggcgcggcggcggctgccggagggtgtggtgggtctggagcggctgcatgccttgatcggtgaccacctggctcaggacgatgagccgggcgatgtcgtggtggggatcgagaccgaccgtggcccgtgggtgcaggcgctgatcgcggccggctatgccgtgttcgcgatcaacccgttgcaggccgcccggtaccgcgagcggcacgcagtgtccggggcgaagtcggacccgggggatgcgcatgtcctggccgaggtggtgcgcctggaccgggcccatcaccggccggtcgccggggactccgcgatcgcagaggaggtgaaagtcctggcccgggtgcatcagtcgatgatctggtcccggcagcggcagaccaacatgctccgctcgatgctgcgggagttctaccccgccgccctggatgccttcaccggcgacggcgccgaggacgaagggctggccgggcgtgatgccctcgcggtcctggccatcgcccccgggccgcagcagggccgggccctgtcgctgtcgaagatcacctcggcgttgcggcgggccgggcggcaacggaacgtcgaggcccgcgccgcagcgatccaggccgcgctgcgcaccccgcagctggccgcgcatccgggtgtggtcggcgcctacacggcctcggtgcgatcgctggtcgcggtcatcgccgagatcgccgtccaggtcgcagcgttgcagggcgaggtggaggcgggttttggccggcacccggacgctgagatctaccgcagccaacccggcctcggtacggtcctggcggcccgggtgctggccgagttcggcgacgacccgcaccgctacaccgacgcgaaggcccggcgtaactacgccggcacctcaccggtcacccgcgcctccggcaccaagcgagtcgtcctggcccggcacgtccgcaaccggcgtctggccgacgccctctaccagcaggccttctgcgccctcaccagctcacccggcgcccgcgcctactacgacaagcaacgagcccgcggcgccacccaccaccaggccctacgcgccctcggcaaccgcctcgtcgccatcctgcacggctgcctgcgccaccacacgccctacaacgagaccctcgcctgggccaaccaagccaagatcaatgaggctgcggcttgacacgttagacccgtgggatgt

SEQ ID NO: 7089 - DNA, 1221 bp, unidentified
  source 1..1221: mol_type = unassigned DNA; note = element_afe9818
  misc_feature 1: note = core
  misc_feature 2..411: note = LE
  misc_feature 412..1197: note = CDS
  misc_feature 1198..1221: note = RE
  misc_feature 55..213: note = bridgeRNA
accttagatttgcatccgaggattacagataaaatagaaaggataaatttgtaaagcaaagaaagaatgcaggaagtgaaccggcaatcaatacggaaagaacaagttccattttcataagcggacttcctgcttgtttgaatccagacccggatagtaggttaacatccattgttaaggtagttaggttaagttcaagccctttctttcctaaatcattaaaagacaaaagtatggaaaatttttattttatcggtgtggacgtgtcgaaaaagaagttagacttctgcgtgatgtttgaaggaaaggttgtgcatgaagaagaaactgccaaccatcaaagtgcaataatgtcgttgctgcatcattttgaagaagattacggaatagacaacacccgaatgcttgtctgtgcagagcacaccggtcaatatacgttccctttggcttgaaaatgcagcggaaatcaaatactcctccggtgtacagaggggtaagaatgacaaggtggatgccaagcgtattgctatctatgccagccgatttcaggataaggtgcgctattacgagcatcccacagaggatattgaaaggttaaaacaacttgaatccgaacgtactctgtatgtgacggatttggccaaatataaaggacagatgaaagaccagaaagactatatgcccaaagctctgtatgaacgcaagatgaagcgtttgcaggcattgatggatgacttgaaggaagccatacaagccattacggacgagatggatgaagtgatagcttcctgtcctgtattgttcagacagcaagaattgctgatgtccatagatggcgtagggcgtgtggtagcaaccaacatgataatcgccacggaagcctttacccgttttgatgatccgaggaagttcaattgttatgccggagttgctccatgctcttattcttccggaagttcccaacactcgaaagcaagagtgtcgcatcgggcagataaggtgatgaaaagacttctccacttagctgccgtagcggtaacacaccgggtcggaggcgagctgaagaagtattacgaaagaaaagtcgccgaaggcaagaacaagatgtctgtaatcaatgcgttaagagtcaaaattgtagccagaatgtttgcggtcatcaaaagaaacgagaaatataaacctattttatcataaaaaacttgcaaaaatcatagtagt

SEQ ID NO: 7090 - DNA, 1361 bp, unidentified
  source 1..1361: mol_type = unassigned DNA; note = element_aff5f07
  misc_feature 1..2: note = core
  misc_feature 3..72: note = LE
  misc_feature 73..1098: note = CDS
  misc_feature 1099..1361: note = RE
  misc_feature 1074..1349: note = bridgeRNA
tgatggagtggacgccccaacggccctggtgtgccacagtggaggtgttgatcatcacgtcaggaggcgtccatggcagaggtttgtacgatcgggctggatttggcgaagcatgtgttccaggctcatggagccgatgcatctggagcagtcctgttccgcaagaggttgcggcgggctcaggtgctatcattctttgcgactcagccgcccggtaccgtggctatggaggcctgcggcagcgcccttcactgggcgcgcgagatcggcaagctcggtcatgccgtgcggctgatcccaccggcttacgtgaagcccttcgtcaagcgccagaagaacgatgccgccgatgcgcaagcgatctgtgaagcggcccagcgcccgaccatgcgcttcgtggcgcccaaaagcgagcaggcccaagccgccgctctcgtgttccgggcgcgggatctcctggtgcggcagcggacccagatcatcaatgctttgcgaggtcatctggccgagttcgggatcgtggtggcccaaggaccggcccatgtctcttcccttgtgcgggccgtagaggacccggctgagccggtgccggagatcgctcgtgccatcctgtcggtgctaatcgagatgctgcacaggctggatggcaggatttccttgcttgatcgcgagattgcccagagggccaaggaggatgtaaccgcacgccgtttgatgacgatccctggagtgggtccgatcactgcaacagccttgacggccttggcgccgccggccgagacgttcaagcgtggacgagattttgccgcctggatcggcttaactcctttgcagcattcgaccggcggcaagcagaagctgggggccacctcgaagatgggcgagcgaactctacgtcgcctgctgatcatcggggcgagtgctgtcctgcgctgggcggcccgtcatggcgcaccagccggatcgtggctgtctcgcatgctggcccgcaagccgccgatgctggtgcgggtagcattggccaacaagatggcccgcatggtctgggccttgatggccaaaggtggggactaccgagctccggccgtgagcgtgtaagcgctcgcgtccgtggggctgttggaggcgtaggaaagtcgaaggggagagatggcgcaacggtcgatgagacgggatcaggaaaaccagagtgcaacagcgtgccttgagcacgtgaccgtgagttggacttgatccgcggacttccatccgggcccgcggcatgtgaatggccgcagacgaggccgcacacatgtaagcactcgccgacgcactacaccgaacctaaagatttctcttgcgtcacctggggcgtccacaca

SEQ ID NO: 7091 - DNA, 1348 bp, unidentified
  source 1..1348: mol_type = unassigned DNA; note = element_aff69fe
  misc_feature 1: note = core
  misc_feature 2..69: note = LE
  misc_feature 70..1095: note = CDS
  misc_feature 1096..1348: note = RE
  misc_feature 1103..1338: note = bridgeRNA
tatgggttggcccgcccctctccggagcgatcggttaggatcgttctgaaaagagagaggaacggaccgatgttgattctcgtgctcggaattgatcttggcaagaacgtttgcagccttgtcgggctggatgaggctggcgctgttgttctacggcgacgccttcgtcgcgaaggcgttgcgcagttcgtcggtaagctaccggcttgcattgtggcgatggaagcctgctgcggtgctcattatctgggccgcgtactcggtgcggctggtcacacgatccggctgatgtcgccggaatatgttcgtccttatgtgatggcgaacaagaatgacgaccacgatgccgaggcgatcgcggaagccgcgacgcggccgacgatgcgcttcgtgccggtaaagagcgagccgcaatcggacatccaggccttgcatcgggcgcgctcccgtctggtggcggaacgcacggcgctgatcaaccatttgcgcgccctgttgctggagcgcgggatcgtagcaccgaaagggcggaagcagttggaagcccagttggtcgcatttgcggacgagtacgatatccgactatcaccacgcatgcgccggcttattgaggacctgcgctccgaatggcgcagccttgatgaacggattgccgcctccgatgccgagttcgtgcaaatggcgcgcacggacgaagcggcccgtcgcctgtcgatgatcccggggatcggcgttatcaacgctactgcactcgttgccgcggtcggcgatgcccggagctttgggcgcggtcgtgaccttgccgcctggctcggcctgacgccacggcaggcgaccatcggaggcaagccgcgactgctcggcatatccaagcgcggcaaccgatatttgcgcgcgaacctgatccacggcgcacgtgcggtgctgccgcggatcgcggctcaggacaccccgctcggctgctggattcgcggcctgctggagcgcacgcacaagaatgttgtcgtggtggcgctggcggccaagctggcccgcatcgtctgggcggtgctgcgaaaggagcaaggcttcgatccgaagatcgcggcggcatagggaagtcaaggtcttcggccatagagctggagccgcaactatctgcgagtggtgagaagaagatggcctgacagtcgaacggcagcttggaaacctggacccagtgaatggtcgatcgagaccggtgtgattatgaggaccaggctgcgcggatctccatcttggccggggtacgaccccgagaccggatacgttgacgcagactgaataggacgatcttcaaataccccttgcagacggggcgggccattcg

SEQ ID NO: 7092 - DNA, 1367 bp, unidentified
  source 1..1367: mol_type = unassigned DNA; note = element_affbffd
  misc_feature 1: note = core
  misc_feature 2..67: note = LE
  misc_feature 68..1105: note = CDS
  misc_feature 1106..1367: note = RE
  misc_feature 1116..1358: note = bridgeRNA
tatgggatggccgcccctccttccggcgtcgtagcttcgccggagattcttttgaaagggacggatcatgaagaacgttcaagtgcttggcatcgatatcggcaagaatctgtgcagcctggttgggctcgacgaaaaaggcgccgtcgtgttgcgacgtcgagcaaaaagggagacgttgatcgctctcgctgcgaagctgtctcactgcgttgtcggtatggaggcttgttgcggcgctcactggctcggccggatatttgcggcgcatggtcatgagatccggatgatgccgccggaatatgtgcgtccttacatcaaggcgcagaaaaatgacgatcgggacgcggagggcatcgcagaagccgcgacacgtccgacgatgcggttcgtcgagctgaaaacgcaagaacagctcgatcttcagacgctacatcgcgccagggagcgcctcgttggcgagcgaacagctttgataaatcagttacgaggcatcctgctcgaacgcgggatcgttgcgtcccaaggcaggcgcaaattcgaacagcggctcatcgaaattttggacggggaagaaggaaactcgttaaacggccggatacgatcgctcatcgaagacatgcgggcgcaatggggggagctggatcaaaagatcggcgctttcgatgcggagttcgtcgccttcgccaagcaaaacgacgaagcgcgccgattgacgacaatccccggcgttgggccgatcatcgcctccgcactcgtcgcggccgtcggcaacgctgacgccttcgaacatggacgtgatcttgccgcctggctcggcctcgttccccgacaatcgacgacgggcggcaggccaaggctccttggcatcagcaagcgcggtaatgtctacctgcgcaagcagttgatccatggcgcccgctccgcgttgcagcacttcgtcaagcaggacaccgcgcttggacgttgggccaaggcgctgctcgcccgatctcacttcaatgttgcagtgaccgctttggccaacaaactggcgcggattgcctgggcggtgctgcgtcacggccatacgttcgcgacgcaggaggtaaaggtcgccgcgtgacgcagtttggcagttcggcgtctgggatgccgatcggccgatgaggtttgcgggtggttgaaatcgaagatggccaaacagtcgaacggcgttcgggaaacctggttgagaggatggcgcctgacgccgcccccattatgaggacccggacgcgcgtatctccatcttggccggatcagctttgcatccaggccggatacgttgaagcagactgaatatcggcgctctcgataaagctgcttgcagacggggcggccatacg

SEQ ID NO: 7093 - DNA, 1330 bp, unidentified
  source 1..1330: mol_type = unassigned DNA; note = element_affc1c7
  misc_feature 1..2: note = core
  misc_feature 3..1070: note = CDS
  misc_feature 1071..1330: note = RE
  misc_feature 1107..1317: note = bridgeRNA
ttatgggatggacgcctcccgcaatcgggccgagcatgttgcagcagcaaccggcaagaggagttcatcacattcaaatattggcaatcgatttgggcaaacagtcctttcatatctatgggatcactggcgatggcgaagtggtttcgcgtaaggtcagcagggcaaagttgcccgatgcggtgaccaagttgcaaccgcaatcggtcgcgatggaggcttgcgccagttcgcaccattgggggcgggtattcgaggagctgggatacagggtacacctaatccatccacgtttcgtgaagccattcgtgaagggctcgaagaatgatgcggtcgatgccgaagccatttttgaagctgctaacaggccgacgatgcggttcgtgccgttgaagagtgtcgagcagcaggatctgcaagccctacaccgaacgcgcgacagactgatcgtgcagcgcacagcgctgatcaatcacactcgcggccttttggcggaatatggtgtcgtcatgccggtaggtgcatcccgattccggcgtcagatcgacaagatgatcgagactgccgaactgtcggacctggcgaaaaacctgtttctgaagctggccgaggagtatcgcggcttagactccaaggtctcagccctcgatgacatgcttgctgagatttgccgggaggatgagcgttgcaaacgcctgactacactacccggagtggggccgattgtcgcaacctccctagtcgccgcaattgatgatggccgacatttcgcatcgggccgagccctttctgcctggattgggctggtgccgcgccaatatacgaccggcggaaagccaaggctcggtggtatcgggaagagagccaatcattacctgaggcgccagctaatacatggtgcacggtccgcgttgctgcgggtcgctaagcatgacgaccgacgttcaaaatgggcgcaggaactgcaatcgagggcgggccacaacaagacactcgtcgcgatggcgaacaagaccgcacgcatggcttgggcgatgttgcgaagcggcgaaaactacaaaatggcctgaccgttcggaagcgggccacagtctgatcagaagttacgaatgcgaggtggaagacttgatggtgtaacggcacggaccgccgcttcacagcctgcaaggaacgatggctttcgaggccgctcatcttaaaaggcactgaaacgagcggattcccatcatggccaggggcaagtctgcctcaatcaataggccggatagattcacgcatccaatgccggagcaacatcgagaaatcgccttgcgcgggaggcgtccataga

SEQ ID NO: 7094 - DNA, 1351 bp, unidentified
  source 1..1351: mol_type = unassigned DNA; note = element_b003356
  misc_feature 1: note = core
  misc_feature 2..74: note = LE
  misc_feature 75..1100: note = CDS
  misc_feature 1101..1351: note = RE
  misc_feature 1118..1348: note = bridgeRNA
taatgagatggtcaccctccaccctaaaagttactatgcttatagggtttcgtcctttctgaacggaggtcatcatgcaagacgttacgctcatcggcatcgatctcggcaaacacagcttccatgtgcacggccaggatcggcacggtaaagccctgctgcgcatgaaattcaaccgtaagcagttgatcgagttcttcgccaagttccacacttgtactgtggtgatggaagcctgtgccggcgctcatcatatggcccgtcggctggctggctatggctacgaggtaaagctcatctcgccacaatttgtccgtcccttcgtcaaaagcaacaagaacgacttcattgatgccgaagccatttgtgaggcagcgtgccgtccgtcgatgcgtttcgtgacaccaaaaactgaatctcaacagtgcctgtccgcgctacaccgtgtgcgcgagtcgctggtgcgcgaacgtgtcatggcaagcaaccagattcatggattcctgctggagttcggcatcagtttgccagtcgggcatgctgtgatccggcgcttgccttccgtgctggcagagcaggctctgccagcacggctgagggtactgcttgaacgactgcacagtcatttcagctatctcgaggagcggattgccgatatcgagaaagagttgaacctgcagttgcaggatgacgacctcggtcagcgcctgatgacgataccgggagtggggccgcttactgccagtgtgcttgctgccgaagtgggcgatggcaagcagtatcgatgcggccgcgactttgccgcatcggttgggttagtaccgcggcagtacagcacgggcggaaaaaacaacctactcggaatcagcaaacgcggcgacaaacacatgcgacacttacttgtgcaatgcgcacgagcatacatgctgcgtttggaacgccagaccgacgggctggctcaatgggtgcgctccatgctcacgcgacggcactcgaacgtagtcgcctgcgcccttgccaacaagctggcacgaatggcctgggctatcgctgcgcaccatactgaattcaaacgacaagaggctgccagggtaacttgacctcttgagtttgcttatcaacacctacctggttttgcgactgctgaaattggatgacgtgaacggcacaccggcctgacggataccctgaacaaaaaaacggctttgcaaagccgaaccactttttaggaccgacaggcgcgaattctcatcatggcgcggagcaagtcttcaaaatgacgccggatagatttgagcaagccactactgcatacaaaaatcagggttgcaaaaaggagggtgaccataga

SEQ ID NO: 7095 - DNA, 1210 bp, unidentified
  source 1..1210: mol_type = unassigned DNA; note = element_b003f5b
  misc_feature 1..2: note = core
  misc_feature 3..208: note = LE
  misc_feature 209..1195: note = CDS
  misc_feature 1196..1210: note = RE
  misc_feature 12..190: note = bridgeRNA
cttgtatcttcccctgcgtggtgattagctatctccacacggaacgggaggcagcttgtacccgcccttaaggctagaccttgttgcgtagaccaagacctcctgttccactttctcaccgaccagacactgaacggtagccaagggctttgaccctgcatgtacaaggcaagtgggtgagttggccaatctcttcggggagcgcctcatgttttacatcggatcggatgtgtccaaggctcgcttggactgctacttgctgtcggttgatcaagccaagggcaagagcaaggtcgtcagcaatgatgccaagggctgcgcggagttggtggcttggctggcgaagcacggtgtgttgcccgcttcggcccatattgtgatggaagggacaggggtgtaccacgagcgggcggcgttgacgctacatgaagccggcttggtcgtttcgatcgtcaatccggcccagatacgtgactttgccaagggcttggcgattcgcaccaagaccgatggtgtcgacagcatggtcttggcgcgctatggcgccctggtgaaacctccgcgctggcagccaccgcccgtgacggtgcggcagctacagtcgctgctggcccgccgggaggcggtcgcgcaggacctgcaacgcgagcgcaatcggcaagagaagagcgaagtcgcactagaggcagcactggtgcatgagtcgctgcacgactcgattgccttccttgaacagcaactggtcaagctgcagcgagaaattgatgaccacatcgatcgctatcccgatctgaagggcgacttggcgctgctgcaaagcatccccgcagtgggcccacaagtgagccggaccatgctggcggtcatccacagtcattcattccgctctgccgaacaattggctgcattccttggtctggtgcccattgagcggcaatccggcagctcgctatcaggtcgcgcacggctgtccaaagcggggccggcaagagtgcgggcaacgctctatatggccgccgtggtggccatacgccacaacccccacgtgcgggccctgtatgaccgtctcctcttgcgaggcaaatcgaagatggcggcattgggtgccgccatgcgcaagatcgtgcacctttgcttcggcgtcattcacacacaacaaccgtattcggcttcttggtcgccagctactgcttgacgttagagacggtat

SEQ ID NO: 7096 - DNA, 1649 bp, unidentified
  source 1..1649: mol_type = unassigned DNA; note = element_b004105
  misc_feature 1..4: note = core
  misc_feature 5..533: note = LE
  misc_feature 534..1508: note = CDS
  misc_feature 1509..1649: note = RE
  misc_feature 13..308: note = bridgeRNA
ttgctacaatggtgttggttctgagaagttcacagccagtgagctatacagatgcccaaacctaagctacaatgaagatgtgctgagagaacgaagcattgcttgagctgaacgctcgtacgcgcaaactgttctccgccatctccattgcagcgttcgattgacgcaggttgagttatcggcagaagaaaatgttgccgtacattcgtgtcacaaagcaagctgaatcggtaatgggcataggcggaaccggcattaaaggaggtcagaaaaatggaagctgctgttattaccgccgtcggtatcgatgtgtctaagagcaaaagcacagtcgcggtacggagacccggaggcgaaatcgcacttcggcctttcgaggtccaccacacgaacagtgacttgaaaaagctggcatccacactcaaaaaactgggcggcgatatccgtattgtaatggaacataccagtacgtactggagaccaatcgcactgacattgaaagaagcgggctttttgtttccgttgtcaatgcgatgctgatccacgattttagtgataatacgatccgaaagctaaagacggaccgagcggatgctcttaaaattgcaaactatgcgctcaccttttgggatacactccccccgttcaacaatgaagaagaaaccaggctacttcttaaaatgcaatccagagcaaatgagcgaatcactgcgactgcaacagcgttgcggaacggtctgattgcactggctgaccaaacatttcccggcgtaaatattgcgtttgatccgaacacaaaaaatgcaaatgggcatgaaaagtgggtggacttctttctacgttattggcacaaggattgtgtctgtcaatattccatggaggctttcacggaatcttatcggggatggtgcaaacgaaaaaactacaagttccgtacagataccgctcacaaaatctatctgcttgcacaggagggcgtggctactcttccgaaatgcgaaagtacgaagatgctgatcacgcaggcttgtaaaagcctgaatgccgtttgcgaggccaagcaaagcacccagcttgaaatgcagcggttggctacaatgctccccgaatacgaggttgtgatgcagatggaaggagccggacccattaccgggcctgctcttatggccgaaattggtgatgttcggcggttcaaaaacaagaaagcgttggtagcctttgctggtattgatgcaccaccgttccagtctggtgcatttgaatccaagtcacgccatgtttctaaacgaggttcaccgcatctgaggcgaaccatttttattgtatcgaatattattttaacacgctcaaacccagaaaatgctgtttactgctttatggacaaaaagcgttccgaaggaaagcattattacgtttataccgtcgcaggaagtgccaagttcctgcgagtctattacgctcgtgttactgaatttctgcgttcccagccatctcctgatgcctgttgatggtttctgatgaaccattgcgatgactttcagctgacaagctgtgctgtcggcttattaaagttgccggatgctcaactgcacccggcaataaatttttgatgatttatttgttcaggctattgacactcgttagcaggt

SEQ ID NO: 7097 - DNA, 1618 bp, unidentified
  source 1..1618: mol_type = unassigned DNA; note = element_b00c08a
  misc_feature 1..3: note = core
  misc_feature 4..249: note = LE
  misc_feature 250..1485: note = CDS
  misc_feature 1486..1618: note = RE
  misc_feature 8..224: note = bridgeRNA
gttcgtattataaggtcagccagatatttctggttgatcattttttaaatggttttattatagcagtagccagggtagaacgtaactgctcgtggggcttgaccccgtcaactaaaccgttcgccccctacttgcagaaacatgattgaggctggttgggacttagatctcgtataacaagcgaagctatgacactgcatggaggattaggggtaactggcaaactatgattctaggaggagattaataatgaatccagtcgttggtctggatatttcaaaaggtgaaagtcaggttcaagcattcttagataaaggcaaaccatatcgtaaaagttttaagggaacgcatactttagaaggtcttaatgaccttgttatatttttagaggatgtaaaaaatgaggctggtatgaagcctacaatcattttagaagctacaggacattatagtgctcctgtcatacatcatttagaagaacgagggtatttattgattattattaatccgttaatttcttataaggcaagaggatcgagtttgagaaaagtaaaaacggatgccattgatgcctatcttctttgtgaattgttctataaagaggaattagagccatataaaaagcgtggcgtgcagttattaaatcttcgtaatcttacaagacaacatgaaaatataactggcgtaatgattcaaactaagttgcaatttcaggcagtccttgaacaggtatttcctgaatataaaggggttttcggagatttatactctaatgtttcactattaactctttcagagttcccttcttcagaagatattttgaaagcaagtgaggaatccattacagacaaaatatatgaactatgtaagagtaggtccattagatgggcaaatgaaaaagccttacatcttaaagccgctgcagctcgtaatccttttgaaaaaacagtttaccagagtcatattttaagtctggatatgtatataaagatccttcttcagtacaaagagcatctatcaaagttagagtcagaaatagaaaccctcgctaaagaaattgaagaatatagtattatcaaatctatcccaggcatcggtgaaaagatcgctgcaacgattatttctgagattggtgaaatagatcgatttaacaaccctaaaaagcttgtggctttcgctggagttgacccaagtgttttcgaatcaggtaaattttcagcgaccaagaatcgaattacaaaacgaggttcaagtagacttcgtcatgccttgtttatggctgttcgttgtgcaatacgagattgcagaaaaactaaaacagacgatacaatcatccctcgaaacaagaaaatacgtaaattttatgataaaaaacgtgaagaaggaaaaccttttaaagtagcgataatagcttgtgttaataaactattacattggatttttgccttgttaaaaaacagaactacgtaccaagatttagcttgataagtaggtacaaccaaatcaaacaaaaccttccaaaaaacaaactttaggacggttatttgtcatgcacttttttagtatagcacgtgcctattaaacttttaacagaaaattattgacaaactattagctg

SEQ ID NO: 7098 - DNA, 1411 bp, unidentified
  source 1..1411: mol_type = unassigned DNA; note = element_b00da19
  misc_feature 1..3: note = core
  misc_feature 4..131: note = LE
  misc_feature 132..1151: note = CDS
  misc_feature 1152..1411: note = RE
  misc_feature 1168..1407: note = bridgeRNA
agatggtatgggcgcctccctcctggctcggcatgcttgccgacggcgcgcgcgataggtggatccaccggtcgcggcatcaacgtgccagagtggagatgcgactcaaccacagaaccggaggacccgtcatggagcttaacgtcgtcgcgatcgacatcgccaagaaggtgtttcaacttcattgggttgagcccgacacgggctgtatcgagaagctgaagctcaagcgcgcgcaggtgctggaatggttcgtcaatcgcccgccgtcgctggtcttgatcgaggcgtgcggcggtgcgcacgagtggggacggcagatgatgaagctcggtcatgacgtccgactcctgccgccgaagatggtgcgccccttcgtccagcgcaacaagaccgacgctgcagatgcccaggcaatctggacggccgggcaacaacctggaaccaagtttgtccccgtcaagaccgaagctcagcaggtcgtactcgctctgcatcggctgcgcgcccagttgatgaagatgcgcatcatgcagaccaacgagatccgaggcctgctctacgagttcggagtcgtgatgcccgagggccatcgagccttgctgaaggaattgcccgccgtgctgagtgacgcgcagagtcgactaccggcgatgttcatcgattgcttgaatgagcaagtccggcgagtcgacgacctgcaacgcgacatcgccgccatcgagagacgtctggcagaacacctgcgtgagacggtttcctgcaagacactggcggacattccgggagttggcctgatgacggctaccgcggtcgttgcatccatgggttcgcccgccgcgttcaaggacggccgagagttcgcagcatggctcggcctggttcccaagcagacaggcacgggtggccggatccggcagttgggaatcagcaaacgcggcgatgtctacgtgcgtactctgctgatgcatggcgcgagatcgatcgtgcgatccgaccgatcaacgacctggccgtggctcatggaactgctgaagcggcggccatacagcgtcgtggtggcggccgtggcgaacaagctcgccaggacgatctgggccgttctggccagaggtcagacctggcggcctgaggcctggcaagcaacttgatcgaacgaaagccgaacaaccgttttgaggagagcaagcgaccacccgagtgatgggccagacaggtcggaccgggacgaagatactccgatagggaaaaggagcctcgagctcgctttgcagatgggaacttcgtcggcgaatgccatcagggccagcaggcttagctgcttgcacaacaggccggatataagactgcagccctgcctcctgcttcttcacgcgcagatgtcgtttgcgatccgggaggcgcccatata

SEQ ID NO: 7099 - DNA, 1432 bp, unidentified
  source 1..1432: mol_type = unassigned DNA; note = element_b025712
  misc_feature 1..2: note = core
  misc_feature 3..206: note = LE
  misc_feature 207..1394: note = CDS
  misc_feature 1395..1432: note = RE
ctcctaccatcaattcatagtataagtttgtatgaggttttatttattaaccatggaaaggcaggaggactcagtacttcctgggtcgtggaatcctcatttcagtctgtcccctgcctccccaagccatgataggttgattggatcatagaatccttgtcacgatggaggattggtagggaggcaattcgtgctttaaccatgccatgatgggaggaggagctgacatggacaaaacacagcagttcagatggtttctaggtatcgatgtttccaaggaaacattcgatgcgtgctgtatcaaccgtaagggggaaagacttttcagtctatccacctcgatgaatcgaaaaggttttgaggagctcatcaaaccgttttcttccctgtcgattcctcaagaatctctactggtgggaatggagtcaaccgcatgttaccatataaacctttattctttccttgtctcgtcagggtacaccgtaattgttatgaatccactgctcatttctaatttcgtcaaacttcaattgaggaagaccaaaacagacaaaaaagatgcctatgtgattacacagtttcttcttctgaaccgggattccctctcccaaaccattgtctcttcagatatttcagatctaagagatctctccaggcaacgggagagccttgtggaccagatgagctcgaccaagagtgagatcaagcggttactgaccattacctttcctgaattggaacatattgcaggtgtttttaccaaatccatgctccgcctgctctgccaatacccttctgctgcttcgatgaggcaggtcaaacgctctaagatagcaaagatactgataccgggatcatatggaaagcaaaccgatgcatcggttgatcgaattgtcaaggctgctcaagtatccgtgggaacagcaagtcctaccaaagagatccttctgaaacagaaagcttctatactgatacaactggaagagtatcttcaagagcttacggaggtccttatggaactctgccaagcgaagattcaggaggatatggatatccttacctctatgaaaggaatcggggagaagaccgccatgaatttcctcattgagatgggtggggatatcaaacagtttgaaagtcataaaaaactgatagcgatggcaggcctcgatcccgctctctaccaatcagggaaaatggacaggaagggaaggatttctaaacgaggcaacagacatctcaggcgggtgatctggcttatgacaacgaaggtcatccagtttaatggaagattcaaacaatactacatgaagcgaataaaggacggactgccctacaaaatggctgttttggcaactgctcatcagggtaatgttcgcaatgttgacgaatagaacattatttaatccaaggatgaattgatgatagttga

SEQ ID NO: 7100 - DNA, 1394 bp, unidentified
  source 1..1394: mol_type = unassigned DNA; note = element_b028ba6
  misc_feature 1..3: note = core
  misc_feature 4..83: note = LE
  misc_feature 84..1121: note = CDS
  misc_feature 1122..1394: note = RE
  misc_feature 1123..1380: note = bridgeRNA
tgatgttgtggacggccccctagtcccggcatcagcgtgccataaggtgatcagtctaaaacgccacattgagggggccgccgatgaacgaaattagcacgattggtttggatatcgcgaagagcgtgtttcaggttcacggtgttgatgcgttgggcgccgttgtcgtgcggcggcaactgcgccgtggcgagctcctgaaattcgtcgccggccttccatcatgtgttgttggaatggaagcgtgcggtagcgcgcattattgggctcgccaagtaggtgcgttggggcacgaggtgcgccttctaccaccggctcgggtgaaaccctacgtaaagcgcggcaagaagaacgatgcggcggacgcggcggcgctggccgaagccgtgggccggccgcggatgagcttcgtgccggtcaaaagcgccgagcagcaaagtgtggtgatgctgcatcggacgcgcgatctgttggtccgccagcggacgatgctgatctgcgctctgcgcagccaccttgccgagtttggctgcattgccgctcagggcaaaggcggctttgggaggctggtggcgagcctcgacggtccggaaggcaggatgcttcccaaaacggcgctggccgcgctgcgactgatcgcggctcagatagatgacggcaacaaaaagatccaagcgctcgagacggctatcctgatgcaacaccggcagtgcgaaaccagccgccgtctcgcctctattcccggcatcgggccgatcaccgcctcggctcttgtcgccgccgtgccggacgcctcgattttcaagtcaggtcgtcagttggctgcttggcttggcctggtgccaggacagaactcatccggcggcaaagaacggctcggcggcatcaccaagaccggcgaccgctatctccgtcgtcttctggtgatcggcgccaccggcctcatccgctacaagcgaaagaacatccccggcggggtggcctggctgagcgggctgctcaaccgcaagccggcgcggctggtcaccgtggcgctcgccaataagatggcgcgcatcgcctgggccgtgctgtgccggggcgaaatctaccgagcagtggcagcacccgcggctatctgagccaaacgacgccgaaccggaagggttctttcttcgatcgcgagggtgaagacgtgacgtgatggcgatccgggtcgaacccggggaccggaaaaacccgcaaaatgtcatgcgcggtcatcagcgcgtaggggtgatgggaagccggtccggcgcacttcatcagggccagcggtcattgggcaccgcgtcgacaggccggatatatgactgcacccgaccagaacgccagtaccgtcaaatcatccttgcaaccaaggggccgtccataca

SEQ ID NO: 7101 - DNA, 1503 bp, unidentified
  source 1..1503: mol_type = unassigned DNA; note = element_b030d4a
  misc_feature 1..2: note = core
  misc_feature 3..304: note = LE
  misc_feature 305..1483: note = CDS
  misc_feature 1484..1503: note = RE
  misc_feature 7..239: note = bridgeRNA
ctaatgggagctgccgggtcggcgatgtggcaggctcggtcctgatagccgccagtggatgagcactcttccatccaggagttgccgagtcctaaaggcagatcgtgccttcgctggtggtcgggagggttgaccgctgatgggatgacgtgcccgcctgcgtgcgcgagcacttgaccattaggtcgctggtggtcctcccgcaggcttgtgatgctggcagcccggtcgtagaccaggcagagggaggtgcggggtactgtttgtcggcgatgactgggccgaggaccaccacgatgtcgaggtgcaggacgcgaccgggcggcggctgggcaaggcaaggctgccggaagggatcggtgggatcacccagctccacgcgctgctgggcgtgttgctgcccgaagctgccgaacccgaccaggtagtgatcgggatcgagaccgaccggggcccctgggtgcagacactggtggccgccggctaccaggtggtcgcggtcaacccgctgcaggtggcccgctcccgggagcggcatggcacctcgggcgccaaaagtgacgctggcgacgcgcataccctggccgacatggtccgcaccgaccaccaccagctccgacgcatcgctggcgacagcgacctggccgcagcggtcaagatcgttgcccgcgcccaccagacgctgatctgggatcggcagcgtcacctgctgcggctgcgctcggtgctgcgggagtccttccccgctgccctggtggcgttcgaggacctgaccgcccccgacgtgctggagttgctcggcaaagctcccgacccggccagcgccgcgcggcttgggaccgcccagatcgctgcggcgctcacccgtgcccaccgtcgcaacgtggccgacaaggccgccgcgatccgggcggcgctggcggccgagcagcttggccagccgccggtcgtggccgcggcctacgcggtggctgtgcgcgcacaggtcgcggtccttgccgccctcaatgccgagatcgagcggctgcaagcgcaggtgagcgcctattttggccggcacccggacgctgaggtctaccgcagccagccagggctgggcgatgtcctcgccgcccgggtgcttggcgagttcggcgacgatgccgaccgctacgccggtgcgcgggcccgcaagaactatgccgggaccagcccaatcacccaggcatctggcaagaagaaggtcgtgctggcccgctacgcacgcgacgatcggctcaccgacgccctgcaccaacaggccttcagtgccttgcaggcatcggcgggttcccgggcctactacgacgcgctgcgcgcacgtggcatcggccaccatgctgccctgcgccagctcggcaaccggctggtcgggatcctccacggctgcctcaagacccgcaagccctacgacgaggcaaccgcctggccacagcacgccgacaccgaccaagctgcggcttgacatcccagatcatgggatgt

SEQ ID NO: 7102 - DNA, 1690 bp, unidentified
  source 1..1690: mol_type = unassigned DNA; note = element_b032f22
  misc_feature 1..2: note = core
  misc_feature 3..315: note = LE
  misc_feature 316..1500: note = CDS
  misc_feature 1501..1690: note = RE
  misc_feature 70..270: note = bridgeRNA
ctggtatattctaattgactcatctgattgatgatcaataaggatatacctttttctttctaccgatcttttatgacagtgatcggaaactgtattcagctttctgtagaatgaaatcatgtgaatgtggatctgtattcctccttgcggctttgactgctttcaaaaggttcttaccacaccttatcctggaataatgatcagttagatgagtctttagaattcgtatcttcgaccagggtttattggataagcgctgtggaatcaaaacaggcacatacacatacatcatcgaaagaaaggagacgatcatctatgatcctagcaggaatcgacatcggcaaggattcccacttcttttcgcttgtaagaaaagaggacggcgaggtccttgcgcaaccaaggaagttcacgaatacttccgaaggattcaagacactcaccgattctttcatcccgtacgataaggaaagcatcctgatcggcatggaagataccggccattatcacttcgctttactcagatatctcttgagcagaaagttcaatgtggctctgatcaatccgactgccaccgactttaccagaaaggcgaatggaagcatatccaagaacgacagacttgatacgctgaccatctgtgatgtgctttcatcaaacaagcccaagaaaccgtatcgcatctcaaagttttcatcctttgatctgtacgaacaaagaggacttacaagacatcaccacaatctcaaggaagagatcaacgtctataccaaccgattacagaaatgtatcgacatcgtctttccggagtataattccctgtttccaagcaaatacggaagagtctatatcagcgtactaaagacctatggctctgctgccaatatcgcaaaggcggatatcagaagcctaaggaagtgctttgaatacaaggcaagaggcaaaaggatctctcttaccgccgagaagctcaaggaagcagcgaaagcttcgatcggcatcgattcggcttgcgaagtcattcagatcagacatctgctggaacagatcgaattactgaacaagcagatcaaagagatcgataaaaaaatagaagagtattctttggcaaatgactctcctattctttccataccaggaatttcccacttctctggtacttccattttagctgaactcacagatatcaacaactacgataaagctgctcagatcatcaagagagccggcgtggcacctttggtgtatgagtcttcaaagtatcaggcgaagcatactgccatcaccaagagcggatcgaagtatctgagaaagaccttatatcagatcatcttaccggtgataagatacaatcctgtattccagaaatactacgatctcaagatctctcagggcaagtcacacaggtgtgcctgcggacattgcgtaagaaagctgttaaggatcatcttccaccttcttaagacaaatcagaagtttgatccggcgttattaagataagacacagataaaatcattcatttacatctttctgtttttgtttctcaaaagaaaagatgttttaatcatgcctcaaggaggatccatattcacgatttcaaagaacaaagatataaatatcagctaactgtgcaagccataaatatttctggacaacttcatcaaaactgcttgaattttatatagttag

SEQ ID NO: 7103 - DNA, 1307 bp, unidentified
  source 1..1307: mol_type = unassigned DNA; note = element_b038221
  misc_feature 1..2: note = core
  misc_feature 3..188: note = LE
  misc_feature 189..1151: note = CDS
  misc_feature 1152..1307: note = RE
  misc_feature 29..201: note = bridgeRNA
cttgtgtccccgaaatctgccagaatgtggcaacgggcggttggatcagaaccgcccgttgccggaactgagcccgttgcgcccaaaggcgacagagcctgctaaagagcaagggacagctccggtgtcttcctgaacccgaacagttgcaagggctgcgagcccgtaccaggcaaggaagggagtggatgatgacacaagacgatctggttgtcgtcggcatcgatgtcgctaaagacaagattgatgcgtgcattcggaccgtaacggaacggaagacttgcccaacaaccgcggcggggcgacggagcttgattgcatggtttcgcaagcatcaggtcggcaaggcagtgatggaggcaagcggcggctacgagcgggtatgggccaaggcgttgcgccaagcagggctggaagtacggatcgtcgatcccaaacgggttcgccactttgcggaatcggcgggacgccttgcgaaaaatgacaagatcgacgcggagatgatctcctggttcgccgagacattcggcgaggctcccagccaagtcgacaatcccgctcacgaggagatgaaggcactggtgaagggacgccaaggcctgcttgacgtcagggctcgcctggaaatgcagaaggagcatgaggcgccggcccttgttcagaaggctcgcgcgcgtcttcttaagaagctggctgacgaaatcgccgcgctcgagaccgcgatcgcggcgacgatcaagacaacgccggactttgccaaacgcgccgagatcatccagagcgtaccaggctttgctgaggggaccgcaatggcgctgcttggaggactaccggagctggggcaggtgagcgacgaagttgccgccgcgttgatgggcgttgctccttatgacgatgatagcggcaaacgtcgaggtgaacgctgcatcaagggtggccgccgctgggtgcgaaatgccctctacatgccctgtgtcggtgccgcaacgctgaacaatccggtgttcaaggccttctacgaacggctgattgccaagggcaagccgccaaaggtcgcgatcgtcgcctgcatgcgcaagctgatcatcatcctcaacaccatgatcgcgcgcggcgagacgtgggatccgaagaaatacagggtggcctgacgagcgcgcctatctcgcgctcggacctcggccgagcgcatgcaaagccaacagaccggtgagcggacggggtcaaggccgtcagccgccgcaggcgggggcgcgccagcgccagccttgaggccggccgatcgccgggctacttcgccacagttg

SEQ ID NO: 7104 - DNA, 1207 bp, unidentified
  source 1..1207: mol_type = unassigned DNA; note = element_b038735
  misc_feature 1..2: note = core
  misc_feature 3..220: note = LE
  misc_feature 221..1204: note = CDS
  misc_feature 1205..1207: note = RE
  misc_feature 42..205: note = bridgeRNA
tcctttagacttgtatttgtaaattcatagtaagtttaataaaaaagagagctgaacttgagtacactattttcgctcagaacataaagttcaaagttcgattcagactcaagttcagactttcatcaaaatctctaatagaaattcgggatttaaagcccattatcaaggagtcgagttattgatgaaaagcatctcttcaacaaagtaaaacaaagttatgaaaaatgtttatgttggcattgatattagtaaagctacattggatttttgtgtagtagaacctaagaggataagtttccataaaatcaaaaataatgtagctgctattggtaaattattgaaaactataaaagaaatagatccccaagcctatctttgtatggaaaatacaggttattacaactttaatctttatgaggttttagaaaaattctcctttagaacttatgtaatagaccctaagcacataaagaggagtattggtctagtgcgtggtaaaaatgataaaatagacgctaaaagaattgctatatttattgaaagaaaccaccaagactttgaaagctggaagccgataggagaaagtgtaaaagccattaaaatcctattaagccaacgacgttttaaaattaaacaacgaacaggtttgaagcaacaaaattctgatttaaaaagtgttacgtttagtaaaaccactgacaaattgatcaggataaacgaaaagagtatcaaagaaataaacaagcatattgtggagatagagactttgattaaaaaagagataaatgctgatcatcaactacgtacagaaataaataggattaaaaccattccaggtattggtgatattaccgcttggacaattgcagtaaaaacagaaggttttaagcgattatgtgacccgagaaaactggcttgttttgctggagtggtaccatttgaacaacagagcggcaccagcctgagaaccaaacccagagtatctaaaatggcagatatgacattaaagtccgtacttcagatggctgctatgagggcggtaagaatgcaaaatgatttacgaatttattacctaagaaaagtcgaagaaggcaaaaataagatgagtgttttaaatgcggtcaggaacaagttaatacacatcgctatggcattaattaaaaatcaaacaaattataaaaatcgtttgcaattgtcatagaaa

SEQ ID NO: 7105 - DNA, 1511 bp, unidentified
  source 1..1511: mol_type = unassigned DNA; note = element_b03ca5d
  misc_feature 1: note = core
  misc_feature 2..88: note = LE
  misc_feature 89..1141: note = CDS
  misc_feature 1142..1511: note = RE
  misc_feature 1276..1506: note = bridgeRNA
taatggaatggccgcccctacccgaaacggcatcagagtgccaaagtggagttgttatacaaccacttgaacgagaggagcgaccgagatgaatgttacgacgataggcattgatttggcaaaggcggtgttccaagtgcatggggcagacgacaaggggcgagcggtgatgaagaagcagctcaagcgtgcacagatgttgcccttcttcgccaacctgacactgtgccgcatcggcatggaggcctgcggcagcgcccactattgggctcggaagctccaggcgctggggcacaccgtgcaattgattccgccgcagtacgtgaagccgttcgtcaagcgcaacaagaacgacgcggcggacgccgaggcgatctgcgaggccatgatgcgaccgaacatgccgacggtgccgatcaagaacgttgagcagcaggcgatcctgagcgtgcatcgggcccgacaaggattcgtcaaggcgaggaccgcgcaagccaaccagatccggggactgctggccgagtacggtttcatcatcccgaagggcattagccatatccccaagcgggtgcccgagatcattgaagatggcgagaacgatctgccaggtagcttccgggtgctcatcgcgcgcctggtcgatcacctcaaggagcttgaccggcaggtcggagaactggaggccgacatccagcgctggcatcgggacaatgccaccagccagggactggcgaagataccgggcatcgggccgctgtcggcgagtgcgatggtggcgtcgatcggagatgccaggaacttcaagaatggccgacaactggcggcctggatgggtatcgtccctcggcagcactcgacaggcgggaaatcgacgctgctgggaatcagcaagcggggcgacacatatcttcgaaccttgctgattcacggcgccagggcagtgattcgggcggcggagcgcaaaccggacgccgatccatggctgaagagactgatgacccggcgcaacaagaacgtggctgcggtcgccttggcgaacaagaacgcccgcacgatctgggcgctcctggcgcatgaccggaagtacgaggcgcactacgccccgcagggagtccacttgggaaatgggatagcggcatgaatatctcgatctcccttgagggaacgggtttcccacagcgccgctcgcctctggtaatagagggaccgccggcgatcggcgccatggaaaaccctgcggcttagcagaacaacgacaaccgacttcgaaaggagagcttccaccgattgcacaggcaatcatgaagtgatggcaagacaggtcagaccgtggccaggacaatccaaacccgtcatagcgcgaaaagcgcgtcgcaatgatcggaacctggccagcatattccatcagggacagaggcttcgagcctcgatcaaagtccggatctatggctgcaatcttcaccttcttaccgttatcaatgagtgcttggcaaaatgggggcgaccatcta

SEQ ID NO: 7106 - DNA, 1606 bp, unidentified
  source 1..1606: mol_type = unassigned DNA; note = element_b03d965
  misc_feature 1..3: note = core
  misc_feature 4..223: note = LE
  misc_feature 224..1486: note = CDS
  misc_feature 1487..1606: note = RE
actactactatgtttttagtggtcgatattcctatcttccagataggatgttacccatcttgttgcttaagctgttagaatgagtaaggcaattggtctggctaactaaaaacttggaacaagcgtccgctgggaagtcagccaaccagccctcattcgcagcgttcgttttacgcaggttgaactctcgttcgtgtgaaacacccagtagattgaataggcaatgagtaaactggtatcgaccattgccaatacattcaaaggagtagatttcatgaacgcagttggtattgatgtttctaagggtaagagcaccgttgcaatctatcagccgggcgatcaggtcattctcaaaccctgtgactttcaccatactcagtctgacatttcatccctgattgggatcatcaaagggttggatggcgcgacgaaggtctgcatggagcacacgggccggtattatgaaccggtcgccacctggctctctgatgccggtatattcgtcagtgctgtgaaccccatcctgatcaagcaattcggtgatgactcccttcgagcccctaaaacggataaggctgatgcgaagaaaatcgcgcgttatactcttgaccgttggactaaactgaagcagtatagtcatatggatgaaatacgaaaccaactgaagaccatgaatcggcagttcgggttctacatggatcaaaagaccgctatgaagaacaacctcatcgcgcttcttgaccagacctatcccggcgccaatactttctttgacagccctgcccgcagtgacggcagccagaaatgggtggattttgtctatacctattggcatgtggactgtgtccggggaaaatcccttgaagtctttacagagcactataagaaatggtgcaaaagcaaaggctataatttcagtgccgtcaaagctgaagaagtctacaatgattctgccgatctgattgctgtattcccgaaaaccaccaacaccaagatgctgatacatcaggccgtggatatgctgaatcttgcctccaagactgtcgaagctctccgtgcaaaaatggatcagacagctgctacacttcctgaatatccggttgtaatggcaatgaacggtgtaggccctacgctcggccctcagcttatagctgagatcggggatgtcacccgctttgtaaaacggggttcattgacggcctttgcgggtgttgatcctggaaaaaacgattccggcaaacattctcagaaaagtgtgcccacctcaaagaaaggatctccgcatttaagaaaaacactttttcagatcatggacagcttaattcaacgttcgcctgctgatgatcccgtttatgctttcatggataaaaagcgagctcaaggcaaaccatactatgtatacatgactgctggtgccaacaagttcctccgaatttattacgggcgagtcaacgaatatctgtcgacactttcagaaggcgaataaccagaaccttcttcacatgatcaggccagcatcccacgttggtctttttgtgatacagaaaaatcaacctgtttaaaatgttcaaagtgcatcattttttgcttgactttttatttgcag

SEQ ID NO: 7107 - DNA, 1620 bp, unidentified
  source 1..1620: mol_type = unassigned DNA; note = element_b04be00
  misc_feature 1: note = core
  misc_feature 2..247: note = LE
  misc_feature 248..1489: note = CDS
  misc_feature 1490..1620: note = RE
  misc_feature 6..221: note = bridgeRNA
tcgtaatataaggttagccagatatttctggttgaccttttttcattgggtcttattattacggtagtcggggtagaacgaagtttccgtggggtacgatcccgtcagctaaactgttcaccccctacttgtataaacatgtttcaggctggttgggaccaagctcccgtttaacaagcgaacctatgacattacaagaagccttaggggataccgacaattaagtattattaaggaggagaatcgaatgaatccagtcattggtctggatgtagccaaaggagaaagtcaagttcaggcatttttagataaacgaaagccttaccgtaaaagctttagtatccttcataatgttgaagaattcaataacatatttctaattttcttaaaagaaattgagaccctcgcaggtaaaaagcctacggttgttttggaatcaacgggacactaccatactcctattgttcaatttttagaggagcatcaatatgtatatattatagtcaatccactcattgcttatcgagctaaaagttcgagcttacgaaaagttaaaactgatgccattgatgcctttcatctatgcgaactttattataaagaagaactagagccttataaaaaaaggggtatccaacgcttaaaccttcgtaatctaacaagactacacgaaagcatttcaggtgtgtcagcacaaacaaaattacagcttcattccgttttagatcaaatattccctgaatatgtgggcgtgtttggtgacttatattccaaagtgtccttgaagatactattacaattccctacatcgaaatctgtattatgtatcagcgaatctacattggcggatgaaatagcatcgttatgtaagagtcgttcagataaatgggcaaaggaacgtgcacaaaagctgaaagatgctgcattccgaaacccatttcagagcaacttatttcaaagtcatatctttaatcttgagatacttgtcacgttaattcttcaataccaagagcatttatccaagttggaagccgaaatagatgctcttgccaaagaaattgaagaatataagattctccagtctatccctggtataggagaaaaaatcgctgcaacgattatctccgaaattggtgagatagatcggtttaatcacccaaaaaagctagtcgcattcgctggagttgatcctagcgtatattcctctggtagatttacagcttcagttaaccgaattaccaaaagaggatctagcagcctaagacacgcattgtatatggctgtaagatgtgggatacgcgatgctcgtaaaaagaaaacgacagatgaaattatcccacgcaataaaagattaagagaattttacgataagaaacgaaatgaaggtaaaccctttagggtagcgatcaccgcttgtgttaacaagcttttacattggatttatgcggtgttaaaaagtaagacggatttccaagattcatctcaatgactatatccagctaaataaacaataactttccaaattaaaacttgggtaagtttatttggtgtgttcacttttagtatagcatgagaattataagttttttagagaaaaatcttgacaactattagctggtt

SEQ ID NO: 7108 - DNA, 1464 bp, unidentified
  source 1..1464: mol_type = unassigned DNA; note = element_b050f93
  misc_feature 1..2: note = core
  misc_feature 3..240: note = LE
  misc_feature 241..1278: note = CDS
  misc_feature 1279..1464: note = RE
  misc_feature 17..182: note = bridgeRNA
cttgtatgttgctttcagagccgtgaggatggtgtcacgtcttggcggagaggccgtgcgccccttaggccagtttgttctgagcctgtcccgtagatcggcccccgcccctctgtttgcacgccgtggagaatcgaaggccttttaagcctgcatgttcaaggtaggcgcgaacagttattccgttagcagcggatgcaggggcggcagccgagaccatcctatccctgaaggaggtctatgaacaagctggtttccacgcaacaggcgacggagttttgcggtatcgacgtaagcgctgcttctctgtcggtggctctgattgcgccggatggaggtttggcgcagcgagagttttccaacgacgcaagcggtcatggggcgctttcggtgtggttgaagaagtgcagtagccggatacgtgtgtcgttggaggcgacaggcatttactcgttggatcttgccctggcgctggacgctgaagcatccgtggagctgatggttctgaacccgaagctggtgaaccgatttgcgcagacgctgcgccggtccaagaccgatgcagccgatgccgtggttctggccgagtacagcatgcggatgccgttctgccgctggcagcgtcctcaggccagccatcttcagttgcgcacgatgagccgttacatcgggtcgctggtggtggtgcaggcaggcttgaagacgcgtctgcgcagcgcccagagcacggccaccacgccgcgcgcggtgcgggtcgatctcaagcgggccctggctgcggtggaacggcgggtggagaagatgcgcgcagaggctctcaagctggttgaggccgaggcagagctgtacgagcgctaccatctgctgaccacggtgccaggcatcggggcagtcagtgcgctaacgatgctgagcgaactgattttgctggcactcgggatgaccgtacgccagtgggtggcatccagcggtctggacccggcgcatcaacagtcgggcacgagcctgaacaagccatcgcgcatcagccgcgccggcaaccggcgcctgcgcgccgcgctctatatgtcggccttgtcggcatcccgttacgaccggcatctggcagccttttaccaggcgctgcggacccggcacaagaccggtctgcaggcgctgatggcggtggcgcgtaaaatcctgcacgccatctacggcatcttcaaaagcggtacgccctacgatggtcaacgactgttcccgaatatccggacagaggtagaatcagtcgccgggtgaaacggaagcgggctctgctgggaagcaaccatgccgagggataacctggcgggctcatcctgacgatgaactggcgggcgagcagcaagcgctcgcccgcgcccgaaaatcatcggagggatagacccacatgccttgaaaatccaatcttaacccggacaaaactcgtgacttctaacagagaat

SEQ ID NO: 7109 - DNA, 1416 bp, unidentified
  source 1..1416: mol_type = unassigned DNA; note = element_b0517ed
  misc_feature 1..3: note = core
  misc_feature 4..310: note = LE
  misc_feature 311..1279: note = CDS
  misc_feature 1280..1416: note = RE
  misc_feature 8..226: note = bridgeRNA
gttcgtattataaggtcagccagatttttctggttgaccaatttttatttggttttattataacggtagccggggtagaacgtaagcacccgtgggacatagatcccgtcaactaaacagttcgccccctacttgtagaaacatgattgaggctggttgggactatggatctcgtataacaagcgaagctatgatactgcaagaaggaattaggggtaccggtgattttattctttagaggaggagattttaaaatgaatccagtcgttggtctggatatagcaaaaggtgaaagtcaggttaagctttcttggataagaaaaaaacttacaaaagtagttttaaagtatcacatactctagagggattagatattttacatcaatatcttagagaaattgagaacttaacaggagttaaacctccaattgttctagaagctacagggcattatcatactcccgttgttcagtattttgaggacagagattatttattaattataattaatcctcttatctcctatcgtgcaaagagctcgagtttacggaaagtaaaaacagataaaatcgatacttatcatctctgtgaattgtactataaggaggatttagagccctataaaaaacgaggaattcacctcttaaaccttcgtaatctaactcggcaccacgaaaacttaactgaaatatttgtacaagctaagctgcagtttcaagcagttcttgatcaggtttttcctgaatataaaggtgtttttggggacttatattcagttgtttctttactaactctactagaatatcctacatcttacgatgtattagaaacttgcgaagaaacaatagcaactagaataaaggaaaactgtaatagtcgatctcatagttgggcgaatactaaagcgaaggagctaaaagcttcagcagctcggaatccttttcagagaactttataccagagccatattttaacgcaaaaaatgtatatcaatatgcttttagaataccaaaagcacctatctacgtttcaggctgagatagatgctttagcagaacttatagaatataagattatccaatcaatccctggtatcggagaaaaaatcgcggcaacgattatttccgaaattggtgagattgatcggtttaatctccctaaaaaacttgtagcctttgccggaattgaccctagtatctttgaatcaggaaggttcaaaggaacagtgaacaggataacaaaaagagggtctagcaggcttaggcgttccaggatatagcttaaataataaataaaactaaacaatacaaaaccttccaaaagtagaatttaggaaggttatttggcatgcacatttttagtataacataaaaaatttttagtttttaatgaaaaatgttgacaaactattagctg

SEQ ID NO: 7110 - DNA, 1365 bp, unidentified
  source 1..1365: mol_type = unassigned DNA; note = element_b051e99
  misc_feature 1: note = core
  misc_feature 2..69: note = LE
  misc_feature 70..1113: note = CDS
  misc_feature 1114..1365: note = RE
  misc_feature 1120..1355: note = bridgeRNA
tatgggatggcccgccctccacttccgtcggcgataggctgacgcggactctggagggaggagcggacgatgacgatagcagtgcttgggatcgatctcggcaagaacagctgcagcgtcgcgggcttggacgagacgggtcgggttgtcctgcggcgcaggctgaaccgggacggcgtggtccggctcgcttcgaagctgccggcctgcgtgatggcaatggaggcctgctgcggcgcgcaccacctcggtcgcgtgctgcgcgaccagggccacgaggtccggctcatgtcgccggagtacgttcagccctacgtcaaggcgcagaagaacgatgagcgcgatgccgaggcaatcgccgaggccgcgaccaggccgacgatgcggtttgtcgagctgaagagcgaagcccagctcgatgcccagatcctgcaccgggcccggacccgtcttgtcggccagcggacggccttgatcaaccagctccgtgccgtgctcctcgagcgcggcatcgtggttgcgaagggtcgacggcagctcgagctccggctggcagagttgctggacggcgcgggtgagcggtccccgacgctgagcgcgcgcaccctgctcctgatcgaggacatgcgcctggagtggacggagctggatcgccgcatctcagcgctcacggccgagttcgtggctcgagcgcgagacgaccaggcggctcgacgcctcaccacgatcctgggcttcggcgccttgaacgcgaccgcgatggtcgcagcgatcgggatgggggagacgttccgatcggcgcgggaccttgcggcttggctcggcctcgtgccccggcaggcgacaacgggcggcaagccaaggctcctcggcatcaccaagcggggcaacgcctatttgcggacgctcctgatccacggcgcacgggcggtcctgccgtcactctcggcgagttcgaccgccatgggggagtggctgcgcgccctgctcggacgcgctcacaagaacaaggtcgtggtggcgctcgccggcaagctggcgcggatcgcctgggcggtgctccgctcgggcgagagctacacggccaaggcaggtcggccggcgacggcctgaacgggagcggtcgcgcgggcagcccggcccggtgatcgacgaagtctgcgggcggagcgtgagatggcctgacggttgatccggcaccctgagaccctggcgcaaaagatggcgctcgacgccgtgtcttttatgaggatcaaggtgcgcggactccatcttggcgggggcaaggccccgagaccggatacgttggcgcagatcggtcaggacacctcgcaaaaaccgcttgcagacggggcgggccatacg

SEQ ID NO: 7111 - DNA, 1404 bp, unidentified
  source 1..1404: mol_type = unassigned DNA; note = element_b06ac17
  misc_feature 1..2: note = core
  misc_feature 3..109: note = LE
  misc_feature 110..1129: note = CDS
  misc_feature 1130..1404: note = RE
  misc_feature 1165..1403: note = bridgeRNA
gaatgatatgaacgccctccaccccgcgtcggcaacacgtcagtggccggcggccgctaccgaaaagaaatcggtgatcatatcggtctactgagccggaggttccaacatgacgcatacgatcgtgggtgtggacatcgcaaaaaacgtaatgcaggtgcattgggtggatccggaaaccggagagatcgtcaacagacctatcaaacgggcggtgtttctcgaatatttcgcgaatcgcaagccttgtctcatcgggatggaatcctgcagtggatcccagcactgggcgcggcgattaatcgaaatgggccaccaggtgaagttgatgccagcgaaattcgtcaaggcgttcaacatccgaaacaagaacgacgcggccgatgcgcgcgcaatctggatggcgacgcagatggcgagcaaggaagttgctgtaaagacggaggcccagcaggcagtgctcgctttgcatcgcatgcggcagcaactagtgaagttccgcacgatgcagatcaacagcctccgtggattgctcactgaatacggtgaggtgatgggcgtcggtcgggccgcgctggacaaatcgatcgtgggagttctggaaagattgtcgggacgcttgccagcgatactgatcgagacgctgcgtgaacaatggagaggtctcgatgtcctggaccggcagatctgcgagatcgagcgccgtttgcacgcgtggatgaaggatgatccgtctgccaaagcaattgcggcgattccgggcgttggcttgctaacagcgaccgcggcggtggctacgatggggcatgccaaggcgttcaaatccggccgcgagttcgctgcgtggctcggtctcgtaccgaaacagacgggttctggcggaaaagtcgagttgcagggaataagtaagcgaggtgacacctatctcagaactttgctcgtccacggcgctcggagcatcgtctatcgcgtgaaggagccaggtccatgggtaacgcagatgaaagagcggcgtccgttgaacgtagtcatcgtggcgatggccaacaaacttgcccgaattatctgggcaatgctggcgcatcaacggccctacctgaagggctacgaaagcgttaaacgtgcttgatttcgctggtccagttgaaggttgtgctcaaagggatggaacgtcaaaagttgcggcggcattcgagtgtgatgacaagacaggtaggacctgggactcacgaagcctgaaaatctgtctgagcctaacaagctcgcgaggtgaatgaggcgtgagtcagcggatttcataggggcccgcagcgaatcaggctgcaacgaggccggatgtagagctgcagcccatcctgttcatcaaaacctcggagacctggcgcaaaggggggcgttcatgta

SEQ ID NO: 7112 - DNA, 1393 bp, unidentified
  source 1..1393: mol_type = unassigned DNA; note = element_b0728f8
  misc_feature 1..2: note = core
  misc_feature 3..117: note = LE
  misc_feature 118..1155: note = CDS
  misc_feature 1156..1393: note = RE
  misc_feature 1174..1353: note = bridgeRNA
acatggggtaatcgcgggagcgaggtgcccttaagctggccatagcgttggaaggtggctgttccccgataggatggaagtacgggctcacgactggacgccgggcccaagcatcgaatggagaacagccgtggaagaatatatcggtctcgacgtatcgatgaaagagacggcggtctcgatccgccgcgatgccaacggatatggcgaggcaagtgcgcttctgacccaagggtcatcgccgaacttatccgcaagcgggccccggccgttaagcgcgtggtcttcgaaaccggtcccctgtcggtgtggttttaccatgcactctgcgctgaggggttgccggcgatctgcattgatgcgcgccatgccaaggctgcgctcgatatggctgcgaacaaaaccgatgcaaatgacgccgatggtttggcacatcttgctgaagtgggattcttccgcgaggttcgggtgaagggcttcgacagcatgctgacccgcacgctcgtagcggcccgtacccggctagtcaggatcaccgtggagctctcaaaccagatccgcggcctcatgaaaacgttcgggcttctcgtcccggccggcaaaggaagtagcttcgagaagaatgtccgcggtcttctcatcgatcaggaggggcttgcccctatcctgctgccgatgctggaagcctggcgcagcatgcgcctccgtgccgccgaactcgggcgccagctcgtcgcggatgcccgccagagccaagcctgccgcatcctcatgtcgatccccggcgtcggcgtgatcacggcgactgctttcgccactgccatcgagaatccggacaacttcaagcaatcccgttccgtcggcgcctgggtcggcctgacaacccgccgctaccaatcaggcgaagtcgattacgacggtcatatctctcggcgcggcgatcggcatctgcgggggcttctctatgaggccgcagcggtcattctcactcgcagctcgaccgacagcagcctgcgcaggtggggcctccagctccgagaaaggatcggattcaagcgggccgctgtggccgtggcgcgcaaactggcggtcgtcatgcattcgatgctcaagacgggggagttctttgaccgaaatgcaggggccacaacgtgaaatctggcaaatagcactcaagatctgagcgtttgaggcgtcccagccgggacgtgagccgagccattccgctgatggggttgcaccgctgtctcagcaaagtgcgtcgtccacattgaaggctcgtccgcgaagctccatcgtgcggcggccgatgccgaccgcgaagaccaccatgcacccggcatgcatgcctccgagatcgcaaaggccttgaccacgtaccggcgattagaca

SEQ ID NO: 7113 - DNA, 1419 bp, unidentified
  source 1..1419: mol_type = unassigned DNA; note = element_b0819a8
  misc_feature 1: note = core
  misc_feature 2..120: note = LE
  misc_feature 121..1140: note = CDS
  misc_feature 1141..1419: note = RE
  misc_feature 1179..1416: note = bridgeRNA
aaatgtaatggacgcctcccaccccgaagttgagacggcggtaatgcgtccacggaaccgcaactgctgtctggtccgtgctaaaccaaagctgtcttggaccaaactggagtcatgatcatgacgaataccgttgttggcgtcgatatcgcaaagagcgtgtttcagatccacgaagtaagcagcgtgacgggtgaggttgtgagcattcaggtcaaacgtgctcgcttcttgcagtacttcgccaaccggaaacgcagcctaatcggcattgaagcatgtggtggagcacagcattgggcccgccaactcaccgctatggggcatacggtcaagttgttacctgcacaaatggtcaaaccgttcgcatgcggaaacaagagcgacatggcagacgccaaggcgatatggatagcagtacagcaacccgggatacgggaggcggcaatcaaaacggaagcccagcaggctgtgttggccttgcatcggatgcgtcaacagttggttaagtttcgcaccgcccagatcaacgcattgcgcggcttgctgacggagtacggtgaagtgatgccgctcgggcgagatgcattggcaaaaatgttgcctggggtgttcgcgcgcgtggcagagcgtctgcctgcagtgctgatcgagacactccgcgaacaatatgcgcggataaggcaaatcgacgagcaagtatcggaaatcgagcgccgattgcgtgagtggcacaaggaagatgaggcctgcaaacgaatcgccgcgatacctggcgtcgggctactgactgcgacggcaaccgttgcggcgatgggcgaccccaaggcattcaagtcaggtcgcgaattcgcagcctggttaggactggtacctcgtcaaaccggaaccggtgggcgagtgaaactgctcggaatcagtaagcgtggcgatacctatctgcgcacactattgattcacggtgcccgcgctgttctcacgagcagtaaagcaccgcccgaatgggcggtgaatttggccaagcgtcgtccaatgaacgtagctgtggtggcattggctaacaagatggcacgaacgttgtgggcgcttttggcttaccaacgctcgtatcaagctgggtacgcaggtcggccggtttgaccagccccatcgtacttcctatcaatttcaacagagggtggatagctgaaaggttgcgaaggtacgtaagaagtgatggcaaacaggtcggaccgcgacccactaagtctgaatcagtagttggacttcgagtccatcgaggaaatgagacgtgggtcggcgtattccatcagggccagcaggtatctgacctgcaacacaggccggatataaaactgcagccgtgtcctgttgtgacatcacagaagacgttcttggcgaacgggaggcgtccatata

SEQ ID NO: 7114 - DNA, 1387 bp, unidentified
  source 1..1387: mol_type = unassigned DNA; note = element_b08cb8b
  misc_feature 1..3: note = core
  misc_feature 4..89: note = LE
  misc_feature 90..1115: note = CDS
  misc_feature 1116..1387: note = RE
  misc_feature 1133..1373: note = bridgeRNA
tgatggtgtggacggcccctgcgtccggcgtcgagagcgccatagagtggttgtcgttgaagcagccacagcggcgggagccatccaccatgaagactatgacaatcggcctggatctggccaagagcgtgtttcaggttcacggcgtcgatgacgctggaaccgtcaccttgcgcaggaagttgcgcaggtcggaggtgttggagttcttcgacagctttccggcctgccagatcgggatggaggcctgcgcgacggcgcacaactgggcccgggaactggcggccttgggtcatgaggtccggctgatgccgcccaactatgtgaagccctatgtccgccgacagaagaacgacgccgccgacgccgaggcgatctgcgaagccgtgacgcggccgaccatgcggttcgtgccggtcaagagcgcggagcgccaggcgatactgaccttgcatcggacacgggaactgctggtgcgtcagcgcaccatgcttatcaacgccatccgcagccactgcgccgagttcgggctgatcgcgcctcaaggcgctgggcgggtcgcggagttggtcaaccgggtgcgagcggcgggcgatgaggttctgcccgacctggcgcgatcaaccctggtgatgctggcggatcaactccagaccctggcggtccagattcatcaactcgaacgtcggccgctggcctggcatcgccaggaccagatcagccagaggctggcgaccatccccggcgtcgggatcatcagcgccacggccctgtcggccagcgtcaccgatccctccctgttccgatccggccgggagttcgccgcctttctgggcctggttccccgacagaactcctccggcggcaaggatcggctaggtcgcatctccaagatgggtgacggctatctgcgcaagcttctggtggtcggagcgacctcggtcatccggcgcatccgaacaggcgtgtccctggcctcggccgactgggcccgcgccctgctcgaacgacgccccgcccgtgtggtcaccgtggccatggccaacaagaccgcccgcatcgcctgggcggtcatgacccgaggagaggcttacaggccgcctgccatggcctgaccgagatcgcggcggccacggagccgtcgccccaagctgcagagggacgaatgggaatgacggtgacgatctgaacgcggccgcaggcgggctgacccgaggtgctggcggagcttccaagcccgatagactgattagggacccgacccgcggactccatcagggccagcggtcatcgacaccgcgccaacaggccggacagatgtccgcaccccgcagatcaccccttcaaacccgaacttacctcttgcagatcaggggccgtccacaga

SEQ ID NO: 7115 - DNA, 1321 bp, unidentified
  source 1..1321: mol_type = unassigned DNA; note = element_b095d63
  misc_feature 1..2: note = core
  misc_feature 3..273: note = LE
  misc_feature 274..1281: note = CDS
  misc_feature 1282..1321: note = RE
actattatatttgcatccgcaaagaagaagggggaaatctccttcaattcataaagaattgttaaatttgcggaatgtataacaaaaagaagaatactccatattcggcgttaacccttgccctttcaagtcttaaagacttagccctgttttgggtaccgaatatctctgagcacaagcttgagagtaaattaatacagtcttgcaacactaagttcttagtatagtagtagccgcccagactggagcactcttcatttaaaaattaataatatgcaaatatacggaattgatttggcaaaagagaagtttgacgtaagttttttacgtttgtcctcaaaaagcaacgttgtaacgccagttcaccatgtcgtcaggaacacacagaacggcatcaaggctttcctcaaaggtcttccgtccgactccgtactcgtcgctgagcacacaggagtctatggagaaagacttctcaagatgtgcacagaaatgaacgttaaaattgcatatgtgggcggtcatgtaatacacacatacaagtctggtcctgaccgcggaaagacagacgagcaggattgcaatgtgttgcgcgagttcggtgaacgcttcaccgataaactcgtatatacgacgttccccgaggaagatatatacgaacttcgccaactctctcgccagcgaacgatgcttgtggaagagcgcaagcgcatcatgacagccgacaagacggaagattgtagaccttatcgaagcgaagctgtaaagcgtagcatgcagcacatcgtcgacctcctggatgaggagataaaggacatggaaagggatatgcttaccgtgataagaaagcatgacaagatttccaacagttatgacataataacgagcgtaaacggtgtagggctggtcacagccgtagagcttatcgtgaagacaaggaacttcactaccatcacgacagcgaaacaatactccgcatacgcaggcaccgctccctacgagaaatcctcaggcaagatgaatcaaggggcacacgtgtcaaagtgggggaacagaaggtcgaagaccttgctgtacatctgcgccgaatgcgcaaggatgcacaacaaggagatgaaactctactatgagcggagaactatcattgacaagaaagcccatcactatgtcttgaatgccatagccaacaaactgttaaggcttatcttctcacttatcaataagaacgaaaagtacaatccttgttacatacaaagagatccaagatctattaacataaattaaagtaagaaatctcgaaaaagacttgctcaattagagtaaa

SEQ ID NO: 7116 - DNA, 1548 bp, unidentified
  source 1..1548: mol_type = unassigned DNA; note = element_b09aad7
  misc_feature 1..2: note = core
  misc_feature 3..252: note = LE
  misc_feature 253..1431: note = CDS
  misc_feature 1432..1548: note = RE
  misc_feature 3..234: note = bridgeRNA
cttgtataatgaactcatagtaaaaattcattatactttccctttcataataatttttattatacttaacataagacgctgtggattagttcaatcacctatagctagactatttaaattgaggatataaccacagctttatgcttatttgttaattagttagataacgcatgacgttttatatagagcaaggatacatttagcataaagttagtgggacatagtggactaatttaaaaaggagttgttcttatgatttatgtcggtattgatgtagctaaagacaaacatgattgctgcattgtagattcagatggagttattattaacgattgtctacgtatatgtaattcaagtgaaggctttgaactactatacatctcaattctttcagccctatcgggtcaagatatttctaacgtaaaaataggacttgaatcaacaggtcattatagcactaatctccaaaactacttatatgccaaaggctttcgcctatacattcttaatcccttggctacaaatctcttccgtaaggctcaaacccttagaaagactaaaaccgataaaacggatgcactagttattgctaaaatgctcttttctgatgatgcaaaatcctattctcctgtatcatatcaaattcaagagttaaagtcactaactagacatcgctatagaatgatagggtatcgatcaaagctgaaaatatcaataactagactcatagatataatatttcctgaattacctaaacacgtttggtcaattcatcaaaattcttcttattgcctcctaacagagttatcaagtccgaaggatattgcaagttgtcatctaactaagttaactaatattcttaataaatcctctcaaggtcgctatggtaaagctaaggctattgaaataaaggaagcagctagtttttcaattggcatgagcgtaagctctttatccttcgaacttaagcaaaccattaggctaattcagtcagttcaaactgagattgatgctttagatgcccaaataaagaaggttgttattgagacaaacactccactaatgactattccaggtatttcatacactttagctgctattattctatctgaaatcggagatatcgatagattcacaactccagcaaagctcttagcctttgctggtttagaaccttctacataccaatctggtaaatataatgcttcgcatacaccaatggttaaacgaggttctgcatatctgcgttgggccatgctaacggcatcaaggacagttactatgagagatgaaacttttgctttatacctttcgaagaaacgagatgaaggtaaacattactacgttgctatgagtcatgtagctaaaaaactaacccgtaccatattttatcttttaaaaactaatactgcatttgttccacaaatgtaatccaataactttttttaaaaaagcaacattcaagttgctttatttgtcatgcaaatttttaggacactaacaattaagaaatttatataaaaattatattgacttcatatagttagt

SEQ ID NO: 7117 - DNA, 1460 bp, unidentified
  source 1..1460: mol_type = unassigned DNA; note = element_b09c146
  misc_feature 1: note = core
  misc_feature 2..302: note = LE
  misc_feature 303..1445: note = CDS
  misc_feature 1446..1460: note = RE
  misc_feature 9..237: note = bridgeRNA
cgttaccgtcttcgtggcctcgcaatgaggctcccggccttcggccccggtatgacttgagcccccggtcgagatgatcgaaaaggtggtgtcgccggtgccggaggcattggcagaccgctgattagaggcacgagcgccgatctcctgaaggggtgaggcagtctcttcgtaacgtggatgccggcacgctgatgccgcaggtgaggccggggaaaacgcgagcacgggagcgacgggcgtgacggacgaaactgcgatcgacgtctatctgggtctggatgtcggcaagggtgaacaccatgccaccgccgtcaatcgcgctgggaagaaggtgttcgacaaagccgctgcccaacagcgaaccgcagctgagggagctgttccagaggctccgggccaggcacggaacggtgttggtagtcgtcgatcagccggcttctatcggagctctgcccctggcggtcgctcgggacgcggactgcctcgtcgcctacttgcccgggctcacgatgcgacgaatcgccgatctctaccctggtgaggccaagaccgatgcccgcgacgcgttcatcatcgcggacgccgccagagcgatgccccacacactgcgaacgatcgatgccactgacgagaaggtcgccgagctcgcgatgatcgcggggttcgacgacgacctggcgggcgaggccacccggatcgccaaccggctccgcggcctgctcacccagatccacccgtcgctggaacgggtattggggccacgcatccagcatccggccgtgctcaaactgctggaccagttcggctccccggcacagatccgcaaagccggaagaggacggctggtcaccctgatacggccgaaggcgccgcggatggccgaacggctggtcgaggacaccttcaccgcactcgacgaacagaccgtcgtcgtcccgggcaccgccgccgccgctctgatcatccccagcctcgccaactccctccagtccgtcctggaccagcgcaaactcctcgccaaacggatcgaggaactcctggaggcccaccctctttcccaggtcctgatctccatgcccggcatcggggtcaggaccgcggcccacattctcatcgacgtcggtgacggcagcggcttcgccaccgccggtcaccttgcctcctacgccggcctggcgcccgtgacccgaagttcaggctcctcgatccgcggtgagcacccctccaggcgcggcaacaaacagctcaagcgggccttctacctcgccgcgttcgcctcgctctcccaacccgagtcacgcgcctactacgaccgcaaacgcaaggaaggaaaacaccacgtcgcagccctcgtcgcactggcccgacgacgcatcgacgtcctttacgccatgctccgagacggcaccttttaccagccacccacaccggctacggcttgacgaaaaccatagagg

SEQ ID NO: 7118 - DNA, 1379 bp, unidentified
  source 1..1379: mol_type = unassigned DNA; note = element_b0a5f5b
  misc_feature 1: note = core
  misc_feature 2..73: note = LE
  misc_feature 74..1111: note = CDS
  misc_feature 1112..1379: note = RE
  misc_feature 1144..1370: note = bridgeRNA
taatgggatggtccggccgtgctcctgccaacccggggtactctagcagggtatccggacataggagcacgccatgccagagaaagctgaagtcgccgtcgtcggtatcgatatcggcaagaactctttccatgttgtcggcctgggcgatcgaggcgagatcgtgctgcggcagaagtggtcgcggtctcaggtcgaggttcgattggccaacatgcctccctgcctcataggcatggaggcttgcgtcggagctcatcatctcagccgtcggctgaaagcgctcggccacgaggctcgactgatgccggcaaagtacgtccgcccctactccaagggtcagaagaatgacttccgggacgctgaggcgatcgccgaagcggtccagcgccctaccatgaagttcgtcgcgaccaagacggtcgagcagctcgacctccaggccctgcaccgcgtgcgcgaacgaatggtgagccagcgcaccggcatcatcaatcagatccgagcgtttcttcttgagcgcggtattgccgtgcggcaggggcaacgcttcctacgcacggagctaccggacatcctcgccgcaccggccgatgttccgtcgccacagatggcacgcctcatcgaaggtctcgcggccgactggcggcacctggacgagcggatcgagcagctctcgaacgaaatccatgccatggctcgcgccgacgtgaattgtgagcgcctgatgagcgtgccggggatcgggccgattatctcaagcgcgatggtggcggcaatcggcgccggcgatgccttcagcaagggacgagacttcggggcctggctggggctggtgcctcggcagatgtccacgggagaccgaaccgtgctcggtccgatctcgagacgaggaaaccgctatctccgggttctgtttgtccaggcagcatgggtcgtgctcatcaggccaggcagctgggagcgctatgagctgaaggcctggatcgagtccgctcggaaaagactgcatcgcaacgtgctggcgatagccttggccaacaagctcgcccgcatcgcctggagcgtcttggctcacgggcgcgggtttgaggccagtgcctcggcgtgatccccgccgtactgacctaactttaagaggtttccagccgaggtctgcgagagtgtgtgagacgagatggaggttcggtcttcccggcgttgacggaatctggtggcgcaaatggcccgctgaggcctatccgctaatgagatcgtcggcgcgctgatatccatgatggcccgaagcgaccgcttcaatcggaggccggatacattgatgcaagaccatcaccgccagatcgacgaaacacccttgcaacgcacggccggaccataca

SEQ ID NO: 7119 - DNA, 1572 bp, unidentified
  source 1..1572: mol_type = unassigned DNA; note = element_b0bd5c7
  misc_feature 1..4: note = core
  misc_feature 5..90: note = LE
  misc_feature 91..1200: note = CDS
  misc_feature 1201..1572: note = RE
  misc_feature 1250..1451: note = bridgeRNA
ctagacaatatggaaggaccggcctgacctattgcacagtcgtgggttgttccgggcaggaacagagccacatgcaaaaggaggccggtcgtggacaaggatactacctacgtggcgctcgatgacagcaagcggaagatcgtcgcagggatcttgcgtcccagcgacacgcaacccgagcttcgcgagatcgcgaacgacgcacgccagatccgccgcctgttcgagcggctcaagcgcgaagggccggtggcggcgtgctacgaagctggagtgtccggctacgatctccaccgtcagatcaccgggctcggcgtcgcctgcgcggtcattgcgccagcgctgaccccacgacgccccgggcagcggatcaagaccgaccgccgggacgccgcgaagctcgtgcgactgttccgcgctggcgagctcaccgccatccacgtcctcgacgagagcgaggaggccgtgcgcgatctcgtccgctgccgcgacgacatccgccgcgatgttctccgctggcggcatcgcgtgctcaagctcctggcccgccacgggcgcgcctacctcaccggcaagaactggagccacgcccactggcgatggatccgtgagcagcggttcgagctgccgccgctccagcgcgcgttcgaggccaccgtgttcgcgctggagcaagcgctggcgcggcaggcggaactcgacaaagaactcgaggcccttgccgccaccgcgccctatcgcgagcccgtgggctggctccgctgcttccgcgggatcgacacgctgtcggcgatcatccttctggccgaggtcgtggacttccagcgcttccgccggccgcgcgaactcatggcctacctcgggctcgtgccgagcgagtactcctcgggcgagacgcagcgccgcggagcgctgaccaaagccggcaacagtcacgcccggcgcgtcctggtcgaggccgcctggcactatcggcaccgacccaccatcggccgcgcgctggcgaaccgcagccagggccaacccgacgagatcgtcagccacgcgtggcgggcgcaacagcgcttgcatcgccgctaccggcatctcctcggccacggcaagcgaacgccggtcgccgtggcggcggtcgcacgcgaactggtggggttcatctgggccgccatgactcgacacgagagccggcgccaagccgcgtaaccatcgtgaccgaagcgagaagaggtcgagggtagtggctccgagattcccgagcggcgtcggccacggcgcgatgcgagcacgactggagagtcctcgcgctagctatgcgacgcccggtttccggatcgggacgactcgcgcccctagacggaggcagctcccgacgaagcggtgtcatgcggctctgctcttcggagcaacccgcgcatatcagcctgattcgtcgtcgaagccgctccatcgtcagccgcgcgccggcgtcctcgggaaatcgtccatgccgacccgagagatactcggacgtcagcatcgaccaagagatcgagggtgccgtcacaaaccgcttgacggctggtccttccatatcag

SEQ ID NO: 7120 - DNA, 1153 bp, unidentified
  source 1..1153: mol_type = unassigned DNA; note = element_b0c6a31
  misc_feature 1..2: note = core
  misc_feature 3..205: note = LE
  misc_feature 206..1141: note = CDS
  misc_feature 1142..1153: note = RE
  misc_feature 13..207: note = bridgeRNA
cttgttttatccataacgtggcttttgtgcgatacaggagccgtcgtccggcacggcatttatgccgggcgacggcgagggtcggatcgtttccctcttggtcgttatggactgtggaggagtaaggtcgccctcgtcttttctgatgacctgaacggatacttgggctttgggcccgtatgacaagacaaggtggaaaagacacatgaacaataccattggtatcgacatttctaaagatacacttgatgctcatcgtttggcagacggtcaacataagcaatttctgaatggaaaaactggacatgcgcaacttgtgaagtggatcggaaagcagtctgatccgctgattatctttgaagcgaccggcgcataccatcgtcaattggagcgggttctgtgtacccatattattccattcgtcaaagtaaatccaaagcaagcacgcaggtttgcccaagcgagtgggaaattggcaaaaacagatcgtgttgattgcgagatgttggcaaagatgggagctgccttgcagctgatgccaaaaccgttcaccgcagaaaacctgtatgatctaaaagagttattgtctgcacgccgggcgctcatcaaagatcgaacggccgccaaggcccgcaaagccacggtcattaatgctctcataaagcagcaactcgaaaagcgcctacgtcagatcaaaaacgatattgcaaaaattgatgcgttgatgttggacgtggcgcgcgaagatcaatacatgagcgaacggctggatattctgttcagtattcccggcattggagtgattacagcactcatgatcctcgtggatatgccggaaataggcgctctgaataacaaacaagttgccagccttgcggggctcgccccgatgtcacaaagctcggggaaatggataggaaaggcccggatacagggcggacgtcccaacttacgcaatgccatcttcatgccagcactggtcgcaattcggcacaatgccgacctcaaaaccaaatatgatcggcttgtaactgctggaaaggagaaaaaggtcgccatcaccgctgtcatgcgcaaactgcttgtccttgcaaatgctctattgcgagataacagaaaatgggctgaaaaagcggcttgaccaagacggata

SEQ ID NO: 7121 - DNA, 1659 bp, unidentified
  source 1..1659: mol_type = unassigned DNA; note = element_b0ccd01
  misc_feature 1..2: note = core
  misc_feature 3..298: note = LE
  misc_feature 299..1483: note = CDS
  misc_feature 1484..1659: note = RE
  misc_feature 59..273: note = bridgeRNA
ctggtatattgtaattgactcatttaattggtcattacacactataccttctcctctctatcaactttatttatccgtagttgatgacggttttgttattctgtaaaattgaaatatgtgaatgtggatttgtgttttttcctgtggcttgactactttaaggaggttcttaccacaccttatttctaaacaataatgagttagatgagtcttgaattcgtattttgaaccaggttttgtgatttaagtgttgtggataccattttcacaaatatcaatcaagaaaggatgattaattatgaaattagttggtattgatattgggaagaacaaacatttcttctgtattatggataaagttactggtgaaatcattgtttcacctacctcttttctcaataataaagatggatttgattttttcattcaaaaacttaaaccttattctaaggattctctcctaattggtatggaagatacaggtcattaccatttctctttactaaagtaccttttagataatcattttacagttgctttgattaatccaaaaacaactgattttactcgtaaacttcaaggtgggattacaaaaaacgatgaacttgacacttttactatttgtgatgttttagataatcacgaacgtaaaaagctgtatcgtattacaaaagttaatcgttttgatctttatgaacaaaaacaattaactagacatcatcataatttaaaagaagaattaaatgtttatacaaaccgccttcaaaaatctatcgatattgtattccctgagtttaacagtttatttaagagtaagtatggtactatctacatgaatatacttaaaacatttggaagtgctgataatattgctaatactgatataagaatacttcgtaaatgttttgatataaaaggtagaggtaatcgtatctctttaactcctgaaaagcttaaagaatgtgcgaaagcttctattggtataccttcatcttctgaagagattaaaatcaaacatctaatagatcaaattgaactcattaatgagcaaatttcagaagtagataaaaaaatagaagagttctccgtgcaaaacaactctcctatcctaagcataccagggatttctcacttctctggtacttctattttagcggaattaggagatatatgcaactattctaagccatctcaaatcattaaatttgcaggagtggctccttatcattacgaatcaagtcaatacaatgccaaacatactaccattactaagaaaggttctaaatatctaagaaagaccttatatcaaattatactgcctgttattcgatataatccagtattccaacaatattatcaattgaagctttctcaaggtaaaggacatcgttgtgctcaaggacattgtgtaagaaaattgcttagaatcatttatcatcttttaacgacaaatcaacagtttgatcctaaacttttaagataacataaataacattatgcaaattttaaaaatgagcctataaaggttgttttcatcatgcccaaaaataacaaatctctattcacttttcaaagaaattaaacagttaacctataaaaataagtattttcatattttcaaactttttcataaaaaatacttgtattttatatagttag

SEQ ID NO: 7122 - DNA, 1266 bp, unidentified; identical to SEQ ID NO: 4
  source 1..1266: mol_type = unassigned DNA; note = element_b0d5a60
  misc_feature 1..2: note = core
  misc_feature 3..195: note = LE
  misc_feature 196..1164: note = CDS
  misc_feature 1165..1266: note = RE
  misc_feature 14..200: note = bridgeRNA

SEQ ID NO: 7123 - DNA, 1485 bp, unidentified
  source 1..1485: mol_type = unassigned DNA; note = element_b0d6db3
  misc_feature 1..2: note = core
  misc_feature 3..253: note = LE
  misc_feature 254..1465: note = CDS
  misc_feature 1466..1485: note = RE
  misc_feature 6..242: note = bridgeRNA
ctaatggggctcatcgggtcgggtctggagcagactcgggtccggtagtcgccggtgggtgagcactccagcgtcctggacaccgaggagtccttcgtcaagaccgtgcccttgccggcggtggcggggaggttgaccgctgatggggtgacgtgcccgacccgttgtggcgtgagcactggtccattaggccgcgggtggtcctccccaggctggtgctggacgtcaccgatgggggtctgggttgctgttcgtgggagacgactgggcggaggatcatcacgacgttgagctgcaagaccaggccgggcggcggctgggtcgggcgcggctgcccgagggtgtggtgggcatcacgaggctgcacgagctggtcgccgggcaactgggcgaggacgacgggcccgaccaggtggtggtcggcatcgagaccgaccggggaccgtgggtccaggcgttggtcgcggcgggctaccaggtgttcccggtcaaccctcggcaggtggcgcgctaccgggagcggcacggcacctccggggccaagagcgacgccaccgacgcgcacgcgctggccgatatggtgcgcaccgaccgtcaccagctccgcgcggcggccggtgacagcgaccgagccgaggcggtcaagctgctggcccgggcgcaccagacgctggtctgggatcggcagcggcaggtgctgcggctgcgggcggcgctgcaggagttcttccccgccgcggtggcggcgttccccgacttggccgccgccgacgccttggcgttgctgcaggccgcgccggacccgaccagcgcggcccggctttcccgcacccaggtcgtggccgcgctcgagcgcgccggccgccgtggcgtgcaggccaaggccgccggggtccagcaggcgttgcgggccgagcagctgacccagccgacgacggtggtcgccgcctacgccgcggtcgtgcgcgccgcggtcgcggtgatcggcaccctcaacgccgagatccaggcgctgggagagcaggtcgaggcacagtttggcaagcacccggacgctgaggtctacctcagccagcctgggctgggcggcgtgctgggcgcccgggtgctcggggagttcggcgacgaccccggccgctaccgcgacgcgcgggcccgccgcaactacgccggcacctccccggtgaccaagcagtccggcaagaagaaggtggtgctcgctcggttcgtgcgcaacgaccgcctcgctgacccgctccaccagcaggccttttgtgccctgactgcctcgccgggcgcccgcgcctactacgacgagctccgcgcccgaggcgccggccaccacgccgccctgcgccagctcgccaaccggctcgtcggcatcctccacggctgcctcaagacccgcacgccctacgacgaagcgaccgcgtggtcacaccgcactacccacgcagccgcttgacaccaaagcgcatggggtgt

SEQ ID NO: 7124 - DNA, 1560 bp, unidentified
  source 1..1560: mol_type = unassigned DNA; note = element_b0d83f3
  misc_feature 1..2: note = core
  misc_feature 3..584: note = LE
  misc_feature 585..1439: note = CDS
  misc_feature 1440..1560: note = RE
  misc_feature 3..250: note = bridgeRNA
cttgtatgattatttagaagctaaatcatacgctcctttcttattttactgtttgtgtcataatacattcagatgctgtggattttatattgttccctgtggccgttatgcggactacttgattggagtgtattgcctctacattatctgaactgtacataggtaggatgttgccggagcaccactccgagtacttatctcgatcaagtttacgaggataatcgttaaagtggacctgacagtatcaatcttttatgaaaggaggcgttctcaatgatctatgttggcattgatatctccaaactcaatcactatgccgccgccattgattctgatggcgtggtccaaatcgagccgtttgaattcacgaatgataatgatggcttctatatgctggtttccaaactggaacagtttgaatccgacagcatcatcattggtcttgaatcaaccgctcattatggcaacaaccttgtttcgtttctgtttctaagggttttcatgtttgtgtcatcagtccgatacaaacctcatccctacgaaggaacaacattcgcaagactaaaaccgataaggttgacgccatgattattgcccaggcagtctctatgatgagagaccgaagattcgccacactgtatgacgttgctctcatgcagcttaagaatctcggcagattcagactgaaacttgtcaagcagagatctcgtttgaagattcagctgacttcttacatggatcaggtgtttcctgaattccagtatttctttaagtccggtctgcatcagaaagcctgctgtgctgtcctgaaggaagccccttccgctgaacagacagcttctatgcacttgactcatctcaagaaccttcttgtgtctaattcccacggacgtttcaagaaggaaacagccttagaattaagagttctggcacagaagtccgtcggcaatgccgacagagcattatctattcagattactcaatcgattgctcaaatcgagttactggatagccaaatcagtattcttgaatccgagataacagacaccgtcaactctctggattcagtcatcatgaccataccgggaatcggatcaatcaacggtggaatgattcttggtgaaatcggtgatattcatcgattttcaaagcctcgcaaattactcgcatttgccgggctggatccatccgtataccaatccggtaagttttctgcaaaacacaccggaatgtctaaacgtggatcctcagcacttcgctacgttctcattaatgctgctcacaatgttgttaagaacaatgacacttttaaagcatattacgaatccgagagagctgaaggtcgtggacactacaatgcccttggcccttgctccggcaagcttgttcgaatcatttacaagatgctaagcgagaatgtgaaatttgatttagattaaatttcacaactgaatatcttttggggcctgcctctgggaggtctttttggattgtgcatttttatattcaaatatttattccaatctcctctgaagttcatcttgacttttcatagtaggt

SEQ ID NO: 7125 - DNA, 1597 bp, unidentified
  source 1..1597: mol_type = unassigned DNA; note = element_b0dece3
  misc_feature 1..4: note = core
  misc_feature 5..253: note = LE
  misc_feature 254..1459: note = CDS
  misc_feature 1460..1597: note = RE
  misc_feature 1..222: note = bridgeRNA
ccccgttactttgatggtgtccccataatggggatagtcgctgggcccggtatggcttattgcccctgtagttaccatgatccggggggtgttgccgccgggctaccaggacacccgttgactgctgatagggacacggacgagtcacttgactcagttctctttgtaacgtgggtgccagcatcggatgtcgagacaccagcgacgaggtttaacctgtcactgttgctccgacaccacgaggaggccggccatgaccaccggcaccatcgacgtcaccatcggattagacgtcggcaaaaccgcccaccacgcctgcgccatgctggccacaggcgagatcatctacgacaaacccctaccccaggacgaagatcagcttcgcaaggtcttcaccgacctccaagcctgcggcaccgtcctggtcgtcgtcgaccagcccaacaccatcggcgccctgcccatcgccgtggcccgggacgcgggctgcctcgtcggctatctccccggcctggccatgcgcaaagccgcggacttgtaccccggccggtccaagaccgaccggcgggacgcattcatcatcgctgataccgcacggacgatgccgcacaccctgcgggccgtggaccgcgacaatgaggtgctgtcagcgttgaagatgctctccgggttcgacgatgacatcgccaaggacgccacccgcaccatcaaccggctgcgtagcgtgctgacccagatctacccttccctggaacgcgccctgccgggcagcatcatcacccgacccctggtgctggacatgctcatccactacggagggccaacaaggttgaagaaggccggttaccagcgggtacactcctggatgagcacacgagccaagaaggaccccaccaagctggtcgacgcgatcttcgacggactcaaagctcagaccgtcaccgtacctggcaccgcagctgctgagatcgtcatcccgcagctggcgaccaacatcaaagccctgctggaacagcggacaaccatcgctgagcaggtcgaggaactgttggaggacttccctcttcaccaggtcttgatgtccatgccgggagttggcatcaagacggccgcgaacatactcctggcggtcggcgactgttccgacttccggtccgccggacacctggccgcctatgccggcatcgctccggtgacccgaagatcgggtacgtccatccgtggtgagttcccggccagatccggtaataaacggttgaaaaacgccctgttctactcggcattcgcatcgatccggttccacgaaccatccaaggcctactacgagaagaaacgtgccgagggcaagcgccataacgccgcggtgatgtgtctggccagacgccggtgcaacgtcatcttcgcgatgttgacccgtggtgagtttttccgggaggttcccgcccgaaccgccgcgtagtcaggcacgagacgatcagctggtcaacaatgaacacgctgaccagccgatcaaccacgcccagcatcaagatcggtagttacccccgaaaccttccgacgagtacaccaccgaccccttgacaaaaacatagggaca

SEQ ID NO: 7126 - DNA, 1365 bp, unidentified
  source 1..1365: mol_type = unassigned DNA; note = element_b0e8563
  misc_feature 1..2: note = core
  misc_feature 3..79: note = LE
  misc_feature 80..1099: note = CDS
  misc_feature 1100..1365: note = RE
  misc_feature 1106..1352: note = bridgeRNA
tgatggcgtggacggcccctgcaccagcgtagctgtgcaatactgcggtcgttgtaggtccacgtctaggagtcggcagatgaagcaggaggttgtcaccgtcggattggatttggcgaagagcgtttttcaggtgcacgcgatcggccgcgacggtgccgttctggtgcggcgcaagctacggcgcgcagagttgatcggcttcttcactgatcttccagcgtgcctagtcggcatggaggcatgtgcgtcggcgcatcactgggctcgggagctgataaagttggggcatcaggtaaggctgatgccaccagcctatgtgaagccctatgtaaagcgcgggaagaccgacgcagccgacgccgaggccatttgcgaggcggtgacgcgtccaacgatgcggttcgttgcggtgaagaccgtcgagcagcaggcggtgttgatgctccacaaaagccgcgacctgatggtgcggcagcgaacgatgctcatcaacgcgcttcgagggcacttggctgagtacggcgtcgtgacaggtgtcggcgcgggtggcgtgagcgcgatgctaaaagggttgcacgaacagcaggacaagctgcccgttcacgcccgctcggccctgcacgcccttgccgcccagttaagggcgctctcgagcgaggtcgaccggctcgaagcgcagatactcgcgtggcaccgagccgacgagacgagccgccggctcgccacgataccgggcatcggtccgatcaccgcgtccgccatatcagcggcagtcccggatgcctcgctgttccgatctgggcgacagttcgcagcatggcttgggctcaccccgcgagcgaacagctccggcggcaaggagcggctcggcgggatcaccaagcagggtgacggctatttgcgacggctactcgtagtcggcgcgacggcagtaatgcgcatggcgcgcaagaatgcagctcgccaaccttggttggcccagcttctcgagcgcaaaccggcgaagattgcgaccgtagcgctcgccaacaagacagcgcgcatcgcctgggcggtgatgttgcgcaacgaagtctacgcggcgtccgccgcgtgaccgccgtccgcgccgccgggtaacgcccgaggcaggatggcgtaggagtagctgagtagtgatggcgaaccggtcagaccgggggtcggcaaaacccagggggtcacagcgcttcgagcgcgatgacgtgattagggagccggcctgcggacttcatcagggccagcagccatgcggtgctgcgcgaacaggccgaacacatggatgcacccgaccggtgctcatcgctgtacaaaagctcttgcgccgcaggggttgtccacaca

SEQ ID NO: 7127 - DNA, 1388 bp, unidentified
  source 1..1388: mol_type = unassigned DNA; note = element_b0e9998
  misc_feature 1..2: note = core
  misc_feature 3..87: note = LE
  misc_feature 88..1104: note = CDS
  misc_feature 1105..1388: note = RE
  misc_feature 1090..1375: note = bridgeRNA
agatggggtggttgccgccctccccagacggcatcgcaatgtgccaagatgtggtgttgaggccactgagcggaaaggacggcaaccgtgacgaaggatacgatgatcggggtggatttggcaaagagcgtctttcagttgcacggcgcgtcgatgacggggcagatgcagttccgtaagaagctatcgcggcaaggcttttacaaattcattgcagggcagcctccagcggtggtcgtgatggaagcctgcggcagcgcgcattattgggcccgtgaagtgaccaagcttggtcatgacgtgaagctgattgcgcctcattatgtgcggccgtttgtaaagcggcagaagaatgatgcggcagatgcggaggcgattgtaatagcggcccagcggcccgaaatgcgctttgtcgaaccaaaatctgttgagcagcagagccgagctattttgtttcgggctcgagagcggctcgtccaccagcggaccgaactggtcaacgccctccgggcttacctctatgagtatggccatgtcgttcctcaggggattcaccagatcaagcggatcgaagagatcctagacgcaccgaacagcgacttgcccaatttgatgcgcgaggaatgccgggatttgctggagcagattgccgagaagacggtccggatcaatgtccgcactggcaagatcaaagcgttggcggcgcaagccggcaccgcgcggcgcttgcagacaatccccggcgtaggacctttgaccgccctggctgtcgaggcctttgctccgcctatggaaaacttccggtgcggtcgcgacttcgcggcttggctcggcctcgtcccacgtcagttctcatccggcggcaaggagcggctcggacgcatttccaaggccggacaatccgacatccgcaagctgctgattatcggggcgatgtcgcgcctgaactggatgggccgcaaatcgattcctgaaggttcctggctggcgcgcatatccatgcgcaaacccaggatgatcgtagcgatcgctttggccaacaagatggcacgcacaatctgggccatgctgacgaagaatgaggattatcgagttccggcataggtggcggcgtgacccacatgtcacaaatccgtcatgtcggataacgggaggtgaaagaaggcgacgacccgaatgggcaaaatgatcgaacagatctggatccggaaaaccagttgatttctatgagtcctcgagctcgagaatcagttttggacctgatccgcagatcaccataccggccagcggcttctgaatgccgcatctcaaaggccttacagaagaccgcgctcgatcactcgcgaatcggattagaaacttcttgcaccacgggcggcaaccacaga

SEQ ID NO: 7128 - DNA, 1625 bp, unidentified
  source 1..1625: mol_type = unassigned DNA; note = element_b0f5be4
  misc_feature 1..2: note = core
  misc_feature 3..271: note = LE
  misc_feature 272..1498: note = CDS
  misc_feature 1499..1625: note = RE
  misc_feature 14..291: note = bridgeRNA
ctcctacaataataattacggcataaggcgcggcagccagccgcgtctttttccatctcaaagccgaagctgttagaatgagagagcaaatggcctgacagcaagtaccatgggctaacacgcccgctctggagtccgtcagccacctctcttattcgcagcattcgatttgcgcaggtagagccacagtgtgcgctcgcgtcacccaggagattgaacaggcaatgagtaaaaggtggaaagccatgtccaattaccaaggaggagcgatatgaacgcagtagggattgatgtttcaaagggaaaaagcatggtggctgccctgcggccaatgggtgaagtggctttgatgccacaggagtttctccacaccgaagtcggtttggagcagatggcttacgccatccttgcgctgggagaagatactcgcgttgtcatggaggccaccggtcgctaccacgagccggtagcagcggcgctgtatgcgtgcggcatccatgtctgcgttctgaatccgctttacatcaagcagagcgggggcggttccatccgcaaggtcaagactgacaaggctgacgccatgaagattgccaagtacgctcttgacaactgggtggatctgcgggaatatacccctatggacaccataaggcaacagctgaagctgtgcagccgccagtataacctctacatgaagacagtggtatcgctgcaaaacaatctcatttctctgaccgacaagaccttcccaggcgtaaacgaactgttttccagcctggaacgtacagacggccaccagaaatggatggactttgtcatgactttttggcactgcgactgcatttgccacgtcagcgagaatgcattcaccgagcgctaccagaaatggtgcaatcgtaagggttaccatttcagtgaagagaaagctaaggatatctacgccggaagctgcggccatttcaccacgctaccgaagaacgacaacaccaagctgctcattaccacagccgcacggcagcttcttgctggcaagatgacgcttgccgctctgcgcactgagatgactaggcttgccaagcagctgcctgagtacgaaactgtgcgcgccatgtacggtgtaggtgaaacaacagccgcccagctcatagctgaaattggcgatgtgcgccggtttccccgccgcagttccatcgttggatttgcaggcgttgaccctggagtggacagctctggcaagcacaacgccaagagcgttcccactaccaaacgcggctccacacatctgcgcaaaacgctgtaccagattgtctgcacttacctaaaaaagtctcctatagatgagccggtgtacaagttccttgataagaaacgcaacgagggcaagccgtacttcgtgtatatgactgccgcacagaacaagtttctgcgcatctactatgcccgcgtgaaggaatgccttgagaccttcgacgcgcaccagaaggccgcgcaagactgaacagttcaatactttcactcaggctggcgagactgtttttctccagccagttctgttatgcccttttccagccctgcaaatcttgcgggacttttttcgctttagctattgacttttgtttgcagga

SEQ ID NO: 7129 - DNA, 1313 bp, unidentified
  source 1..1313: mol_type = unassigned DNA; note = element_b0fdb0b
  misc_feature 1: note = core
  misc_feature 2..69: note = LE
  misc_feature 70..1086: note = CDS
  misc_feature 1087..1313: note = RE
  misc_feature 1088..1306: note = bridgeRNA
taatgagatggtacgtccctcttcacagctaaacttaacctatgtttagcgctcaaaggaaggtgtcccatgtcaacagctcatatcattggtattgacctaggtaaaaatacattccacatcgccgctcatgacaaaagtggcaatgaactttttagaaagaaactatcacgtaagaagttacttgaattcttatcttgtagagagccttcaatcattgcgatggaatcatgtggtggcgcacattggcttgctagaaaatgtgagtcgttagggcatgttgcgaaactcatccctccccaatacgttaagccgtacgtaaaaactaataaaaacgattttattgatgcatgtgctattgcggaggctgcatcaagaccatcaatgcgatttaccagtcataaaaccgaatcagctcagattatttcaacattaagaaagctcagaaacggctacatcagagagcgtacagcgtgcatgaatcggataggctctatattactcgaatttggagtcagcttacccaaaggccatgctgctatgaaaaagctgtttcagtggcttgctgatgagggacattatgtgccaccggaaataatcttcgagctaagcgagttgctcgagcattatgaagtactgaatcaaaagattgaaaaccaacaggctaaggtggaaaagttacttgcagaagatccacagatgacacaactacaaaccataccaggagtcggtccagtgatagcaagcgcatgcctttcatctattggtaacccaacagatttcaaaaatgggagaaatttcgcagcttggattggtctagtaccaattcagtattctacaggaggcaagaccacaatgttgggcatttcaaaacgagggaaccgagaattaaggacgttgttcattcacgccgctcgttcaattttatggagagataaatctgccgagaagtacttcggtaactggcttatggaccttaagcaaaggaagcctttcaatgttgctgtcgtcgcgttagcaaacaagcttgccaggatagcgtggtctgtaatgacaacgaataaaccctttttaatcaaagcttaaatcaaatttgcaatggataaaaaagatgacaaaacggttagaccaccagattgaaaacctgttgccccaaacagcaacttagtgtgcttttcattttgcgaggacaatctggcgcgaacctcatcgtagagctgagcctttaggtctcaattaagactctgaatatattagcgcaaatcagctcgttatctggttatctacttgcaataacgggacgtaccatatat

SEQ ID NO: 7130 - DNA, 1623 bp, unidentified
  source 1..1623: mol_type = unassigned DNA; note = element_b0ff892
  misc_feature 1..2: note = core
  misc_feature 3..270: note = LE
  misc_feature 271..1497: note = CDS
  misc_feature 1498..1623: note = RE
  misc_feature 14..290: note = bridgeRNA
ctcctacaataataattacggtttaaggcgcggcagccagccgcgtctttttccatctcaaagccgaagctgttagaatgggagagaaaatggtctgacagtaatcgccttgggctaacatgcccgttttggagtccgtcagccgcctctttcattcgcggcattcgatttgcgcaggtagagccacttcgtgcgctcgcgtcacccaggagattgaacaggcaatgagtaaagggcggaaagccatatccaatcataaggaggaacaaaatgaacgcagtagggatcgatgtttccaaagggaaaagcatggtggctgccctgcggccaatgggtgaagtggcgttgctgccacaggaatttctccacaccgagatcggtctggagcagatggcttacgccatcatcgcgctgggggaagatacccgcgtcgtcatggaggccaccgggcgctaccacgagccggtcgcggcggcactgtatgagtacggcatttatgtctgcgtcctcaatccgctgttcatcaaacagagcgggggcggctctatccgcaaggtcaaaaccgacaaggcggatgccatgaaaatcgccaagtacggccttgacaattgggtagatctgcgggaatatactcccatggacactgtaagacaacaactgaagctgtgcagccgccagtacaacctctacatgaaaacggtggtatcgctgcaaaacaatctcatttcgctggccgacaagacctttcctggcgtgaacgaactgttctccagcccggagcgtgcggacggccaccagaaatgggtggattttgtcatgaccttctggcactgtgactgcgtctgccgcgtcagcgagaaggcattcaccgagcgctatcagaagtggtgcaagcgcaagggctaccattttagcgcagaaaaggcgctggatgtctacgccggaagctgcggccatttcaccacgctgccgaagaatgacaacacgaagttactcattactacagcggcacagcagcttcttgcgggtaagatgacactggcagctttgcgtgccgaaatgacacgccttgcaaagcagctgccggagtacgataccgtgcgggccatgtacggtgttggcgaaaccactgccgcacagcttatggctgagattggagatgtacgccgttttccccgccgcagttctatcgtgggtttcgccggtgttgatccggctgtggatcaatccggcaagcacgacgcaaaaagcactccaacaaccaagcgcggttctccgcatcttcggaaaacgctgtaccaaatcgtctgcacttacctaaagaagtctcctgtagatgagcctgtgtaccagtttctcgataagaaacgcagcgagggcaagccttattttgtctacatgacagccgcgcagaacaagtttctgcgcatctactatgcccgtgtgaaagagtgccttgaggcattcgtcgcacggcaaaatcccccgcagagttaagcgaacaatcaacttcattccggctggcgacgcgatttttctccagcctgttttgttatgcccgttttcagtctcgcaaattttgcgggacttttttgtttttgctattgacttttatttgcagga

SEQ ID NO: 7131 - DNA, 1362 bp, unidentified
  source 1..1362: mol_type = unassigned DNA; note = element_b104391
  misc_feature 1..2: note = core
  misc_feature 3..294: note = LE
  misc_feature 295..1104: note = CDS
  misc_feature 1105..1362: note = RE
  misc_feature 1134..1351: note = bridgeRNA
tgatgatgtggacacccccaccttaaccgccgagtctggcggctgggaccaatcaaccgttgagaaaggaatcgggatgtccaggctgactatcgggatcgatcttgcgaagaatgtcttccaggttcacggcattgatgacagcaatcttgtcgtgatcgcgcagaaactgcggcgagcacatcttcttgcattctttgcgaagctggagccaagtctgatcggcatggaagcgtgtggctcggcgcatcattggcgcgcgaactgacgggcatgggacatgaggtcaagctgatggccccggcctatgttaagccttacgtcaagcgcggaaagaacgacatggtggatgctgaggcgatctgcgaggccgtcaccaggccgactatgcggttcgttccaatcaagaccgcatcgcagcagtcgatcctgatggtgcacaagtcgcgtgcccttctcatccggcagaggaccatgctggtgaacgccttgcgaggccatctcaccgagatcggcatcgtggcgccggtagggatcgagagaacggcagagctcgtcgggcgggtgctcgcacacgatccgaccgagccggacgttccgccgctcgtgactgacatcgtcgtatccttggccaagcaaatagactccctgaccgccgaggtcaggacgcttgaagccaagatacgcgaatggcatcgaacgagcgaagcaagccgtaggcttgcgacgatcccgggcgtcggcgtgatcactgccactgcgttatccgcgactgtgcctgacgcgtcggtcttcaagtcgggacgagaatttgccgcatgggtcggcctcacgcctcgatcgaactcgtccggaggaaaggaacggctcggcaggattacgaaggcggggaacagatacctacgaacgctgctgatcgtgggagccacggccgtattgcgccatgtcaggcacaggatgtacgggccgctcatcgagtgggtgaggaaactactgctgacgaagtccgcgcgcctgacaaccgtggcgctggcgaacaagatggcacggatcgcatgggccgtcatggccagacgcacggtttacacaaacgccatcgcatagacatcgacgcaacagcgtcaccgagttcggagggcctgccagacgatcatgatgaataccggttttgccggggatcgggacaacccgttcgcgaggccgcatcagcagaatgcgcttttttgattgggaccatgatccgcggacttcatcaaggcccgcggccgttcggccgatcatcgagaggccggacatatgcgagcagccaaccggattcagaaagatcggaagaaaggcttgaccgaggggggtgtccacata

SEQ ID NO: 7132 - DNA, 1414 bp, unidentified
  source 1..1414: mol_type = unassigned DNA; note = element_b10bb74
  misc_feature 1: note = core
  misc_feature 2..89: note = LE
  misc_feature 90..1118: note = CDS
  misc_feature 1119..1414: note = RE
  misc_feature 1180..1406: note = bridgeRNA
taatgggatggtcgcccctccccaatacggcatctaacgtgccaaagtggcgaatgatctttcccactgactgagaagaggcgaccactatgaaggctacgactatcggtatcgatctggcaaaacatgttttccaattacatggcgtggatcaacatggcaagactgtcctcacccgcaagttgaagcgtgaccaaatgctctccttctttgccaatctcccttcatgtctgattggcatggaagcctgcggcagcgcacacttttgggccaacaaactgcaagggctggggcataccgtcaagctgatggccccgcaattcgtcaaaccttacgtcaaaacgaacaaaaacgatgctgctgatgccgaagccatttgtgaagcggtgactcgacccaccatgcgtttcgtgccgataaagagcagtgagcaattggccgtcctggcgctgcatcgggcacggcagggtttcgtcaaggctaggaccgcccaggccaatcagatccgcggattgctggccgagtatggccacatcatcccccaaggcattagtcacatcagcaagcaagttcctgaccttctggaagatagtgaaaatggcttgccagggacctttcgccaattactgatgcgactccacgagcacctcaaagacctcgacaaacaagtccacgagttggaggacacgatcgtacgttggcaccaagagtgtgttgtcagccagaaactggcacagctgccaggcatcgggccactcaccgccagtgcgctggtagcgtccattggtgatgctaaaaatttcaaaaatggcaggcagttggctgcgtggctgggcctagtcccaagacagcattccagcggtggcaaacaaacgttgctggggatcagcaagcgcggtgacagctatctgcgtacattgctaattcatggcgctcgctccgtgttgcgggtggcagagcgtaaggcgtcgtttgcaggaagttggctagccggagtaatggtgcggcgcaacaacatagcggcggttgcgcaagctaacaagacggcccgcatcgtctgggcgttgctggcgcacgacagagagtacgatgctaattatggcgtggcagcatcatgaagagccggcttatcaagacagcggttgattgaactttgcgtaacaagatgttgaataagtaacaccgattgcacaggcaatcatgaagtgatggcgagacaggtcagaccgtggctggcaaaacccgacgacaactcagcacgtgtttaagtgcgaaggattgatagaggagccagtcagcgaattccatcagggatagaggcggtagcctcgattgaaatccggatctatggctgcaatctccacctgactcactttcatgaattgagggcttggcaaaccggggcgaccatcta

SEQ ID NO: 7133 - DNA, 1434 bp, unidentified
  source 1..1434: mol_type = unassigned DNA; note = element_b118804
  misc_feature 1: note = core
  misc_feature 2..230: note = LE
  misc_feature 231..1421: note = CDS
  misc_feature 1422..1434: note = RE
  misc_feature 14..240: note = bridgeRNA
ctacttgttccattgcctcatgaccggggtctggcaaggctcggtctaggtgcccgggtcgtcgctctcatttcggctgccctcgactcgtcgtgtggctctcatctggcctgcgtgacccgggcatcgatccagggcggggagaggctcaagaggggtttgctcagctcgaagtagcggtgccctcccaagctcgacaaccacatcggatcgagttgttggaggcgcaagtgagaggcgaaccaggacgggtcgtgatcgggatggacccgcacaagcggtcggtgacgatcgaggtgatggcggccgatgagcgggtgttcggtggtggccggttcggcaccgatgtcgccggctaccggtcgatgctggagtacctgaagcagtggccggaccgggtctgggcgatcgagggctgcaacggcatcggccgccacatcgccatgcggctgctcgccgacgggcaggaagtgatcgatgtgccgccgaagctgtcggcacgagcccgggtcttctcgaccggccagggcaggaagactgacgccaccgacgcgcactccgtggctctggtcgggacccggatgagcgggctacgcccggtcatcaacgatgagcagctcgcggtcatgcgggtcctggtcgaccgtcgccgggctctgggcgaggaccacacccggatgatcagccaagtccatcacctgctgttggagctgatccccggcggtgcgaagaaggatctgtccgcggcccaggcaaaggcactgctggccaaggtccgaccccgcgacgccgccggcaagatccggcgccgggttgccgccgagctgatcggtgacctcgagcggatctaccaacgcagcaaggccgcggacaaggagctcaaggagctggtcgccgcgtccggcagcagcctgatggacttgcacggcataggaccatcgggcgcagcccggctgttggtcgaagtcggcgatatcacccggttccccgaccgcgaccacttcgggtcatggaccgggaccgcacctgtcgatgcatcatccggcgaccaggtccgacaccggctttcacggggcgggaaccgtcagatcaaccgggtcctgcacatcatggccaccgtccagctacgccacccgaccgagggacgtgcctactacgaccgccgcaaagccgacggcaagacctcgatggaagccctgcgcgcgttgaaacgacggctgtccaacatcgtctacaagaccatggtcgacgacgcgatcacccacacggtcgctggctcgaggacgggcccgggagggcaaacgggacacgactctgactccagcgcgaccggctcacatcccagcgccggctcttcggacaagccacttcccggacccgccagacctcagcctagaaccccactcccggccgcctcttgacacagaggggtgc

SEQ ID NO: 7134 - DNA, 1276 bp, unidentified
  source 1..1276: mol_type = unassigned DNA; note = element_b1211ec
  misc_feature 1..2: note = core
  misc_feature 3..231: note = LE
  misc_feature 232..1266: note = CDS
  misc_feature 1267..1276: note = RE
  misc_feature 30..234: note = bridgeRNA
ctgacttgttcttatgctcctagcatccgggtgacgcgaacccatagggtgcgaggtcggtgaccggctggctcgcaggctccttgcccactcgctggtgtggctcgctcatagcatgctcgtcggtcgccgaccgccgtcggcgtggctcgatagaggcgtgacgtagttccttcaactcaggttgcccgccgcggcgttgcgagcgtcccgcgaagccaggaggagtccgtggtcaccatcggcatcgatccccacaagtcatcacacaccgctgcggctctcgacgaagccggtcagctgctcggcgagctgcgtctgccggccaccgcgagcaccctggtcaggttgcgacgctgggccgagccgtggcccgagcgcacctgggcggttgagggcgccaacggtcttggccgcctgctggcgcagcagctgctcgccgccggagagatcgtgcttgacgtgccagcgacgctctccgcgcgcgcgcgccagctgcagcgcggccatgggcgcaagagcgacggcatcgatgcgcgcagcgtggccaccgtcgccctgcgctccgccgacctgcggcggatcgtcggcgaagatcacagcgctgtgctgcggctgctctccacgcggcgagacgagctcaccggggagcgtcggcgggtggtcaaccggcttcatcggctactccgcgatctccatcccggtggtgcgggaaccgacctctcggcaaaggctgccgccagcctgctcgccaagctacgaccgcgaagcgtcgccgacctcgagcgcaaggcgatggcgcgagggctgctggtcgacctgcggcgtctcgatcgcgccttggccgccaaccgtgcacgctgcgccgctgccgtgaccgccagcggcagcagcctgccgagcatcctcggcatcagcgacgtcctggcggccaagatcatcggccataccggcgacgtccggcgctttgcctcggcacagcgcttcgccagctacaccggtacggcgccgatcgaggtctcgagcggcgatgtcgtccgccaccgtctctctcgcggcggtaatcgggcgctcaacaacgccttgcatctcgccgcacgggtgcaggtcatgcacccgggaccgggacgcgatcactaccgccgcaagctggccgagcacaagtcctcgagcgaggcgctgcgcagcctgaaacgacagctcgccaaggtcgtctatcgccacctggtcgccgatcacgttcgccgtctcgcgagcctttcttgacatagaggcg

SEQ ID NO: 7135 - DNA, 1276 bp, unidentified
  source 1..1276: mol_type = unassigned DNA; note = element_b13379d
  misc_feature 1..2: note = core
  misc_feature 3..231: note = LE
  misc_feature 232..1266: note = CDS
  misc_feature 1267..1276: note = RE
  misc_feature 25..243: note = bridgeRNA
ctgacttgtttagatgcacccagcacctgggcctcgcgggccgtagggtgcgaggtcggtggccggctggctcccaagctccttgccaaccttctgggtgtggctctctcatagcgtgccggccgaccaccgaccgccgccggcgtggctcgatagaggcgtgagacgctccccggaattcaggttgcccgtcgcggcgctccatcgtccggcagcccgaggaggcaccaggtgatcacgatcggcatcgatccccacaaggcgtcgcatactgcggtcgcgctcgacggaggaggacgcgtccagggcgagctgcgatgtctcgcgaaccaggccaccctcgagcggctcctgcgctgggcggagcggtggcccgagcggatctgggccatcgaaggcgccgcgggtctcggtcatcttctcgcgcagcagctcgtcgcacgcgaggagacggtgctggacgtccccgcgacgctggttgcccgggcccgcctcctcgctcctggccacgggcgcaagaccgacggcatcgatgccgcgagtgtggcgacggtcgcccagaaccaaccggacctgcgccgcgtcggtcctgaggaccacagcgccgtactgcggctcctgtctgaccgccgtgacgagctcagcggggagcgccgccgggcggtcaaccggctccaccgcctgcttcgtgatctgcgtcccggcggtgccccgaccgagctgtcggcggcgcgggcctcggagctcctcggccacattcgaccaggagcggtcgtcgacctcgagcgcaaggcgatggctcgtgcgctcgtcgccgacctgcggcggatcgaccgggcactcaccgagaaccggagccgctgcgccgcggcggtggccaccagtggcacctcgctcacggcggtctttgggatcagcgatgtgctcgccgcgaagatcctcggccacgtcagggacatcacccggttcgggtcggcggatcgcttcgcgagctacacgggcaccgccccgatcgaggtctcgagcggcgaggtgacccgccatcgactctcgcgcagtggtaaccgctcgctcaacaacgcgcttcacctcgcggcgcgggtccagacgatgcatccgggccccgggcgcgaccactacggacgcaagctcgccgagcacaagtcctctcgcgaggcgctccgcagcctgaagcgccagctcgcgaaggtcgtctatcgccatctcgtcgccgaccaggtccgtcgcctggacctcgcctcttgacatagaggcg

SEQ ID NO: 7136 - DNA, 1367 bp, unidentified
  source 1..1367: mol_type = unassigned DNA; note = element_b135dcb
  misc_feature 1: note = core
  misc_feature 2..86: note = LE
  misc_feature 87..1088: note = CDS
  misc_feature 1089..1367: note = RE
  misc_feature 1137..1359: note = bridgeRNA
caatgggatggacgcccccactcgcaacggcatcgatgtgccaaagtggaagtgtcagctaccacctgaacgagaggggcgtccacatgaaggttacgacgatcggcttcgatttggcaaagaacgtgttccaggtgcacggggttgatgagcgagggcatgtcgtagttcgcaagcagctgcggcgagaccaggtcgcgatctttttcgcgaacctgccggcctgcctggtcggcatggaagcctgcggcagcgcgcatcactgggcgcggaagctgcaggggtttggacacgaagttcgagtgatctcgccgcagttcgtgaagccgtatgtgaagagcaacaagactgacgcggccgacgcggaggcgatttgcgaggcagtagtgcggccgagcatgcgcttcgtgcccgtcaagacggtggagcaacaggcagtgctgtccgtgcaccgagtgcgacagggcttcgtgaaggcgcgcacggcgcaggcgaaccagatccgcggtttgttgactgagttcggactggtgctgccgcagggcattaccaatgtcatgaatcgcgtgccgcaactgatcgatgcggctgctgatctgcctgcatcgatgcggcaactgctcgatcggcaggtcaaggaacttgaggcgcagatcaaggcctggcacctaggcagtgaattgagccgcaagctcgagaagatccccggcatcggtgcgctcgcggcaagtgcgctggtcgcctcgattgccgatgccaggagcttcaagaacggtcgtcagctggcggcgtggctgggcctcgtgcctaagcaggattccagcggcggtaagccgaagttgctcggcatgagcaagcgcggcgacacttacctacgaaccctgctgattcacggcgcgcgttcggcgatcatagcggcgcagaagaaggctaagccgaacgtctggctgtcagggttgcttacccgacgacatccgaatattgccgcggtggcgctggccaataagaatgcgcgcaccatctgggctctgctcgcccatgagcgcgaattccgaccggattacatgccgcggcctgcaacggcttagcgtcgttaacgaacacaagcagtgaactcagacgaaggagatcgacccaccgattgctaaggcgttcacgcagtgatggcaaacaggtcagaccttggttggctaaacccagaatgactgcagcacctcgagtgcgagaaagcgattgggagctgaccagccaatcccatcagggacagcggcacgcgaggccgcaaccaaagtccggatgtacgggtgcaatctgttccttgctgctattgcgaactgagctccttgcaaaccgggggcgtccatgta

SEQ ID NO: 7137 - DNA, 1401 bp, unidentified
  source 1..1401: mol_type = unassigned DNA; note = element_b13cfbc
  misc_feature 1: note = core
  misc_feature 2..87: note = LE
  misc_feature 88..1110: note = CDS
  misc_feature 1111..1401: note = RE
  misc_feature 1161..1393: note = bridgeRNA
caatgtaatggactcctcccacccaaacggcatcgcaatgtgccagactgaagaaggtcaacagtcaataggtgagaggagtcagttatgaagattaaacgaattggtattgatttagcaaaaaaggtttttcaaattcatgctgttaatgaacaagaagaagttgtcatcaggaaaagtgttaatcgaagtcaattgaaaaagctgttacacaacattgagcccaccacaatagcgatggaagcctgtggtacttcacattattgggcgagagaaatgatggcgctgggtcacaatgccaaattgattccgccacaatttgtaaagccttatgtgaagagacacaagaacgatagtgttgatgctgaagccatatgcgaagcagcttccagacccaatatgcgttacgtcactgtaaaaacggttgatcaacaagtgatgcaaagtattcatcgtgttcgcagtcggatcgtgagatcaagaacggcattaatcaatgaaatacgaggtgtattggctgaatttggcattgtgattgatgatttgggtgtttcggcggttcgccgaaaaattcccgagttgttagaagacggtgataatcaacttccatttgtttttcgggaattattaagtgaactctatgaagagttgctatcaaccgataaacgattggagtcgatgacgaaaaaaatcgtacaacatggcgtagtggatgaacgcgtcaaacgattgcaagatttgccaggcgttggtcctataacggcctctgcgattgtgtcatcgataggtgatggcaaacaatttaaaaagagtagagatttttctgcgtggttaggcatggtaccgaatcagcattcaagtggtggcaagaattgtttgggaagtatcagtaaacgaggggatagttacctgagaacgctgttgatacacggggcaagatcttgcatgaaagtggtggaaaggcaaccgggtagaaaaagtgattggctaaaaaaattgatggggaggcgcaataaaaatattgcaacggttgctctggccaataagcatgcccgaataatttgggcgatgctgacaaggaatgaacattattgcgcagggacaatgtaaaagcggttaatcagtgggtgtgttattgcaaggcgtggtaatgacataaatgttccgacgattgcggaataattgtgctaatgaaaaacagattggatcgtcacaaagtcacttcgtgcgacccgtaggttccctgtgaaagcaaaaccgctagggcgattgaaactttgtgagcgaacgcaacattatggctcgaatcgttaagattcatactgaagtcggatatacggttgcaatcaatttctgtttaatttggttacaattatttgcaaaacgggaggagtccatata

SEQ ID NO: 7138 - DNA, 1582 bp, unidentified
  source 1..1582: mol_type = unassigned DNA; note = element_b142534
  misc_feature 1..5: note = core
  misc_feature 6..266: note = LE
  misc_feature 267..1463: note = CDS
  misc_feature 1464..1582: note = RE
  misc_feature 38..286: note = bridgeRNA
tttttagtaccataaaagtgtaagtgttacagcacatcattagtgcttaaacatttgcacttatttttttataattaagggagtaattggtctggcggaggtctttttggattaaccacatccgtaacaaaaactgtcagccatcccttattataaacattcggttaagcaggtagagaccatataggctttcgtgtaaccaactaaaatgaatcgtaataagtgcaggtggaagacaattacaaaaaatacttaggaggttacatatgataagtgtaggaattgatgtttcaaaagagaagagtactgtgtgtattttaaaaccgtatggagagattttaagttcgccttttgagattttccatacggaaagtgatttatcaggattggtaacaatgttgcagcgttttgatgaagaagtacgagtagtaatggaagctacaggagcatatcacttacctgtacttagtcatctaaaagaaaatggactatatgtatcgctaattaatccttttgtcatgaaggaatatagatgtaaaggattgcgtagggcaaagactgatagccttgatgctaaaatgatagcgaattatggtattgataactggtaccatcttgaaaactatgaatttagtgaagaaatataccaggaactaaaattgttaggaagacagtatgcacactatatgaaaatgaggatagaaagcgtacttgtgctgactaatatgttggattatacaatgccggggattaagatattgctaaatgggtgggatgagagttcaggaaaagataaattggctgactttgtagaggaatattggcattatgataacattacaaagaaaagtgaaaagcaatttgtaaacagttatttgaaatgggcagaaaagaaaggataccatcaaagcgaagcaaaagctataaagatttatgctatggctaaggaaggtatcccaactttatcgtccagtgccccatcgaccaaaatgttagtactggaagctgttcgagttctacgtgaagtagataatactctcaaattgattttaacacagatgcaagaattagcaagaagcttgaaggagtatccagttgtaagagctatgggaggagttggtgatgtccttgcaccaaaactgatagcggagattggtgatgtacgacgctttcatagtggaaaagctttgattgcatatgcaggtatagatgctccaccttatcagtcaggtcaatttgtaggaaccaatcgacacatatcgaagcgaggttcatcaacgttacgtaaagtaggatatgaaacaatgagatgcttaaagacaacaaagaatgtagaagactcagtatatcaatttatgataaagaaagaaattgaaggaaagccaaagaaagtagccaagatggcggtcttgaataaattcctacgtatttattatgcaagagtaaaagaagtgtatcggtaaaaatacatttaataaagtagatagaccagaggatttagctggtcttgtcagtatgcaaagaaatagcatatgaaaaaagataaaacctgcaacaaaaagtattgacttttgttagcagg

SEQ ID NO: 7139 - DNA, 1404 bp, unidentified
  source 1..1404: mol_type = unassigned DNA; note = element_b149a6a
  misc_feature 1: note = core
  misc_feature 2..88: note = LE
  misc_feature 89..1123: note = CDS
  misc_feature 1124..1404: note = RE
  misc_feature 1170..1396: note = bridgeRNA
caatgggatggacgcccccacccgataacgacatcgatgtgccaaagtggaagtgtcatcaaccacttaaaccggaaggggcgccaccatgcagattacgacaattggcatcgacctggccaagaacgtatttcaggtacacggggcgaacgagcgtgggaagacggtgctgcgtaagcaactgcggcgtgagaaattcgtggaattcttcgcgaatcttccgacctgcctcatcgggatggaagcgtgtggcagctcccaccactgggctcgcaagctgcaggcgcttggccacacggttcggctgatggcgccgcaattcgtaaagccctacgtgaaaagcaataaaaacgacgcagccgatgcgcaagccatttgcgaggctgtgacgcgaccgacgatgcggtttgtcccggtaaaaaacgtcgagcagcagtccgtactctcattgcatcgcgcgcggcagagcttcataaaggctcgtacggcgcaggctaaccagattcgtggcctattgggcgaatttggtctcgttgtgccgcagggcattgctcacatcgccgtgcgagtacctactctgatcgaagacgcgaccaacgagttgcccggggtatttcggcaactcatcgaccgtctgcttgaacacctgaagttgctcgaccgacaggtcgatgagatcgagacgcagatcaaggcctggcatcgtgataacgagatcagccgacgacttgaacaggtgccggggatcggcccgatcacggcgagcgcgctggccgcgacggttggtgatgcaaagaacttcgacaacgggagacaactcgccgcgtggctggggctcgtaccacggcagcactccagtggcggcaaagcaaagctgcttggcatgagtaagcgaggtgatgcgtacctcagaacattactcatccgtggagcacgctcggtgatttaccgagtcacgcaaaggaacgacccagacagttggttagtaaagttgaccgcgcgtcgaaacgcaaatgtcgcagcagtcgcgcaggccaacaagacagccagaatcgtctgggctctgcttgttcacgaccgtcagttccggcctggctacacgcctgctctcgcagtcgcgtagccaggtcggccaggcaaagcaaacttcatcgaagcacgatcacaccacagattgcacaggcaatcacgaagtgatggcaaggcaggtaagaccgtggttggcataacccgcgccgggcgaggcaccaagagtgcgtgtaagcgatcgaggcgccgaccagcaaatcccatcagggacagcgagcaggcaacgcttgtgtcaaaagtccggatgtacgggagcaatcttcctcttcacgtcgtcatgaactgagagcttggcaaaccgggggcgtccatgta

SEQ ID NO: 7140 - DNA, 1416 bp, unidentified
  source 1..1416: mol_type = unassigned DNA; note = element_b153c7e
  misc_feature 1..4: note = core
  misc_feature 5..265: note = LE
  misc_feature 266..1402: note = CDS
  misc_feature 1403..1416: note = RE
  misc_feature 13..172: note = bridgeRNA
ctccgtgaggtgtcaggcgacccgggagggccggctgtggcttgtgagtgcttgccttagtggctgaccaggagtggccgtccggctctccggggcgccctggccgctgattgagatgcgcgttccggtcgctgtttacggagatgacggcggggtgttcctcgggccaacggcacgctccgcggaacgaggaggagcgagtgagcaaggggcaggccaggtctgggccggcatcgatgcgggcaaggggcatcactgggcggcggtggtcgacgagaccggcgcgacgctgtggtcgaagcagatcgacaacgacgagtcggcgatcctgaccgcactcggcgagatcctggaactggccgacgaggtgcactgggcggtggacatcgccggcacgtcctccgcgctgctgctggccctgctcgcggcccacggccagcaggccgtccacgtgcccggccgcacggtcaaccgcatggccggcgcttaccggggcgaggccaagaccaatgcccgcgacgcctacgtcatcgccgagaccgcccgccaccgcaacgacttctccgcgatcgacgtgcccgcccagctcgccgcagacctcgcgctgctgacagcccaccacacggatctggtggccgaccgagttcgcatgctcaaccggctccgcgacgtgctgaccggtgtcttccctgccccggagcgggccttcgactactcggcccacaagggcgccctggtgctgctgacgggctaccagacccccgccgcgatccgccgccgcggccgggccagactgacggcctggctggcaggccgcggcgtgcgaggtgctgacccggtcgcgtccaccgcgctcgaagcagcgagcgccctgcacaccgccctgcccggcgaagacgtcgccgcccagatcgttgccgacctcgccgaacagatcctggccctggacgaccggctcaagcacgtcgaccggcagatcctcgagaccttccgcacccatccgcaggccgagatcatcgagtccctgcccgtcatgggcccgatactcggcgcggagttcgtcgtcgccgccggcgacctgtccgcctacctggacgccggacacctggcctcggcggccgggctggtgcccgtcccacgtgactctggccgcaggaccggcgacctccaccggcccaagcgctacagccgccgcctgcgccgggtgttctacaggtccgcccagaccagcatcgtccgcgagggatcgaaccgagacttctccctcaaaaagcgcggcgagggccgcgaacacgtccaagccgtcatcgccctggcccgccgacgcgccagcgtcctgtgggcactcctgcgcgacatccgggtcttcacctccaccccaccggtcgcgcacgcgatttgacttcgtcattgaga

SEQ ID NO: 7141 - DNA, 1362 bp, unidentified
  source 1..1362: mol_type = unassigned DNA; note = element_b157edc
  misc_feature 1..2: note = core
  misc_feature 3..85: note = LE
  misc_feature 86..1117: note = CDS
  misc_feature 1118..1362: note = RE
  misc_feature 1100..1334: note = bridgeRNA
tgatggggtggacggcccccacttccggcatcggagtgcctaagttggtggttgttgagagccacacatgaggggagccggccagatgaatattgtcacgatcggtcttgatcttgccaagcattggtttcaggtccacggcgtcgatgcgcaaggccgggttgtggtccgccgaaagctgcgacgcattgaagtgctggcctatttcagatcactggagccctgcctggttggcatggaggcctgtgcgactgcgcatcattgggcgcgcgagctggcgctgcttggccacgagttcaaactgatgccgcccggttatgtcaaagcctacgtcaagcgcaacaagaacgatgcggcagatgcggaggctatctgcgaggcggtgacgcggccgacaatgcggtttgtgcccgtcaaaacatgcgatcagcaggcggtgctcatgctgcaccgggcatgttacctgcttgtccgccagcgcaccatgctggtcaatgcgctgcgtgcccatatggcggagtttggcatcatcgcgccacagggactgcaccatgccgaggaactgaccaagcagcttgccgaaggacaggatcgtcttccggagcttgcgcgatcaattctgctgaccatcgtagaccagctgcacgacaccgccgcgcgggtgcgcgacatcgaaatccggctaaccaagtggcacaaggaaagccgggtgagccaactgctggcaagcattcccggcatcggcatcatggctgcgaccgcgattgcagccacagtcagcgatccgtcactgtttcgttcagggcgtgagttcgccgcttggctcgggatgacgccacgacagaactcgagcggcggcaaagaacggctgggacgaaccagcaaacgcggcgacaaatacattcgctgcctgctcgttgccggtgcggtggccgtcctgcggcacacacgcacgcgaaccaccaaagacgctgcgtgggttcgagggctgctggcaaggcgaccggcgaaggttgtgcccgttgcactggccaacgagaccgcccggattgcctgggccgtcatggcacggggtgaaagctacaggggtaacgaagagatcgtgcaggcggcataaccgcaacctgcacgtatgcgagggtgaagagaacgttgatggcaaacggtcgagccgtagattcggaagacccggataattcaacgcgcaaccaagcgcgtagtcttgatagggacccaatccgcgaactccatcagggcccgcggtcatatgcaccgcaccgagaggcgggacatatgactgcacctaaccgcagtgccaaaaaaacgtgctcaaccccttcgcaggtgggggccgtgcaccta

SEQ ID NO: 7142 - DNA, 1423 bp, unidentified
  source 1..1423: mol_type = unassigned DNA; note = element_b15ac78
  misc_feature 1: note = core
  misc_feature 2..126: note = LE
  misc_feature 127..954: note = CDS
  misc_feature 955..1423: note = RE
  misc_feature 1182..1422: note = bridgeRNA
attgaaatgaacgcgtcccacccgtgaacgtgagagcagaagcaggaggtggatcctcgcgggccaacggcatcgaagtgcccaggtggaaaatgcacgcatttcccggcaaccggaggatccacgatgaacagtatcgcagtgggcgtcgacatcgccaagcaggttttcgaggttcattacgttgaccgggaaaccggagagatcgtgaacaagccgatcaagcgggcgaagtttctcgagcacttcgcgaaccgtgcacggtgcctgatcggaatggaagcatgcggcggtgcgcaccactgggcgcgagaactgacgcggatgggtcacgaggtcaggctgatgccggcggagttcgtgaaggcgttcaacatccgcaacaagaacgacgcggcagacgcgcgggcgatctggctggcggtgcagcagccgggcaagccggtggcggtgaagaccgagatgcagcaggcgatgttggcgctgcaccggatgcgcgagcagttggtgaagtttcggacgatgcagagcaacgggctgcgcgggttactgacggaatacggcgaggtgatgagcaagggacgggcgaagctggacaaggaaatacccgccgtacttggccgcatcgccgagcgcctgccggcggcgctgatcgatacgttgcgcgagcagtggaacgggttggcaaagctggacgagcagataaccgagatcgagcgccggatgcgcgaatggaagaaggaagaccgggccgtgaagatgatcagcgagattcccggtgtggggttgctgacggcaactgccgcggtggcgatgatgggtgacccgaaggcattccggtcgggacgtgaatttgccgcgtgggcgggcctggtgccaaagcagaccggctcaggcggcaaggtgaacctgcacgggatcagagaggcgacatgtatctgcgcgcgctgctgattcacggtgcgcgtgcggtattgacgcatgcgaaggaacccggtccgtgggtcgagcagatgaagaagcggcgaccaacgaatgtcgtgatcgtcgcgctggccaacaagatggcgcggacgatctgggcggtgctcgcgcatgatcggccgtaccggaaggactacgtgagcatgaaaccggcctgaacggtttacgcacggtagaagatcaacgtttaacacagggtgaacgtcgaaaggttgcgcagcaatcgagtgtgatgacaagccaggtaggaccgggactcactaaacctgaattgcgtaacgagcttcgagctcgttaggagaatgaggtgtgagtcagcggatttcataggggcccgcagcggcaggaccggctgcaatcaggccggatatagagacgcagcccatcctgtctgtcagaaacgcaagaaagctgttgcaaacgggacgcgttcatatag

SEQ ID NO: 7143 - DNA, 1333 bp, unidentified
  source 1..1333: mol_type = unassigned DNA; note = element_b15c6ba
  misc_feature 1: note = core
  misc_feature 2..74: note = LE
  misc_feature 75..1100: note = CDS
  misc_feature 1101..1333: note = RE
  misc_feature 1101..1329: note = bridgeRNA
taatgaaatggccagcccgatccctgcgatcgtcctaggataagaggttcgatccaacgtagagggaggctgacatggacgaggtcacgctgatcggcatcgatctgggcaagcatgtgtttcatattcacgggcaggatgcgaagggccatgcgatctttcgcaagaagctttcgcgtcagcagttgctttcgttcttcagcaatctcagagccgtcactgtcgtcatggaagcttgtgctggttcgcactggctagcacgcaagctgaacgcaatggggcatgtgaccaagctgatttcgccgcaatatgtgcggccgttcgtgaagagcaacaagaatgactacatcgatgctgaggcgatctgtgaggccgcgtcccgacctgcgatgcgcttcgtcgagcctcgaacagaagcccaacaacttctagccgcgttacatcgaacgcgtgagggtttggtgaccgaacgtacggccaccatcaatcgaattcacggaatcttgctcgaatttggcgtcgtggtgccaatgtccaaagcaaccctgcgtcgtctgcctgatgtcatcgcgatccatgatcttccgcttaggcttctccaaattattcaacgactgcacgaacactataaatatctcgacgcgcaagttgtcgagaccgagaaggaactggtcgcacagcttcatgaggacgagaacgccgctcgattgctttcggttccggggatcggccccatcacggcaagcttgctcgcatcggagatcggaagcatcgcgcagtatgtgggtggaagaaatttcgcggcgtcgatcgggctggtcccacgtcagaagagcacgggcggacgaacgacgttatgtggcatcagcaaacgcggtgacaaacatctgcgtcatctgctcgtacaaggcgcgcgtgccgtcatacaacgcgtgcacaagcgtaacgacaggcttggagaatggattcgttcgatgttgagtcgacgacactcgaatgtcgttgcctgcgcgcttgccaacaagcttgcccggattgcatgggccgttctcacaaaacacacggattatcacggctcgttgttggtccgcacaagttgagattttgctaaccaggtttgcgactgctggagattgatggtcaacggctcagcgaccggacgaataacctgacaagttctacagctcacaggcagctgccgacattttgaggttcgaccggtgcggttttcatctcggaacatcggacgggcgtccggcacgattccggatagatttgcgcaagccacacactgtcaaaaccaaaggttgcaaaattcgggctggccatagat

SEQ ID NO: 7144 - DNA, 1418 bp, unidentified
  source 1..1418: mol_type = unassigned DNA; note = element_b15d78e
  misc_feature 1..2: note = core
  misc_feature 3..90: note = LE
  misc_feature 91..1119: note = CDS
  misc_feature 1120..1418: note = RE
  misc_feature 1187..1415: note = bridgeRNA
cgatgtgatggtctcttccctcttagcttcggcgtcacaatgcgccattattgtgtattcgaatccacaataaggaagaggaaagagaccatgaataatgctactacaatcggactggatatatcgaagcgagtctttcacttggttcaactcgatgaatcgaacaacatcatgatgcgaaagaagttacgccgctctcaacttgaaccttttttcagtgaattgccgatttgtattttggcgatggagtcttgtggttctgctcattattgggccaggaagtttattgccatgggccataccgtgaagctgttaccaccgcagcacgttaaaggttatctacgagggcaaaaaaatgatttcaatgatgcgctagcgattgccgaagctactgttcatgctgcaatcagaccggttgggattaaaacccttgagcaacaagatgaacaggcccaacaccgaatgcgaagtttgatcattagggacagggtagcgctgagcaatcacatccgaagtttcttgtatgaaagagggattgtgctcattttgggtatttccgttattgagaaacaagtacccagtctacttgaagatgcagagaatgatttaagcgataacgggcgggaattgctcgctcgcttgtaccaacaattcgaacgcctctcagaagatgtgcaatggttcacgaagaggatcgaagcccaggcgaaacaagatgaaatctcggtccgactcactgcgatccccggcattgggccgattgtatcgagtgcgctaaaaggttggatgggcgatggtcaacacttcaaaaaaggtagggatgcctcagcagcactcggtcttgttcctcgtcagcatagtactggcggtatagataagctgttaggtatcacaaagaaaggtgactcgtatgtacgcgccctggtggttcacggtgcccgatctgtcgttgtacgttcagctaacaaatcagactcccttagcctttgggtcaacagaatcaaagagcgacgcggatacaataaggccgtcatcgctttggcaaacaaaatggtccgtatcgcctgggtagtcattgccagaggtgaagactatcagccaaagatagttgtggcttaagagatggaagaaaacagcttgcagagtattgttagctggaaactagaatacaggcataagccagtttttgagttgcgatggtagaatgcgagtgatgatacgaagggtcaaaccgacacgctgaaaacctgtgaagcgccgcggctgaaaggccgaccgtacgattaggacagtgtgtgcgatttacatcaaggccagggaaaccattggtatcccgatttaaaggccggatatacgacagcaacccaaatttatcatcaagagcagtctatcgttgcaaaacgggaagggaccatata

SEQ ID NO: 7145 - DNA, 1540 bp, unidentified
  source 1..1540: mol_type = unassigned DNA; note = element_b164570
  misc_feature 1..2: note = core
  misc_feature 3..242: note = LE
  misc_feature 243..1421: note = CDS
  misc_feature 1422..1540: note = RE
  misc_feature 6..222: note = bridgeRNA
cttgtattatagagtagtagtgattagagcccctctccaagggctgtatgctacactgtaagggatgttgtggattggtggccgcctcctaccacaagatggtttcagaaaggttccaaccacagtcccttgcatttttgttaattagttaaataccgccagacggttgatgtagaacaaggctacaaaagtaaggaacactgtggatacagcatcacaaatttaccgccggagggattactatgatttctgttggtattgatgtctcaaaagataagcacgattgtttcattgtcaactccgagggggaagtcttggcggatgtgttcactatccacaacaccatggatgggttcaacttccttttgcagagaatccgagagtgtaccatgccacaggacaaaataaaagtagggcttgaggctaccggacattacagttacaatctgctcgggttccttctcgacaacggtctacccacctatgtcttgaatcccttgcgcacaaacctttaccgaaaaagcctcagtctcagaaagaccaaaaccgaccgggtggatgcacgaacgattgccactatgctgttatccgatgcgggcctcaagccctacacagatacagcataccacaacgaggaattaaagtcactgaccagataccgttttgacaaagtgaaagaacggacaaagctgaaaagctctatttcccgattggtctgcatcttgtttcctgaactggagaagctggttcccacacttcacatggcctctatttacgccctgttggaggagtttcccgacgcaaaacagatcgccgcagcccatttgacaaggctgaaagcacttcttgaaactgcctccaaaggccattacaaacgggatatggcactgaggattcgggatgccgccagaaactccatcggagcatttatgcccgctaaatctcttgaattacagcacactatccgccttatccgtgaactggatgccgagattgctgagattgaggaacgaattcaatccattatgaatgatctccattctcccattactacgatcccagggatgggggttcgtatggctgccatgatcttagctgaagtaggagatttcactcggtttgtctccccggacaagctgttggcctatgctgggatgtctccgtctacctaccagtccggacaactcaagaattgctaccctcacatggagaaacggggctcgcgctatctgcgctacgccctttacaacgcaaccaaatgtgtctgccactggaacccgaactttgccgcttatcttgccaagaaacgggcagagggaaagcactataatgtcgcgctttcccatgccactaagaagttggttcggctgatatttgctatggaaaaatccaagcaaccctattcccagttggcagcataatcccaccctctcatcctacaccggggttctttcgaacctctgctttgtcatgcacttttgagccagctgcttgcgttgccaccaccactcattttaagagttgacatctgatagttaat

SEQ ID NO: 7146 - DNA, 1428 bp, unidentified
  source 1..1428: mol_type = unassigned DNA; note = element_b170a8b
  misc_feature 1: note = core
  misc_feature 2..220: note = LE
  misc_feature 221..1411: note = CDS
  misc_feature 1412..1428: note = RE
  misc_feature 9..223: note = bridgeRNA
ccgttacgttcttcgtggccccagaatggggttgttcggctactgggcccggcatgactaagtgcccctgtcagtcatgatccggggggtgttgtcaccgggtctggtggtgttggtggatcgctgatagggacatggcctgagttgttgaggtctcttcgtaacgtgggtgccggacgccgacgccgtgccgccgaacgctggcgaagggagaacgaacatgtcggatccggaagtattcgtggggctagatgtcggcaagtctgagcaccactgcgtggccttggacacgtcgggcaaccgactggtggatcggccgttgctcaatgatgaacaggccctgcgggctgtgttctcagagctggtcaaacatggccagacagtggtggttgtagatcagccggcaagcattggggcgttgccggtagcagtcgcccaggcgatggaactggacacggcgtatctgcccgggttggcgatgcgccggatcgccgatctgtaccccggggaggccaagaccgacgcccgggatgcctacgtgatcgccgatgcggcccgggtattgccacacacgttgcgctcagtggatatcgccgggccagccatggccgatctgacggtgctgatgggctacgacgatgatctacgcgaccaagtcacctccgggaccaaccggatccgtaacctgctgctgggcgtccacccggccctggaaagggctctgggcgcgaatctggcccacccggcggtgttgggcctgctggcccgctacggcgggcccagtgggctacgtaaagccgggagggccaggatcgacaagaccctggccaagaaggcgccgcgcatgcacgcccgcctaaccgaacggatctggacggcgctggcagagcaaaccgtcgtggtcgccggaaccaccgccgtcgaggctatcctgcccaagcaggccgcggcgcttgctgacctgctcgaccagcgcgcaagcatcgcccgtcaggtggagaaggttcttgatgaccaccctcttgctgaggtcctgacctccatgcctggagtcggggtcaggacctcagcgcggattctggtcgagatcggtgacgccagttccttccccacagcagggcacctggccgcatacgccggactcgcgccggccacccgccgatcggggtcctccatcaagggtgaacacccggcccgcggcggcaacaagcgactgaaaaacacgctgttcctgtcagcgttcgccgccttgcacgaccccgaatcccgggcctactacgaccgcaaacgcgctgaaggcaagaaacacaacgccgccctgatctgtctcgcccgccgccgcaccgacgtcatctacgcaatgctccgcgacggcagctactaccacaccaaaaccccctcagctgcttgacaaacaccatagggaca

SEQ ID NO: 7147 - DNA, 1455 bp, unidentified
  source 1..1455: mol_type = unassigned DNA; note = element_b176dc2
  misc_feature 1..3: note = core
  misc_feature 4..115: note = LE
  misc_feature 116..1153: note = CDS
  misc_feature 1154..1455: note = RE
  misc_feature 1199..1401: note = bridgeRNA
agatggggtattcggccggcgccgtttccccagacgatgttgaggaactgcgcgctcgcggctgatgctaaactcgacggcattgcaacagcctcacgcagtggagaagcgcagcatgaaatattttgctgctctggacgtctcggtcaaagagacctcgatttgcatcgtggatgaagcgggcaagatttgcagtgaatgcaaagcgccaagctatcctgaagatctggttggcgctctcaagaatcccaaatggcgacttgaacgcattggcttggaagcgggcccgttgtcgcaatggttgttcagtggcttggctggggcgggattgccagcgatctgtattgaaacgcgccacacgaaggctttcctgcaagcgcaggtgaacaagagtgatcgcaacgacgcgcgcggcatagctcaaatgatgcgggtcaatctgtttcgccatgtacacgtaaaaacgctgactagccaaaagcgccgggcccttctcactgcacgcaagcttttgcaggaaaacgcagtagccttcgaaaacgaaatacgcgggttgctaggaaattttggattcaaggtcggcgtcgtcgcagtaggaaaattcgaggagcgcatccgtgagctcgtcgccgacacacctgagcttatcgaaattatggaaccgttgctgaccgcgcgacagaagcttcgcgactctttcaatacgctccatcgaaaattactggcaatcgtccgcgacgatgcagtttgcagacggttgatgacgatccccggggtcgggcctgtcgtatctctggcgttcagcgccaccatcgacattcccgcccgcttcaagaactcgaaagctgtcggtccatcgttgggattgacgccccgattgcatcaatctggcgaaagctgccggatcggcggcgtttctttatgcggagacgcaatgatgcgatcgcttctctacgaggccgcgcaagtcatgatgacccgcgtcaaaaaatggtcatggctaaaagcctgggcaatgaacgtcgccaaacgacgcgggcgccaaaaggcgatggtcgcgctggcgcgccgattagcggtcatcatgcaccgcatgtgggccgacggctccgtctaccgctggacgaacaaggtcccttcggcggccgtgtagactgaatttggagcccccggccttgaaaaaggagagatagccataggaggcctgccgataggcggaaagatgtccttcgcgggacgatggatgaggtgagttcggaaatgggtcttgtgccgatcgcgcaaagcgcaatcaggacgcgaggaagattgagccgccttgttcttctgatcccatcctgggagagccagccggctgatcccgaagggaagcgcggacccgagaatgtcatcaaccgtcaacgtcggagaagctgagcggatgtacgcgcttgactccgaagggccgaatagaga

SEQ ID NO: 7148 - DNA, 1202 bp, unidentified
  source 1..1202: mol_type = unassigned DNA; note = element_b181731
  misc_feature 1: note = core
  misc_feature 2..171: note = LE
  misc_feature 172..1176: note = CDS
  misc_feature 1177..1202: note = RE
  misc_feature 36..202: note = bridgeRNA
tcttaagtttaatttctctaaattttgatagttaaatcagaaagaaccaaagagaggaataagattatattaaccgtgggaacttcagattccgtcaacattgataatcccctctcttttctactttaatttcgtttagttctgtgagacctggatctcgtttttaagtcgatgaaaaccaaagtagctgttctttccaatcaatctgttatggataaaattaaacatttttacggagtagacattagtaaatctttctttgatgtagttgatcaggacggaaagcatgatcaattttcaaatgatgtaaaaggctttaaaagcttcctaaaagctattaaaaaagatagcttggtagttatggaagcaaccggttattaccattacaggctagctcaacatctctatgagaaagatatcacagtatcggttgtgaatccactttcggtaaagcgttttattcaaatgaagctctctaagatcaagactgataagagcgatgcgaaagcaatatgtgagtatgcccaggcgaatgaagttccattatatacagcaagaaatgcagttcaggccgaatgcttgcaactcttgagtctacaggatctttacctgaaacagcgtactgccgtcaagaataaaatacatggagagaaaactttgggaaccccttcgaaaacaatcagtcgttctttaaatcgaatgttgaagcagttagagaaagaattagcaaagattgaaaccaagctggagaccttagtaaaagaaacgcagcaagatcaattggagcaactaactagcattccaggcatggggaagaagaccgcgatgctattgattgtacttacagatggatttactggttttgagaacgccagacaactttgttgttatgccggaatcactccaaccatcagacagtctggaaccagtgttagaggtagaagcagaattagcaaggttggaaaccgaaaactgcgtaatttattgttcatgtgtagctttacagcctgcaagactaataaggcatgcagggaattatatgagcgaatagtagagaaagggaagagtaagaaactggcactgattgctgtgtgtaataagctcctaaaacaagcatttgcaattgctaaatcaagaacctattaccaggaaaattatatgtcgaaattagcttaaaagtacttggattttaccttagttct

SEQ ID NO: 7149 - DNA, 1311 bp, unidentified
  source 1..1311: mol_type = unassigned DNA; note = element_b183aef
  misc_feature 1..3: note = core
  misc_feature 4..215: note = LE
  misc_feature 216..1166: note = CDS
  misc_feature 1167..1311: note = RE
  misc_feature 37..185: note = bridgeRNA
gcttgtgtcttgagaggtgattagaatctggagtgagagcggtgaatggcaagctgaatgccgcaggtgccttgagcacgagtgggagcacaagctgccattcaccgttccactttggcgagagcccgagcagttggatgcggctctgatctcgaatcacaagcgtgggccaagccaaagtcctctcactgtgtagagtttaggaggttttggtgatggcttccttcttgggtatcgatgtttccagtctctcccttgatgttgcggtgcggccacagggcatcaaaatgcatttaagcaacgatccaacagggtttgaggcgctactggagagccttcgcaagctcagtatccagcgcgtcctgttagaggcgacgggtggctacgagcgagatgtcatgcgttttctacaggacgctggctacaaggtcatacgcgtcaatcccaggcgagccaggtcattcgctgactctttaggcatcaaggccaagactgacgccatcgacgccgaggttctggcgcactatgccgaagtcattccagatcaaccctctctgcaaatcagccccgaacgagcgcttctgcgagagttgcttcagcaacgtgatcggttggttcaacagcgagatgacgacctgcggcgcctgaagcaggtgcaatcgactgcagttgctaactacctgaatgccaatctgaaacacttcaaagcgcagatcaagctggttgagcatgagatcgaacagcaaactgcgatgctgaacgacgaacgggttacccaactgattaaagtgaaaggcattgggatggtgacagcgggcaagctgatagcgctgctgccggagctgggtcgggttgaatcgagagaaattgcctccctggtcggagtggcacccttcaaccacgacagcgggaaatccatgggcaagcgctctatctctggcgggcgatttgaggtcaggcgatcgctgtacatggcatgccttgtggcgatgaaatacaacccagcactcaaggctcgttatcagtcactgcgggaacgcggaaaactgcccaaagtcgctatcgtggcctgcatgagaacattcatcgtgcggttgaatgccatgctcagaacgggtacatcatggctcgatctagtgctaccgcagcctgaaagtacaacttaaatccagtacgcagcgtgagccgcgtggaagcgggcttgcccgcgaagccgacaccgtggtggatggcacgggcttcgcccgtgttcgcgggcaagcccgctcccaccgggatcgcgccagcttttagaaattgagcaagacagtt

SEQ ID NO: 7150 - DNA, 1564 bp, unidentified
  source 1..1564: mol_type = unassigned DNA; note = element_b185e7d
  misc_feature 1..2: note = core
  misc_feature 3..229: note = LE
  misc_feature 230..1435: note = CDS
  misc_feature 1436..1564: note = RE
  misc_feature 1..241: note = bridgeRNA
gtatgataattaggaagttaattaccacacattccctttcttttaatatcgtggttcaatacaattcagatactatgaactttttatattttcttgtagcttgactacttaactggagtgtattgccgctacttttatctgaattgtttatcagctggatgtgcctgagtggtttcactcggagtacttatttctatcaagtctacgatgataatcgttggtggacatcatggtatcagactttacgaaagggaggtacaacctcatgaatatcttcgttggcattgacattgccaaacttaatcatttcgccgctgcggtttcttccgacggtgaaatcattcttgagccgtttaaattcacaaatgacgctgatggcttccttctgctggtctctaagctcgaatcattcgacaagagcagcatcatcatcggtcttgagtcgacggcacactacggcgacaaccttgttcgataccttgttgctgagtcttaccaagtgtgtgtgttgaaccccattaaaacctgtcaggttcgtaaaaataacattcgcaaaaccaagacagataaggtcgacacttacattattgctaaaactcttatgatgcaggacagcctcaggttcgtcagtttctatgaccttgacatgatggatcttaagaacctggcacgttttcgacagaaaaccattaagcagcgtaccaggttaaagatccagctaacgacctatgtcgatcaggtctttccggaaattcagtacttcttcaaatccggtctgcatcagaacgctgtctatgctcttttaaaagaggctccttctcctaaaaagatcgcttccatgcatttgactcatctggcaaatctgctcaaagtgaactcacacggacactttaaaaaagagcaggccaaagaattaagagttctcgcacagaagtctgtcggggctaacgacagcgccatatctattcagataactcaaaccattcaacaaatcgagttactggatagccaattaaataagattgaagctgaaatggcagacatcatgcagtttcatgattctgtcattatgaccattcctggtatcggatttatcaatgggggaatgatccttggtgaaataggtgatattcaccgtttctccaatcccagtaagctgcttgcctttgcggggctggatccgtctgtgtatcagtctggtaactttcaggctaagacaacaaggatgtccaaacggggctcccgtgttttacgctatgcccttgtaaatgcagcttggaacgttgttagaagcaacgcaaccttcaaggcttattacgatgccaagagggctgaaggtcggtctcattacaatgcactggggcactgttccggcaaactcgtcagaatcatctggaagatgctcactgacgaagttgaattcaacctcgaataagaggtatggataccaatatcgatagattttgaaaaagcacccttagggagctttattaaagttacccttttttaccatcgatatgaaaaagaaattttttgctaattcatggttgacttttcatagctg

SEQ ID NO: 7151 - DNA, 1204 bp, unidentified
  source 1..1204: mol_type = unassigned DNA; note = element_b18636f
  misc_feature 1..2: note = core
  misc_feature 3..220: note = LE
  misc_feature 221..1189: note = CDS
  misc_feature 1190..1204: note = RE
  misc_feature 6..225: note = bridgeRNA
cttgtatgttcagacccgaccagcgcggtaaagtccgaataccgtcgaggtaaccggactggaccgtgtagcctgataacaccttgggccggcgagcgtgctcgcaagcccgtccctgagtcgattgcgcacggacccggcgctggtcttcctgatgcccgaacggttattcgagcggcctcgcgtcggctcgcatgcacaaggaagggatacgaagaccatgtctggatcacccgtgacgataggaatcgacgtggccagcgcgcacgttgatgtggcggccactggcgccgagcttccggcagcactcggtcgcgtcgacaacgacaccgagggccacagcacgttggccgacgggttggcgcggctgaagcctacgctggtactgatggaagccaccggcggctacgaagcggcgctggcgtgcgcgctgcaagcggccggacttcgcgtggccgtggtcaatgcgcgcatggcgcgcgacttcgcccgggcaatgcagcgactggccaagaccgaccgcattgatgcggcaaccttggccgagtttgccagcgtcctgacgcgcaggtccgactgtgagcggttcatccgccccttgagtgactccgagcagcaggatctcgccgccctggtgacgcggcgccgtcagttggtgtccatgcaactctccgagcgccagcggttgcgactggcgcgccccgtgacacggcccagcatcgaagccgtgctcgaggcgatcgcacgccagctcgacgacgtcgaggccacgatggcgcgccgtgtcgaacagcaccacgccccaatgaccaagctgctgcagaacgtcgccggcatcggcagagtggccgcggccaccctgattgcggaactgcctgagctcgggcgcctcaatcgccgtcagatctgcgcgctggtcggcgtggcaccctacgctaacgactctggcgctagccgcggccgacggcacatcgtcggtggccgcttcgaagtgcgccgagtcctctacatggccacgctgaccgcaacgcgccacaacgcggccattcgcgcgttctacgagcgcctcgtggccgcaggcaagcacaagaaggtggccctcatcgcttgcatgcgcaagctgattacccacctcaacgcaatcgtccgtgagcacttgaacgctcaaaatcgtccctctatcacttgacactcgacacggtta

SEQ ID NO: 7152 - DNA, 1487 bp, unidentified
  source 1..1487: mol_type = unassigned DNA; note = element_b194fb0
  misc_feature 1..2: note = core
  misc_feature 3..246: note = LE
  misc_feature 247..1467: note = CDS
  misc_feature 1468..1487: note = RE
  misc_feature 6..244: note = bridgeRNA
ctaatgggagctaccgggtcggccgccgctggcagactcggtgcctggtagccgccggtgagtgagcacttccgtcgcctggaccttgagtcctggggtcagatcgtgccctcacctgtggtcaggggtcttgatcgctgatgggatgtcgtgcccgcccggcagatggcgtgagcactggtccattaggccgccgaccggctcctgcgggctgctgatctcggatgccgagcatggaggacaagggtgctgttcgtcggagacgactgggccgaggaccatcacgacgtggaggtccaggaccaggacgggaaggtgctcaagcgggcgaggctgcccgagggaatggccgggatggcccggttgcacgacctggtcggccggttcgtggccgccgacgctgagccgtctgaggtgggggtgtgcatcgagaccgaccggggcccgtgggtgcgggcgctggtggcggcggggtacagggtgttcgcggtggaccccaagcaggccgcccggcaccgcgagatcctgggctcctccggggccaagagcgacaagggcgacgcgcacgccctggccgacatgctgcgcacccgccgccatcagctgcgcgaggtcgcgggagactcccagaccgccgaggcggtcaaggtcgtcacccgggcgcaccagaccatggtgtgggaacgcacccggcacatgctgcggctgcgatcggcgctgcgcgagtacttccccgccgcgctggaggcgtacaagcccctcggcctcaccagcgatgcggtgctgcggctgctggccaaggcccccacccccgccgcggccgccaagctgacgaccgggcagatccgcgcggtgctcaagggccgccgcgacatcgacgccaagaccgccgccatccaggacgtcctgcgcggcgatcatctgggccagggcgagatcgtcaccagcgcctacgcggccacggtccggtcgctggtcgcggtcatcaccacgttgaacgtcgagatcacggtcctggaagggcaggtcgaggcgcattttggccggcactcggacgctgagatcatcctgtcccagcccgggctggggccggtgctcggcgcccgggttctcgccgagttcggagacgcccccggacgctacgcctcggccaaggcccgcaagaactatgccgggaccagcccgatcacccggcaatcgggcaagatgcgcaccgtccacgcccggttcgtccacaacgaccgcctcgtcgacgccctccacctgcaggcgtcctgtgccctgctccacgacccgcacgtccgcgcctactatgaccagctcagaacccgcgacatcggccacaacaccgccctgcgccaggtcgccaaccgcctcgtcggcatcctgcacggctgcctcaagaccaacacccgctacgaccagacgaccgcctggtcacaccaccaccacgacctcgccgcttgacattcaacctccagggatgt

SEQ ID NO: 7153 - DNA, 1395 bp, unidentified
  source 1..1395: mol_type = unassigned DNA; note = element_b1984d6
  misc_feature 1..2: note = core
  misc_feature 3..91: note = LE
  misc_feature 92..1108: note = CDS
  misc_feature 1109..1395: note = RE
  misc_feature 1154..1387: note = bridgeRNA
cgatgagatggtctcctccctctttctagctcggcatctgaggtgccacgatggagacgttaacaaccatcgaatgaagaaggaggagaccatgtcagagattactactgtaggtctggatctggcaaagaacgtgttccatgcggtatgtctggatcgccatgggggtgaggtacgcaagaaggtgctgcgccgcgcccgggttcttgaatggtttgccaatctgacgccctgcctggtgggcatggagggctgtgcggggtcgcattactgggcccgggagctgcaggcgctgggtcatgaggtgaggctgatcccggcccagcacgtcaaggcctatgtgcggggtcagaagaacgactacaacgatgcccgggcgatagccgaggcggtggtgcgcccggggatgcgtttcgtggcgatcaaggagcaggtgcagcaggatgtgcaggcgctgcaccggatgcgcgcgggtgtggtgagcgagcgcacggcgctgtgcaatcggttgcgcgggctgttgaccgagaacgggatcgtgttgagccaggggatagggcggttgcgccgacacatcccggcgttgctggaggatggcgagaacgggctcagtggtctgtttcgggagttgctggcgcgaggttaccgccagctgtgtgaactcgacgatcatatcgagtactacaacgggctgatcgagcggggtgcgcgggagcgggaggccgagcggcggctgcgcacgatcccggggtttgggccggtgttggccagtgcgtttcatggcgcggtgggcgatgggcagggctatcgccgggggcgggatgtctcggcctcgctgggcgtggtgccgcgtcagcactccagcggtggcaaggcggtgctgctggggatcagcaagcgtggagatgggtatctgcgcagcctgctggtgcacggggcgcgttcggtggtgctcagagcaccgggcaaggaggaccgcctgagccgctgggtgcagcgcctggtggccgagcggggggtgaacaaggccacggtggcgctggcgaacaagctggcacgcatcggctgggcggtgttgcgccataacacggtctatcaaccggcctgagcacgccccaagggcgcgccctgaatacgatgtttggaggttgatcctgccgacgattgcgaaggcgatgtgagagaagatgacaaacaggtcagaccggcgtatcgaaaacctggccaagacgcgggcccctctgtgaggccgacttagcgataaggacgatacgcgcgcatttcatcaaggtcagaaggcaggcgtgccttcatcaacaggccggatatacgaccgcaatcctgtccctgtcagaaccgaccacagagccttgcaaaacgggaggagaccatata

SEQ ID NO: 7154 - DNA, 1144 bp, unidentified
  source 1..1144: mol_type = unassigned DNA; note = element_b1988eb
  misc_feature 1: note = core
  misc_feature 2..196: note = LE
  misc_feature 197..1129: note = CDS
  misc_feature 1130..1144: note = RE
  misc_feature 13..194: note = bridgeRNA
ccttgtatctggacagatgtcttttgctgtttgagcgaaggattgccggggtgggtggccacccaccccggcacggcggtgtcgcccgatgccccctcaggcagcaaccgtgacggagcctgggaccatcgccgttgtcacgcacgaccgaacagtcggttgattttcaatcgcacagacaaggcaggttaccgtgatgcggatcatttgtggagtggatgcttcgaaggcgtggctcgacgccgggatagcgccggatcgctaccagcgcttcgccaacgcgcctgagggcatagccgcgctggccgacttctgccgcgcacatggcgctgccatggtggtgatggaggcgtcgggcggggtcgagcaggaggctttcctggcgctgtggcgccagggcctgccctgcgcgatcgtcaacccggcagccgtgcgccattttgcgaaggcgatgggctatttggagaagaccgaccgcatcgacgcggcgatgattgccggctttgcggaggccaagcggatcgagcccaccccaccgccatcccaggatcagcgcaagctcaccgcgcttgcgacccggatgcgccaggtcagcgctgatctgggcgtgcagaagcagcgcctcgccagcacccgcgacgaagccgcccgcgacagcctgcgcgaggcgatcgccttcttcacccgccaggccaggatccttgcggccgagatcgcagccttggtccagaccgaccccttgtggcgcgaactcgaccgcaccttgcgctcggtcaagggcgtcgccgatcggaccgtcgccgtgctgcttgccgacctcccggagatcggaaccctctccaacaaggccatcgccaaaatcacagggctcgcgccgatcgccaacgacagcggcaaacggcagggaaaacggcccgtccgcggcggcagggcctccgtccgctcgatcctctacctcgtcgccgacctcgctcggaagttcgatcagtcgctcgccgacttccgccagcggctgctcgaccagggcaaacccaaaatggtcgtccgcgtcgctttggctcacaaactcctcgtcagactcaacgccaaagcccgcgacgccagagcaaacctcgcatccgcagtttgacaagccagatagtcg

SEQ ID NO: 7155 - DNA, 1421 bp, unidentified
  source 1..1421: mol_type = unassigned DNA; note = element_b199272
  misc_feature 1: note = core
  misc_feature 2..289: note = LE
  misc_feature 290..1315: note = CDS
  misc_feature 1316..1421: note = RE
  misc_feature 99..254: note = bridgeRNA
cctttagatttgcatttcataattattattcatattaaagttattattatgtataacttggggggtccaggggggactgaaatatgttaatattgtggaaaagttgaggcaaagtatggcaaattcgccagccggctaggtaaaacctatctcatgttttaatccatactttgcttaaaaggcataaggacagatagaaaattagggtaaaacccattaaaaaggtcatagtcctacaccttttctcaactttaagtgatatttattaatttttaaaaccttaattattatgcaaaagttcactatcggagctgacatctcaaaagacaaaatcaactttgctgttcgatattgtaatgagttcattttggaaatggaggtcgaaaacaattctaaacctctcactaaatttattaaagaaattctagctataagcaaaaagtatgctaatgaaaattttcatccttcgcttattgagtttgttatggagcatacaggtatttacaatactttattaattgcttgtcttgccgaacatcatattgtaacatatgttgtcccaggtttagagatcaagaacagtcttggtattaacagaggcaaaaatgatagaatcgatgctagacgaattgctgaatatggggtaagatttagtgacaaattaaaaccatactctttacctgataaaagccttgagaagcttaaaatgttaaataccaaacgtgctcaattagtaaaaattatgtcacaattgatagaatctgatgaggatactaaaaagttcctcggcgaagagtcttatagaaatatgagattttatattaatccagttataaaggagttgagcgcatctataaaaatgatagaggaggaaatgttgtcaattattaaaattgatgaacaattatttgaaaactatcaatttgcagtatctgtgcctggtgttggtaaggtgatagccattgcattcatatgtgctactaataattttacaaagtttgaaacggcaaaagctttggggagttattgtggtgtagtaccgtttggcagagaatcaggaaaatacagaggaaaagaaatggtctctccaatagccaataaaaaactgaagacactcctgcatttaggtgcaagagcaacaataagtggaaacaatcaattcacgaaatattatcaaagaaagataatggatgataaaaaaaataaaatgcttgctctaaataatttggcaaataaaattgttaaaacactctttgcttgcgttaagaataaagaaatgtacaaaccagattatgtccatacactagcagcttgataattacaagtggataactctgtggataagtcaagatggacaatttctaaaacacttattatacataaaaaaaatgtatataaaagttttgttgaaccatagaaaa

SEQ ID NO: 7156 - DNA, 1203 bp, unidentified
  source 1..1203: mol_type = unassigned DNA; note = element_b1a1b3c
  misc_feature 1..3: note = core
  misc_feature 4..216: note = LE
  misc_feature 217..1188: note = CDS
  misc_feature 1189..1203: note = RE
  misc_feature 21..214: note = bridgeRNA
cttgtatcttggtttcggtcgttcacaatgcggccaatatgggcgcgacagaccgtttcactcctcggtccgagctcttcgccttaagaccgttggaaagcccgggtcgtcgcgccccttacctggaggagcccgaacggttgccagggccgcgtcacccgagagggtagcgaagcccgaatccgcaaggacgggcccgacagaaggagggacacgttgagcagtggatcggaaccgggcccctacgtaggcatcgacgtctccaaggggcgcctggacgtctgcgtgcgccggggcggggctcgccaggagggcttcgccgtcgccaacgaccaggagggcatcgacgcgctcgccagacgcttgctcgggactccccccgcactggtggtgctcgagtccagcggcggcttcgagcgcccggcggccaccacgctggcgagggagggcgtggccgtggcggtggtcaacccaaggcaggcgagggacttcgccagggccacgggccgcctcgccaagaccgaccggctcgacgccgaggccctcgcccgcttcgccgaggccgtgcgcccagaacccagggcgttgcccgacgaggaagccttgctcctgggcgagatcctcgaccgaaggcggcagatcgtcggcatgctcgtcgctgaaaagaaccgcctctcgaccctcgcctccgagccggtaaggcggcgcgtccgggcgcacgtgcggtggctggagaaggagcttgaccgcaccgactgcgacctccaggcggccgtcgaggccagcgagacttggcgcgagaacgaggcgctcttgcgtagcgtgcccggcgtgggccccgtgctcgcgaggacgctcctggccgagctgcccgagcttggcaccctcacccacaggcgcctcgccgccctggcgggcgtggctcccttcagccgggactccggcacgctgcggggcaggcgcgcggtgtggggcggtcgcgcgcgggtacgaggggcgctctacatgggggcgctggtcgccgcccgccacaacccgaccatccgcgagttctacgagaggctcgtgaagaagggcaagcccaagaaggtggctttggtggcgtgcatgaggaagctgctggcgatcctcaacgccgtgatgagggatcgtactggttggaggtctattcacgccctctccccttgactttcaagacggttg

SEQ ID NO: 7157 - DNA, 1433 bp, unidentified
  source 1..1433: mol_type = unassigned DNA; note = element_b1a4c58
  misc_feature 1..2: note = core
  misc_feature 3..138: note = LE
  misc_feature 139..1161: note = CDS
  misc_feature 1162..1433: note = RE
  misc_feature 1203..1433: note = bridgeRNA
agaatgtaatgaacgcatcccaactatttgacaatggtgaaaagggcggctgatgacatgtggaacctcgcagattttcggcaacatgacgcccaatataggctccataaagctctttactgactgaggttccacaacatgaaacatatccctgtaggcgtcgatattgcaaagcatctgatgcaggttcacttcgttgacccgcacaccggcgaagtcatcgataagcagatcaaacgtgatgcgttcctggagtacttcagcaatcgcgagttttgtttaattggtatggaggcgtgtggtggatcccagtactgggcttgtgagctggaaaaactggggcatgccgtcagattacttcagggcaaatttgttaaggcgtttgtgatgggcaataaaaatgacgtcacggatgcccgtgcgatttggatggcagtacagcagcctggtggcaaggctgttgccgtcaaaaacgaggaacaacaggcggtgctgtcgctacaccgaatgcgacgtcaattggttaagttccgtacggcgcagatcaatgcactgcacggaatgctgctggagtttggggaaatggttcgcaaagggagagcgtcattagacaaggccctgcctgacgtacttgagcgaatgaaggataagttgccaccgttcttgatttgccagattgaagaccaacatcagcggcttagtgatatcgatactcaaatcgatggcatagaaaagcagctaattgcatgggcgaaacagaatgaagactgtcagcggattatgaaaattcctggtgtcggaccacttatcgccactgcagcggttgcaacaatgggagaagcgagagccttccgttcggggcgggagtttgctgcctacctcggtctggtgccaaagcaaaccggtactggcggcaaggtgaagctcttgggtatcagcaagcgtggtgacacttatcttcgcacactgtttatccatggtgccagagccgccactttattgacaaaagagccgaacccatgggtcacggaattaatgaaacgacggcctaccagtgttgcagtagtggggatggccaacaaactagcgcggacggtgtgggcgatagtggctcacgaccgagcttatgagaaaaatcacgtcagtgtcaggccgttatgagcccttcgtactgataaaaattaacgcttttaatacaaggatgaatgcagaaaggttgcgtgggcagccgtagtgatgacaacgacaggtaagaccgggactcgccaagcctgaatttggacctgagcttaaagctcgataagagaatgaggcgtgagtcagcggattacatcgaggcccgcagcaacggctgcaacaaggccggatatagagctggaactgccgtcaatgtcagaacaatcggaagccttgcaaacgggatgcgttcatat

SEQ ID NO: 7158 - DNA, 1590 bp, unidentified
  source 1..1590: mol_type = unassigned DNA; note = element_b1aa2ce
  misc_feature 1..3: note = core
  misc_feature 4..270: note = LE
  misc_feature 271..1461: note = CDS
  misc_feature 1462..1590: note = RE
  misc_feature 25..290: note = bridgeRNA
tttggtatgatattagcatagtccaaactgctgactacagtggtgacaggctatgcttattttgatataataagaaggtaatggactgacggtcatctccttagaactaagcgttcgtagcagaaagtgtcagccgccttcttgttataaaattcgattaagcaggttgtacctgctgtgtttacagcagcgttcgcatcactaaccaaaatgaattttaataagctcctgagcggaaacattacaaaatatcagaaagaaggatttatcatgattagtgtaggaattgatgtatcaaaaggaaaaagtactgtttgcattatgaaaccttgcggcgaaatacttgaatcaccctttgacattggtcacactgccgatgaactggattctcttatttctctcatcaaatcattcgatgaagaaacccgtgttgttatggaagatacaggtcactatcatcttcctgttgcgacctatttatcttctcacaacatttttgtatgctgtgtaaatgccttgcgtatgaagaagttctgctcgcaaagcataagacgagcaaaaaccgataaaattgattcgattaaaatcgcatctttcggtattacatactggaacgagcttgttaaggcttatccctctaatgttatatacgatgaacttaaatttcttgcacgtcagtattatcaggttacagctatgcttgttaaatcaaaggtgaacttctccaatcttcttgaccaagttatgcccaaaatcaatgatgttctttcaaatcaaggtgaaaatcacaagctgaccgagtttgtcagtcgatatattcattttcagaatattctcgatatgggagaaatgaaatttacatctgattactgcaaatgggcaaagaaaaagggataccgcttaaacgagcgtaaggcagcggaaatccttgcccttgctcaaaacggtatccctacgcttcctaactcccaatccgtcaaaattgccgttagtgaagccgtcaagctgatccactcaatagaggaatcacgcaataccattttagcacaaatgcaggatctttgcaacaccttgcctgaatattctgttgtcaaggaaatggattgtatcggagatacacttgctccacgtatcattgctgaaattggcgatgtacgcagattcaaaaacaagcactctctcattgcctatgcaggcattgacgctccgccttatcagtcgggtgcattccacgcttctgagcgtcatatatccaagcgtggaaacagttatctgcgaaaaacaggctacgagatcatgcagtccttaatcaaacacaaacctgccgacaatgctgtctatgactttattcagaagaaacgcagcgaagggaaatgcggcaaagaagcaatgattgcggggcttaacaaattccttcgagtttactacggcaaggttatggagttttactccgaacattaattgtagtctcaggtacatactcatcgggcgtttgaatacttccttcaaacgtcagctttgctatatcgttttttcctttgcttcttttctcaactttgttcattttgcctattgatttttcttagcagg

SEQ ID NO: 7159 - DNA, 1605 bp, unidentified
  source 1..1605: mol_type = unassigned DNA; note = element_b1afccb
  misc_feature 1: note = core
  misc_feature 2..283: note = LE
  misc_feature 284..1486: note = CDS
  misc_feature 1487..1605: note = RE
  misc_feature 15..303: note = bridgeRNA
cctactacaatgtatttatggttaaggtacacgacaaccagccgtgtccatatccatcttgttgcttaagctgttagaataagagtgcaatcggtctgacggattcctccctggaccatacgtccgttttagagtctgtcagccagcctcttattcgctgctgttcgatttatgcaggttgaactgctgagttccagtgcgttcgtgtcacaccacagtagatagaatcggcaataagataacgctggagtactattgcaaatctaattaaggagatgattctatgaacgcagttggcattgatgtttctaagggcaaaagcatcgttgctgtcctccgccctttcggcgaaattgtttctaaacctttcgaggtacttcatacttccagtgacatccatcagctgattgatttcctgaatacactggaaggctccactcgcattatcatggagcatactggcaggtattacgagcctgtggcacagtggcttactgatgctggtttctttgtcagcacggttaacccgaaactgattaaaaactatggctataactctcttcgcaaagtcaaaaccgataaagccgattccttaaagattgcacgctttgctcttgacaactggcaggagctgcgtcagtatacctgtatggatactctgcgcaatcaattaaaaaccctgaaccgtcagttcggtttctacatgaagcaaaagaccgcttacaagaacaacctcatagctcttctggatcagacttatcctggcgtaaatgctctctttgatagtcccgcccgctgtgatggcagccagaaatgggtggactttgcgtcctccttctggcatgtggactgcgtccgcggcattggccttgttgctttcactgaccgttatcaaaagtggtgtaaacggcatggctacaactttcagcgtggtaagccagcagtgctttttaaagcctcaaaagaactgatttccatgtttcccaaagattctatgacaaaaatgttgatcaaacaggccattgaacagcttaacactgtttctgccactgtggagcttctcagaacggaaatgaaccgtcttgctgcccagctgccagaatacccagttgttatggctataaaaggcgttggtccttctcttggccctcagctcatggctgagattggagatatctcgcgttttacacgccgcgaagccctgaccgcttttgcgggtgtggatcctggtgctaaccaatctggtaagtatgaagctcagagtgtacgcacttcaaaacgagggtcaccgcagcttcgtaaagcactgtttcaggtcatggactgtctaattaagaccactcctacagatgatgccgtctaccgcttcatggacaagaaacgctcagaaggaaagccctattacgtctacatgactgccggtgcgaataagttcctccggatttattacggccgagtaaaggaatatttatcctcgatttcgtaactacctatatatccttatttcagaccagcgataatcggtggtcttttttcagtgttcaaaaactcacattaaaacattttcaaaaatcattaatttactattgactttttatttgcagg

SEQ ID NO: 7160 - DNA, 1378 bp, unidentified
  source 1..1378: mol_type = unassigned DNA; note = element_b1b1017
  misc_feature 1..2: note = core
  misc_feature 3..83: note = LE
  misc_feature 84..1118: note = CDS
  misc_feature 1119..1378: note = RE
  misc_feature 1141..1366: note = bridgeRNA
tgatgctgtggacggctcctccgccggcatcgcgatgtgccatcattgcggtgttgttaggaaccgcatgggaggagccatccatggaagagattaccacgattggaatcgacattgctaagtcggtgttccaggtgcacgccgtttgcgcaaccggcacggtgctctttcgccgacaactgaagcgccgctatgtcgctcagttctttgcgggactcaaaccttgcctgattggcataggagcctgtgcaacggctcaccactgggggcgggagttggcaaatcttggccacgaggtccggctgatgccaccaggctatgtgaaaccttacgtcaagcgcaacaagaacgatgctgctgatgctgaggccatttgcgaagcggtgacgcggccgaacgtgcgctttgtcccgatcaaaacacaggaccagcggtcgatcctgatgcttcatcgcactcgtatgttgttcatccggcagcgcacgatgacgatcaacgctgtccgcgcccatcttgcggagtttggcatcatcgcgggcattgggcgtaatgggctgcaggcgctgcttgatctcatacggaagggtgaaaaggcagaaatatcgccagaagcatggctatgtctcatagcattggctgatcagattgatttgttgaagcaacgcatcctgaacatggagcggcagattctgaaatggcacagcgccaatgatctgagccgcaagcttgaaggaattcttggtgttggtccgctggtggccacagcactggcagccagcatacccgatccgacggccttccgctccggtcgtgatctaagcgcctggatcgggttggtgccaaagcaaaactcgagcggcggcaaagaaaagctcggaagcattagcaaggcgggaaaccgatatctccgacaattattggtactcggcgcgctggcagtaatcaaacgagcgaaacttttaggccatacccgccatccatgggtcgttggcctgatggagcgccgtccgtcaaaggtcgcggcggtcgcgctcgctaacaagatggcgcgggttgcttgggcgatgatgagccataacgaaccgtatagagcgaaaccggccgcggccgggacctgagacacgacgcaagcgtcgtgaccgtcgttggtaagagcaggagactcataacgcacctatgccagtcggcccaaggagagggacaacccattatgcgccaggcgcttcgagcgcgagcttttgaccgggacccaatccgcggacagcattatggccagccgcccctctgtgccgcgtcgaaaggccggacacatggcagctccgaccagcaacgtgcgaaaagtcaacaaacctcttgccaaaccggagccgtccacaca

SEQ ID NO: 7161 - DNA, 1429 bp, unidentified
  source 1..1429: mol_type = unassigned DNA; note = element_b1b4813
  misc_feature 1..2: note = core
  misc_feature 3..222: note = LE
  misc_feature 223..1413: note = CDS
  misc_feature 1414..1429: note = RE
ctgatataccgcgttgtggaggccgatgatggctccgacctccacggggagaccggctcagcgctatccggcagatgaccgttgggcctagagtccggcccccgcactccggccgtgaacggtgatcgggatccggcggctttgaccggtgatcggatacatcagctgacgtcgaccgggagagcgggcacccctggggtccgccgaaggaggctgaccaggatgatgacgatcgggatcgacatcgggggccgaagtcacgtcatagcgcgctgccgtgatggccaggctcgggccgaccgcgagatcctccgggtggaccagagccgggccggcttcaccgccctcgacacgtggctcgaccggcagaccgagcgcgtgagcctggtgacgatggaatcgtcgggccactactggatgccgctcgcgagccacctccgtcagcacgacgtgccggtcgcggtggtcaacccgctcgccgccaagtactttgccaagagtcgcctgggccggacgaagtccgacccggccgatgcccggagcctcgccgagatgggaatgcgtgatcggcccgtcgttcgcgatccgctggccggcgccgagctgcgccaggccgcccgcttcgcgatgaccctcgtgaccgagcaggccagggtctgccagcgcctcatccggcttgtggacatcggcttcccggagctcggcgagctgttcgacgatccgacctgccggacggcccgggaggtcctgcgcatcgcccccacggcgcgggccgccagtcgtcggcgcacggcgaccctcgccggcgccaacgcgggacctggtcaccgccgtctcggggcggccaaggccgagcggctccaggccgcggcggccgactcgatcgccgtcccagagctcgacgccgaggtcgccttcgaggtcggcctgctgctcgaccagttcgacctgctcgagcgccagatcgaggttgccgacgcccgggtcgccggcctcctcgatggcgagacggccaggcgcctgcagacgatccctggcgtcggaccgtcgatcaccgcgacgctcctcgccgagatcggtgacatcggccgcttcagcgacttcgaccagctcctcgccttcgccggcgtccacccggccgaacggagctccggacggaagggatcgaaccccgagaccgcctggcgcatgtccaaggccggcaacagccacctccgcgcggcggcctaccggatggccgtcgtcggcgtcgtgcataacccggtcatcgccgcccactatgcccgcaagcgggccgccggcaagagcaagatgaacgccctcggccactgcatgcgcaaggccctcagcctggtctggggcgtctggcgtaacgaagccgacttcgaccccgactgggggctcgagacttgacaagacggtatgggat

SEQ ID NO: 7162 - DNA, 1529 bp, unidentified
  source 1..1529: mol_type = unassigned DNA; note = element_b1c56ad
  misc_feature 1..2: note = core
  misc_feature 3..241: note = LE
  misc_feature 242..1312: note = CDS
  misc_feature 1313..1529: note = RE
  misc_feature 3..218: note = bridgeRNA
cttgtattataaagtagtagttattagagcccctctccaagggctgtgctacactgaaagggatgctgtggattggtggcattctcctaccacaagatggttctggaaaggttccaaccacagccccttacacttttgttaatcagttaaataccgccagacggtttatgtggaacaaggctacaaaagtaaggtgtactgtggatgcagcatcacatattttcagccggaggtatttgttatggtagtctctgttggtattgatgtttcaaaagacaagcacgattgcttcattctcagctccgagggtgaagttctggcagatgtatttaccattccaaacacgatggatggattcaaccttttgttgcagaaaatccgggagtgcaccacaccacagggcaaaataaaggtagggcttgaggcgaccggacattacagctacaatttgcttgggttccttcttgacaatggtctggccacctatgtcttgaaccccttgcgtacaaacctttaccggaagagcctcagccttagaaagaccaaaaccgaccgggtggatgcgcgcacgattgcggctatgcttttgtccgatgtaggcctcaagccctacacagatacagcataccacaacggggagttaaagtcactcaccagataccgttttgacaaggtaaaagaacgggcaaaactgaaaagttctatttctcgactggtctgtatcctgttcccggaactggaaaagctggttcccacgcttcacatggcctctgtttacgcacttctggaggagttccccggcgccaaacagattgccgcagcccatttgacaaggctgaaagcactacttgaaaccacctctaagggacgctacaaacgggacatggctcttgaaattcgagatgccgccagaatttctattggctcttggatgcctgccaagtcccttgaattgcagcataccatccgcctcatccgtgaactgaatgccgaaatcactgagatcgaacaacaaatccaatccattatggatgagctccattctcccattaccacgattcccggattgggtttccgcatggctgctatgatcctggccgaggtgggcgacttcacccggtttgactccccggacaagctgttggcttatgccgggatgtcgccatccacagtctgggcaactcaaaaactgttaccctcacatggaaaaacgtggctccagatacttacgctatgccctttacaatgcaaccaagtatgtctgtcattgggatccaacctttgccgattaccttgccaaaaaacgggctgagggtaagcactacaatgttgcactttcccatgctgccaagaaattagtgcgtttgattttcgctatggagaaatccagagcgacataccgtttggcagcttaatccttgtttaatagttagccggggcctctccggcctctgctttgctataccttttttgagccatcttttttcaccaccaacagtcatttttcgggttgacttttaatagttaat

SEQ ID NO: 7163 - DNA, 1688 bp, unidentified
  source 1..1688: mol_type = unassigned DNA; note = element_b1c73a4
  misc_feature 1..3: note = core
  misc_feature 4..275: note = LE
  misc_feature 276..1445: note = CDS
  misc_feature 1446..1688: note = RE
  misc_feature 13..256: note = bridgeRNA
cttatataatgtatttaggttgttaaaggtaacctataaccctttttcgactaagtattattcagttttactgtataatattgttattagatagagtgtactcgtcacttccttgagatttaatctcgtaattgaaagagtgagtcctctaatcttttaactgtttacgaataagttagatgttgaccctttcagggtacttcgtatataccataaggcagtaacgttattagattttgaggtgtctatctaaaatacttttttatgaggttcaaatgttttatttaggtattgatattggcaaaaatactcatgttgcttcattagttgatgacaagaaaaaggttatttttaaagctttttctttttcaaattccattgatggtgctgagagtttaatccttaaactagaagctttcaaaaatgaacttgaagttggtatggaagctacaggtcattattggttatctctatactcatatcttgttgaaaaaaactttactgttcgtgttatcaatccaatccaaactgacggttggcgacaaggtgtagaaatcagaaagagaaaaactgatgttattgattctcttttaatagctgatcttcttagatatggagatttcgttgagacttcgctttctaatgaagattatttgtctttgagaaatctttccagatttaggtcttacctcatttcttcaattggcgatcttaaaagaaaaactattgcacttttagaccaagtttttcctgaatatgcctcttcttttagtaatatttttgggaagacttctaaggaaattctttcaaatttctctactccttctgattttgaggatattaattctgatgatttgaatacttttcttgaatctgtttctaagaaaaactatgcttctaagaagattgatgagctttctaaaaaggcttcttcttcttttggtattaatttctgtctggattcatttagtcttcagatcaaaatacttattgagcaaatttcttttattcaaaatcaggtttctgatgttgaaaatgaaattgaactattgcttgaaaaacttaattctccaattactactattccaggtatcggttctgttaatgcagctactatattaggtgagattggagatattaaaagattttctaatccttctaaacttgtcgcttatgctggtttggatgctagcgtttctcagtctggagaatatgaatctacttacaatcatatgagtaaaaggggttctccttatttaaggcgtgctctttttcaatccgctcttagagctgaattttgtgatcctgttttctcagattattatcaaaaaaagattagtgaaggaaaacatcatctagttgctaccaatgctgttgctagaaagctttgtcatactatttttgctgttcttactaagaatgaaccttatcaagtgcagagttaatttttgattaactgtttacaaatttttgaaaaaggttctgtaaatgacgagctttgctcgggcatagccttcatcatttacaggttcttttgagaaaattaatatttaaaaggcgaaaactttactaaccctatttttaatcttaaactttagggtgctttttcatgcttatttttattcattttttatcaatatcattacttatattttctttgtttcacatcttgacttttaatagttagt

SEQ ID NO: 7164 - DNA, 1424 bp, unidentified
  source 1..1424: mol_type = unassigned DNA; note = element_b1c899a
  misc_feature 1..2: note = core
  misc_feature 3..42: note = LE
  misc_feature 43..1134: note = CDS
  misc_feature 1135..1424: note = RE
  misc_feature 1157..1412: note = bridgeRNA
tgatggtgtggacggccccacccgaacggcatcacagtgccaatgatgttgccgccgaggcggcgcaacaaggggaaggccgtcatgcaaaagtatacgcgaatcgggattgatcttggcaagaattatttccagattcacgccctgccggttggcggcggggccgccatcaaccgcaagctcaagcgctcgaagtttcttgagttcttcaagcagatcgagccttgcgagattggcatggaggcctgcggttcggcgcattactgggcgcgcgaactcgagcggctcgggcacaaggtctcgctgatgccgccgatctataccaagccctacgtcaaacgtggcaaaaacgacgcggtcgacgccgccgcctgctgcgaggcgatgtcgcgccccgacatgcgcttcgtgccgatcaagaccgcagagcagcaggcgacgttgaccctgcacaagacgcgcgaagtcttgatgaagcagaggaatatgagcattaacgcgctacgcggccatctcgcggaatttggtctgatcgcccccaaaggcgctggccatgttcgcgaattgatcgcgcgcgccgagaacgacgcgacgctgccgaaggcgatccagcaagtggtgcgcatcatggcgcggcacatagacgcgcttggcaaggagatagagagcctcgagcagaagatcgggcaggcggcgaagcgaaacgctttgtgcgcgctgcttgataaaattcccgggatcggtcccctcatcgcctcggcgatcgtggcctttctccccgatgcgcgtcagttcgaaactgggcgcgatttttctgcctggctcggcttgacgccgcgacagaagtcgaccggcggcaaacagaagctcggctcgatcaccaagcagggaaatcgatatttacgcaagctgctggtgctcgcgggaacctcgctgctgcgcaggatcggcgaccgcacgggcgcgctcgcagaatgggcgcaacggctacgctccagaaaatcggcgcggctgacgacggtggccttggccaacaagctcgccaggatcatctgggcgatgctgagcacaggggagagcttccggcaggaaagcttcttgcgtgtgaagcgaacgccgcctgccgccgcctgaggcgcggattaaccttgggtaaggactcggcgaaaggagattctcgaagagtttaatgtgcttggcgagcgctaaagaagtgatgagcgacacaggttgcagccgaaagccgaggacaccccgtcgacagccacgagcacaaagctcgtaataatgatcaggggccaacgcagtcggacttcatcaaggccagcggacattcgttccgcgtcgaaaggccggacatatgaccgaagccgaccagttcgttcagagcaaaaaaacgcttgccaatcggggccgtccacata

SEQ ID NO: 7165 - DNA, 1415 bp, unidentified
  source 1..1415: mol_type = unassigned DNA; note = element_b1d86df
  misc_feature 1..2: note = core
  misc_feature 3..95: note = LE
  misc_feature 96..1136: note = CDS
  misc_feature 1137..1415: note = RE
  misc_feature 1151..1402: note = bridgeRNA
tgatggtgtggacgacgcccgcacggcatctggctcaatgaagggccgtgccaaaatggttgtcgtaagagcaaccgtttgcaggagcgccgtccatgggaaagtctatcaccaatttgtcgtccgtcacgaccgtggggctcgatctggccaagcacgtgtttcaggttcatagcgttgatgcttcggggcgcgttgtggtcgccaaggcgatccggcgcaacaagctgctggagttttttgcttcgctgccgccttgcctggtggggctcgaggcctgcgggtcggcgcatcattgggcgcgcgagctgatcaagcttggccatgacgcgcgcatgatgcctccagcttatgtgaagccgtatatccgccggcagaagaacgacgcgtcggacgcgtcggcgatctgcgaggcggttacacggccctcgatgcgatttgtcggcgtgcgctcgctggagaaccaggcggcgttgatgcgtcacaagacgcgggagatgctggtctcgcaacgcacgcggttgctcaacgcgctgcgcggtcacttgactgaagtcggcgtcatcgcggcgcaagggcccagacacggccgcgaactggccgagctgatcgaggcttgcgacgagataatcccgtttgaagtgtgcgaggcgctggcgccgctcgtagtgcaattgcgaaacctcgatgaggcgattgcacggctcgatcgcatcatcgcagagctggcgcagaaggacgaaacggcgcgccggctgatgagcattcccggtttcggtccgatcaccgcctccgcgatggcggcgaccattcaggatacatccagcttcgctggcccgcgcgagttcgccgcctttctcgggctgacgcccaagcagaactcttctggcggcaagcagaagctcgggcgcatctcaaagatgggcaatcggaacttgcgcaaactgctcgtcgtgggcgcgcacgctgtgctgtttcaccgcaagccgcacaccgacccactgcggatgtgggcgaagaggcttctcgagaagaagcccttcaagcttgtcgccgtggctctcgccaacaagatggcgcgcatcgcgtttgcgatcctgcgcggcaagacggtctatcgggaaattccgacctagcgggcaccggtagcgttagcggctacggctccccaagagccaaggcagtacgggaatcgagggtgactgagaggtgatgcgcaggaaagcggattgatcctgaagcccaaggcgttgtctgcgcagtcaagcgcgctcgtgtgattagggcaacggatcagcggacaccatcagggccggcggagtctattctccgcaaaacaaggccgaagacatgaccgcacccacgaccagcgcaacgccgaaaatagcccttgatcagcgggcgtcgtccagaca

SEQ ID NO: 7166 - DNA, 1413 bp, unidentified
  source 1..1413: mol_type = unassigned DNA; note = element_b1ef221
  misc_feature 1..2: note = core
  misc_feature 3..167: note = LE
  misc_feature 168..1403: note = CDS
  misc_feature 1404..1413: note = RE
ctcctaccattaattcctatataactattttataagcaggtaagatttgccccaagaaaggcagggggacttagttcttcctgggtcgccgaacccttattttcagtctgtcccctgcctcttggagccatgataagttgattgggccttaaagagcccttgtcactatggaggattggccggaggcactacctgtcttttttatactaccatgggaggtatctgtcatgaattattttgtcgggatcgatgtatcgaaagagaagtttgatgcctgttgtataggagaacaaggagagaaggtattttctcttacgtgttccatggaccggggaggatttgagaagttcatcctccagttgccggaggacaaagtatctctcttcttgggtatggaatctaccgcctcgtatcatatcgccctcttctcgtatctcacggcaaagggataccgggttctcgttctcaacccgcttctcatcaataattttgcaaagcgttccctgagaaagacgaagaccgacaaaaaggatgccctcacgatcgcccagttcatgatgcgggagaaagacgtgctctccacgcagaccccttctcacctgacaacggaactcaaagacctcgccaggagaagagagaggctcgctgattatgtgacctcgctgaagagcaacatgaagagaatcctctctgtcacgttcccggagcttgaacacataaccggggtcttcactcagtctacactccgtcttttggccgagtatccttctgctcatgctctacgggaggccgattactctcatgtggcagatatctttataaccaagtccaggggcagaaagtctcatgcctctgtcaaagaacttatggccacagcaggaaggtccgtcggtgtagtaagccgggcaaaagagctcgttctcaaacaggaggcctcactgctcctccatgtccagaaacaggtaaaggagaccacaaacctgcttatgagccttgcaaacgaaaggatgaagcaggacatggagatcctctgctctatgaaggggataggagagaatactgctgtaaacttcctgattgagatgggaggcgaggtagagatgtatgagaacgacaagaagctgatcgctgcatccggtctcgatccttcaacgtatcaatctggtaaatacgagggaacaagcaggatcagcaagagaggaaaccgacacctacgaagggtcatatggctcatggcaacgaaggtcattatcaacaataccctcttcagaacctatttctataaaagaagaaaggaagggctgccctataaaaaagccgtacttgcaacggcccataaacttattcgcgttatgttcgcaatgctgagcaggaaaacatgttttgttgaaggggggaattaaatatagttga

SEQ ID NO: 7167 - DNA, 1407 bp, unidentified
  source 1..1407: mol_type = unassigned DNA; note = element_b1efa28
  misc_feature 1..2: note = core
  misc_feature 3..116: note = LE
  misc_feature 117..1154: note = CDS
  misc_feature 1155..1407: note = RE
  misc_feature 1179..1402: note = bridgeRNA
agatggggtcacgggccggcaaccgaccgtggttgcgggagtggccgtccctcagagtgatgaagttggaagcggagtcaggctgagcctgctccaagcatcagaaagggacgaccatggagcactatgccggtatcgatgtgtcattggaaagcgcgagcgtttgcgttgtcgacgcgagcgggcggattgtgcgcgaagccaaggtggcgagcgagcccgaggtcctgatcggctggttcggcatgctcgggcttgcggtgacgcggatcgggctggaggccgggccgctgtcgcaatggctgtacgcgggtatgcgggaagcgggattgccggtcgaattgctcgagacccggcacgtgccggacgccttcaaggcgatgccggtcaagaccgaccgcaaggacgcgcgcggcattgcccagctgatgcggctcggctggttccgcgcggtgcactgcaagtcgctgccggcgcaggaagtgcgggcgctactgacggcgcgcaagctgctgcagaccaagaaccatgacgtcgagatgagcctgcgcggagtgctgcgcggcttcgggctgaaggtcggcccgacgacgccgcggaccttcgccgcccggatccgggaactggtcgccggccatcccacgctttcgacggtggcggaagcgctgctcgcggcccgcagcacgctcttcgagcaatggcagaagctggagaaacgccttcgatcactggcgcgccaagatcgtcgcgtccggctgttgatgaccgcacccggcgtcggcccgatcgtcgggttgacctatgcctcggcaatcgacgatcccagccgcttcagatcctccaaggcggtaggtgcgcactttggcttgacccccaagaggtaccaatcgggcgagaccgacgtcagcgggcgaatttcgaagatcggcgacggcggcgtgcgtaccgccctatatgaggcggccaatgtcattctgacccgaccggtgaaaggctcgaccttgaagaactgggggatgcgcctggccgctcgtgccggcgtgcgcaaagctaaggtcgcgctcgcccgcaagcttgccgtcgtgctgcaccgtatgctggccaacggcaccactttcctcgccgaaaaagcagctccggctgctgcccactaacaaaggagatttgcaggttcgggcggttcgaaacgccggccgcccggagcaaggtcccgtcgccgggacgatggatcaggtcaggccgatgtcatctcagcagggcttcgctactgcgcgtttttagattggccgacctgctcctcatccaaccccatcaggtggcggcccagcgccgaccccggacagaagagagaccccgggcgacaggatcaaggctcagagggattgaccatcaacggcccgtgacaga

SEQ ID NO: 7168 - DNA, 1436 bp, unidentified
  source 1..1436: mol_type = unassigned DNA; note = element_b1f4d22
  misc_feature 1..2: note = core
  misc_feature 3..128: note = LE
  misc_feature 129..1169: note = CDS
  misc_feature 1170..1436: note = RE
  misc_feature 1191..1390: note = bridgeRNA
agataggatattcggcttgagtccctgcctcgacatcacaggtttgatgaagaggtgctgcgcttcgagttgatgataaacgtggtcatgtgagaacagccacaaacaacaatggaaggaagcgcagcatgcagtattttgcaggccttgacgtctcgttgcaagagacctcggtatgtgtcgttgatgagaccggtcggatttgccgggagatgaaagtcgtcagtcacccggacgatctggtcgcggcgttaaagagcctgggctgggaatttgtccgcatcgggctggaagccggtccgatgtcgcagtggttatatagtggcctggttgaggcggagctgccaacggtctgcatcgaaacccgtcatgcgaaagcctttctcaaagcgcaggtcaacaagacggaccgcaacgatgcccgcggtattgcccagatgatgcgggtgaacctctttcgtcccgtgcacgtcaagacgctgaccagtcaaaaacgccgcgctcttctgaccgcacgtaagctgctccaggagaaggcgctcgcatttgagaacgatattcgtgggcttctgcgtaacttcggcctcaaggtgggcattgccagggttggtaaattcgaaaaccgcatcaacgaactcctggaggctattcccgatctcaaggagatcatcgctcccctgcttgacgcccgccaaaaactccgggacgagttctcacggctgcaccggaaggtcctcgacatcgcccgggatgatgtcacctgcaagcggttgatgacgatacccggaataggtccagtgatctcactcgcttacatctgcaccatcgacagtcccgctcggtttgtgcactcccgagcggtgggacctgctttggggctgacaccggtcatcaatcaatcgggagaaagcaagagagttggccgcgtgtctgcctgcggcgatgcgatcatgcgcgggctactttacgaggcggcacaggtgttgctgacgcgggtgaagaaatggtcctggttgaaggcttgggcgatgaatgttgccaaacgccgcggtcttcgaaaggccattgtcgctcttgcgcggagacttgcggtgatcatgcaccggatgtggagcgatggcacggagttccggtggagccgcgacagcgacgtggcgaaagccgcctaatcggaaacaacgggagataatagagttctgccagccggtggaaagatgtccttcgcggacggtggacaaggtaagttcgaccgcagccttgctcaactgcagcatatcgcagctagagcgactaacagattgaaccgccttgttctcctaatcctatggtgggagggccgaggggccgatcccggagagaagcgtggaccgcgaaagatattagatgccgatgcagaaatagctcgaagtgcttgacctcaacacgccgaatagaga

SEQ ID NO: 7169 - DNA, 1644 bp, unidentified
  source 1..1644: mol_type = unassigned DNA; note = element_b1ff777
  misc_feature 1: note = core
  misc_feature 2..239: note = LE
  misc_feature 240..1451: note = CDS
  misc_feature 1452..1644: note = RE
tcgtataataaattaaccaaccaaatattataaaatggttgagttcaataaagactcatggttttcacaaaagctaatagcaaacaagtttttttcctttttggacttatgtaccagcacattaaacgtcttgtgttagctttataaaatcatctataggatgctaaggagaaactgatactttctaccttttataacacgaagctatgagatcttaaaactgacacaaggggtttattatgtactatgtaggcatagatgttgcaaaagagaaacattatgtttgtattttagatacaagcaaagagttggcggttaagcctttttggatctattcagatatcttaggcttaagagatttagttaaaagatttgctgaactttcactcaacaatgatgatttcatcataggtgtagagtccactggagcttttagtgagaatctttatgaatatatcagtgatgctgattataaagtcatacttcttaattcttatcaaactgcgaaatatagagactttagcactatgaaaaagattaaaaatgattctatagatgcttatgtaattgctgagcttttagccagtggcaaatataaagagagtcatatatccaatgatgattatcagtcacttaaagtattgggaagattaaagcgttctcttgatgataagataaaaaccatcaagcgagaaatctcgactgtgatggcgactgtcaatccagagattactaaagtttttccaaatatttttagtaaaacagccctgagcatcattaaagcttaccctacagccgtggatatcgctcagagtacgccaaagaaactgactaagatatttagacatatcaaaggtaacaacttcaatgaagagaaagctaaattcttaatagaacttgcttcttcttcaatatatgctggtcgtactcatgaagcgagagctttaatgattaagactaatattaagatattagagcttttaagtcaagaaaaagctgaaattgagcaacagattgagagtttggtgtatggaaaaattgagacaatagattcttcaattgacaaccttaaatctattcctggtgtcgcagacaagactatatctgcaatccttggagagtgtggagatattaaaagattcgattctgccaaagcatttatcggttatcttggtttatatcccactcaatatcaatcaggcaattccatgtctgttggaagacttgcaaagcgaggcatcccaatagctaaacatgctctttatatggctgcagtatcatctgtgatgcacaatactgaactcaataagctctttcgagataaagtgtctattggaaaaagtaaaaaagaagctctgataatcatctctaaaaaactagcaacaatcatttattctgtttttaaatataataaaccctatgaaccaaaaagagtatttattcctagataaatctagtcggtaaacactaaagttagttttagcacttgtgaaaacaatgagtttttaatgaacacagaccaagctttttaattagctatatatttgatcatctgagcatttttacaaaatactcaaataatgaaacacattttcaatgtctataaaaaatagctactcgtttaagctattctttataggatgg

SEQ ID NO: 7170 - DNA, 1431 bp, unidentified
  source 1..1431: mol_type = unassigned DNA; note = element_b202428
  misc_feature 1: note = core
  misc_feature 2..88: note = LE
  misc_feature 89..1132: note = CDS
  misc_feature 1133..1431: note = RE
  misc_feature 1195..1426: note = bridgeRNA
taatggaatggacgctcacttccctaaacggcatcagagtgccaaaatagtggttctatgatcactaaaacagagaggagcgtccgacatgaagattacaacaattggcattgatttggcaaaagaagtgtttcagattcacggtgtcgatgatcacggcaagattgtactgcgcaagcaattgcgccggaatgggatggcaaagttttttgccaatttagagtcctgcttgattggcatggaagcctgcggtagtgcacaccactgggcgagaaagcttggtgaatttgggcataccgtcaagcttatgccaccccaatttgtcaaaccatacgtgaagaccaacaagcatgacatggcagatgcggaagcaatctgtgaagcggtgagccggccgaatatgcgatttgtgccgatcaaacatgttgagcaacaggccatcctggcagtgcatcgtgctagacaaggtctggtcaaggccagaactgcacaagcaaaccagatacgcggtctgctctctgagttcggcattgttatcccgcaaggcatccattcgattgccaaacgagtgcctgacattctggaagatgctgaaaacggtttaccaggaacaatgcgtcatttactgaggcgattgaatgatcatctcaaagaactgggtcggcaggcagaagaactggagttacagatcaagctgtggcataaggagaatgaagccagccagagactggaagccattcccggcatagggccgattacggcaagtgccatagtagcaacagtaggagaggcaaaagaattcaagaatggcaggcaactgtcggcatggctgggattggttccaaaacaatgttccagcggtggcaagcagttgttgcttggtatcagcaaacgtggtgacacttacctgcgcaccttactgatccacggggcgcgtgcggtcatccgctttgccgaaaacaaagctgaaccagaaagctggctgcgcaaactgataatgcggcgtaataagaatatcgctgctgttgcgctggcgaacaagaacgtacgcatcatctgggcgttgctcgccaaaggtacaacattattccaccccgatcacgcatcggcagcaaacgcagccgctacataatcgtggtggatggattaaaaatgtattggtaatgtcgcatcaaaaacgagtttaaggagaaaaatttccaccgattgcacaggcaatcatgacatgatggcgagactggtcagaccgtgagtgactaaacctaaatttgaccaagtgcatagagcacgttgacctgataaggcgttactcagcggattccatcagggacagaggcaatgcgcctcatataaagtccggatgtatggctgcaatctttaccttcttaaaatcatcgactgaaagcttggcataacgtgagcgtccatgta

SEQ ID NO: 7171 - DNA, 1409 bp, unidentified
  source 1..1409: mol_type = unassigned DNA; note = element_b20544b
  misc_feature 1: note = core
  misc_feature 2..90: note = LE
  misc_feature 91..1134: note = CDS
  misc_feature 1135..1409: note = RE
  misc_feature 1174..1404: note = bridgeRNA
taatgggatggacgcccacttcctatgacggcatctaagtgccaaattagtggttctcttatgccactaaactagaaaggggcgtccgatatgaagattacgacagtaggaattgatttggcaaagtcggtattgcaaatacacggtgttgatgaacgaggtaaggtggcggtgcgcaagcagctgaagcgttctgaggtgttgagctactttgcgaatctggaaccgtgcgtgatcggtatggaggcttgcggcagcgcccaccactgggcaaggaagctgcgggagtttggacacacggtgaaattgatgtctcctcagtttgtgaaaccgtacgtgaagacgaacaagaatgacgtggtggatgccgaagcgatctgtgaagcggtaagccggccaacaatgcgatatgtaccggtaaagaccgttgagcagcaagcgattctgtcggtacatcgggcacgagctgggtttgttaaagcgagaaccgctcaagggaatcaaatacgaggattgctctcagagttcggcatcgtgatatcacaggggatccactcgatcgtgaagcggatgccggaaatcctcgaggacggggaaaatggattgcctggcacgatgcgaagcttggtgcaacgactgacagagaatataaaggagatggatcgtcaggtaaaagaactggagaagcaaattcagttgtggcaccgcgagcacgaagcgagtcggcggttggcccagataccgggtgtcggaccgattacggccagcgcgatggtggcaactgtgggcaaagccagggaattcaagaatggccgccaattagcggcgtggatgggattggttcccaagcagaattccagtggaggtaaacaaaatctactcggcatcagtaagcgtggcgacacctatctgcgtacattgcttattcacggggcaagatcagtcatccatcacgttgaaaataagcctgaaggcagtagctggctacgtaggctgatggcaagacgaaacaaaaacgtggcggcggtcgcactggctaacaagaatgcgagaaccatttgggcgttgctggcccatgagcagacgtttcgctgcgactacatgccgcctgaagctatgacggccgtgatgtaaccgtatcgattgaacgcaagtaccaagttcaaggagggacatttccaccgattgcacaggcaatcatgacgtgatggcgagactggtcagaccgtgagtagcagaacctgcgagtaacaccgcaccttaaagtgcgcgcctgtaattaggagctgctcagcggattccatcagggatagaggcgacagcctcactagaaatccggatgtatggctgcaatctttaccttcgacccatcatcgattgaaggcttggcaaaagtgggcgtccatgta

SEQ ID NO: 7172 - DNA, 1405 bp, unidentified
  source 1..1405: mol_type = unassigned DNA; note = element_b20b15d
  misc_feature 1: note = core
  misc_feature 2..88: note = LE
  misc_feature 89..1114: note = CDS
  misc_feature 1115..1405: note = RE
  misc_feature 1150..1399: note = bridgeRNA
gaatgatatggactccccgctcggcatctttctctagcgagtgtgccatagtgaagttgataagtagcttcaattgaggagagtccatatgtcactaattaaagcaattggcatcgatttagccaaatctgttttcagtatccacggtgtcgatagtcatgacaagtgtcaattaagaaaaaccgttaagcgaaacaaactgttagctgaagttgctaagttgccagcgtgtatcattggtatggaagcttgctcaggcgcacactactgggcaagagagtttactaagcttggccatgaagtacgcatcatggcctcaaagttcgtgattccgtatcgccaaaacgaaaagaatgatgccaacgacgctgaagccatttgtgaagcggtgagccgtcccaaaacgcgctttgtcaccatcaaaagtgacgagcagcaagcggtgctttgcctacatcgtattcgccaaggggctatcaaggacagaaccgcactcattaatcggcttcggggcttactcgcagaatttggtattgtcatgcccaaaggacggtatccggcacaacatgccattagtggcatcttagaagatggtgagaacaacttacccatgctcgctagagagctactaagtgacttatggcaagacattaaagcattaaaccagcaaattcttaaacatgaccgaaagctctatcaactcgcgaaccaaatgaatgcagcaaggcgcctaatgacaataccaggcgtaggcgaaatcacggcaacggctgtggttgcgacggtgagtgatgcaaaagattttgataccagtcgcgcctttagcgcttggattggtctagtccctaggcaatacaccacgggcgggcaagtgaagcttggccgaatcagcaaacgtggcgaaaagcatatccgcacctcacttattcacggtgcacgagccgttatggccaactgcaagaataagacagacaggacgagcttatgggtgaaagacctgattgagcgacgaggctttaaacgggcaacggttgcccttgcggccaagaatgcacggttgatatgggcattgctgcgaagtaaaaacgaataccaaatagattatgtaaaatagaaaagattgaagtagtaaaggtaaccctaacggttaaccccaccgcgtcttagcatgagcgattgacgataacacggtcagaccgagagcataaaagcctgtttaatcgggaagcgcatttcttgaaagagaagacgctgtttaacgaatgaggccatgctcaagcgcaaatcatcagggcgatagcacaagctgttaaggcagtatgctaataaacgccgaatgtagagctgctgtcagactttcttgttgtcagaggctgcttgtgcttgacaaaggggagtccatgta

SEQ ID NO: 7173 - DNA, 1381 bp, unidentified
  source 1..1381: mol_type = unassigned DNA; note = element_b20dbe5
  misc_feature 1..2: note = core
  misc_feature 3..86: note = LE
  misc_feature 87..1118: note = CDS
  misc_feature 1119..1381: note = RE
  misc_feature 1149..1369: note = bridgeRNA
tgatgctgtggacggctcctccaccggcacgtgagtgccatgaatgtgggtgctgttaaggcccccactattcagaggagccaaacatgcaagctattacaacagtcggtctcgacatcgccaagtcggttttccaggtccacggcgttgatgcggaaggcggggttgtcatccgccggcagctgaagcggcggtacgttttggcgttcttccagaagctgccgccatgcctggttggcatcgaggcttgcgcttcgtcgcaccattggtcgcgcgagctcaaggcgctcggccacaatgtgcggctgatgccgccggcctacgtgaagccctacgtcaaacggcagaagaacgatgccgctgatgccgaggccatctgcgaggcggtgaccagggcgaacatgcggttcgtcgcgaccaagacgcccgagcagcagagttgcctgatgctccatcgcacacgccatctgttcatccgccagcagaccgcagtgatcaatgtgatccgggcgcatcttgccgagttcgggatcgtcgcgccggtcggacgcaagggtgtcgaggagctgctcgatgtcgttgccgatccgagcgacaaacggttgcccgaggttgcgcggggatgtctcgccgcactcggcacccagctgcggtcgctgaaagctcagatcctggggttcgaccgtatgatcatggcttggcaccgatccaatgagacgagcatgcggctcgatgaagctcccggcatcggcccggtgctggccaccgctctggtcgctaccgttgccgatccgaaggtcttccgatcagggcgcaacttctcagcctggatcgggctggtgccaaagcagcactcgagcgggggcaaggaccggctcggcagcatcagcaagcagggcgatcgctatctgcgcagcctgttcatggccggcgcactcgccgtcatccgctatgccaagatccatggcaccaagcatcggccctggctcacggcattgttggcgcggcggccgaccaaagtagccgccatcgcgcttgccaacaagattgcgcggatggtctgggccatgatggccaggggcgagcactacaaggaacccgtcgcgctggcggcgtaaacgagatcgcgccggacacccggcgtgatgtgaaggttggaaagggcgaacagcacgtaatgcagagccggtcgatccggcgatcaggacaacccacttgtgccaacgcattgtcgaatgcgagctattgaccgggacctgatccgcggagggcattatggccagcggccacgtgtgccgcacttaaaggccgaacacatggctgcaccgaccaatgctgcaaacgtgaagaaagttcttgccaactcggagccgtccacaca

SEQ ID NO: 7174 - DNA, 1613 bp, unidentified
  source 1..1613: mol_type = unassigned DNA; note = element_b2128c5
  misc_feature 1..4: note = core
  misc_feature 5..391: note = LE
  misc_feature 392..1597: note = CDS
  misc_feature 1598..1613: note = RE
ctcactggactaccctccattggactgaaggcgtaggcatggcacggtgcagggttgtccacggcggcggtcggtcggcgcttgcgacggaccgaccgagcgccgcggtgggcaacccgtgttcagcgcggcggcttttgccggtcttcgcgttgactcggcgcatcgattgcgccgaagtctgaatccgacttccgtgccctcgcggtgactgcctacggcgctggccgctcgacggcccgcatgagacccgcagcccgcgaggtgccggaagacctagacgggctacaaggtgttgcgccacaccgaccgtatgtgagcgccgatcagtgagcgtcccgcgtgggcttccggcacggcaagtcataccgcaacttgctggagtttgtccatgagcaccttgttcgccgggctggactgggccagccagactcacgccgcatgcgtcatcgatgagcgcggcgcgatccgcgtgcagttcgagatcactcacgacaaggccgggctggccgagctgtgccacagactcaaggcctgcggcgtgcgcgccgtggccatcgaacgcccatcggggctgatcgtcgatgccctgatggacgcgggctttgccgtcgtgcccatccatccgaacgtcgtcaaggcgacccgcccgcgctaccgcagccatggcggcaagagcgaccgcagcgatgcctacctgttggccgatctgctgcgcaccgacggccatcgattcgcacccctggctcctcagagcgatgagatccttgcactgcgtgcgctggtgcgcggccgcgatgacctggtggccacccgcgtgcaactggccaaccagttgcgtaccttgctggaatcgttctggccgggtgccgcggcgatcttcgccgacgtggactcgcccatcgcgctggccttcatcgaacgctacccaacccccgacagcgcggcgcggctggggcccaagcgcatggccgccttctgcgcccagcacgcctgcagcggccggcgtagcgcggccgagctgctcgagcggctgcaccaggctgccggcggcctggccggcgagctgcagatggacgccaagggcgaactcgctcgctgcctggccaggatcttgcgccgagtggtcgagcagatccgcctcatctccagccgtatcgagcaccacgtcgcgtcgttcgacgacggtcaaatcctcatgagcttcccgcgcgccggtcgcatctgcgcggcccagatcgtggccgaactcggcagcgtgcgcgaacgcttcgacacgctcgagcgcttcaccgccgaagccggcatcgccccggtgacctatgcgtcgggcaagtccaaggccgtggcattccgctgggcctgcaaccaccggctgcgcgccgcactgacctgcctggccgacaactcccgccatgccaacgcctgggccgccaacctctacgcgcaagcccgcgcccgcggttgcgatcaccctcacgctacgcgcatcctcgcgcgcgcatgggctggcgtcatctggcgtgcctggcaggatcgcaaaccctacgacccgactcgccatcgcgccgcccaaactcaccttcaaacaacttgaggttgacacagggtgt

SEQ ID NO: 7175 - DNA, 1579 bp, unidentified
  source 1..1579: mol_type = unassigned DNA; note = element_b219eef
  misc_feature 1: note = core
  misc_feature 2..246: note = LE
  misc_feature 247..1443: note = CDS
  misc_feature 1444..1579: note = RE
  misc_feature 6..222: note = bridgeRNA
tcgtattataaggtcaatcagttaataatctggttggtctattttttataggttattctttaagtagccggggcagaacgtaagcgccagtgggattcgatcccgtccgcaatactgttcaccccctacttgtagaaacatgtttgaggctggttgggacatagatcccgtataacaagcgaagctatgaaactacaagttaggttaggggctgccggcaaatctattaaagggaagtgatacgacatggatccagtcattggtctggatgttgcaaaaggagaaagccaagttcaagccttcttagaaaagaaaaatccttacaaaaagagctttaagtttaaacacgatcgaatgggcttacatgatttttatttattttatcaggaggtagagcaaataagtggacaatctccgagtgttatttttgaatcaacaggacactatcacgagccagtcttgcagtttttagaggaccatggtgtaacctattatttggtcaatcctgtcatctcatatgaagccaaaaaagtgagtctacgaaaagtcaaaacagatgcaatagatgcttatcacctctgtgagctgtattacaaagaagacctagaagcatttcaaaagaaaaatattcaaacgctaaatcttcgtaatctctgtagacaacatgattctctgacgggaacctacgtacaaaccaagttgcaatttcatactattttagatcaagtctttcccgaatataagggcgtatttggagacttattttcaaaggtttccttacataccctactcgcttttccaacacctggagaggttgaagaactgaaccttagtgaaattgcacatgaaattcaccaattatgtaagcgtcgttcgaagtcctggtccatgaagaaggcagagaaactgaaatctgccgcaagaaataatccatataaacaaacgctatactacagtcatcttattagtgtaaagatgtatattgaaatgcttctacaataccaaaaacacctatcccaattagagacggaaatagatgccatggctcaagcgtttgaagcctatcctattattcgatcaatccctggtattggaggcaagattgcagccacaatcatctccgagatcggtgaaattgaccgatttaataaccctaagaaactcgtagcctttgctggcattgatcctagtgtccatgaatcaggccaattcaaagccagaattaatcgtataacgaaaagaggatctactagactcagacaggttttatatattgctgtacaatgtggcttgataaacactcggaatcctagactaaaagaattctatgatagaaaacgagaagaaggtaagccacataaagtcgcagtcattgcttgtgcgaataagctcattcactggatttatgctttactaaaacgaaaagaaacatttgtaatatgattactaccaaaataatcaattaaaagaagattcttccgtttatattaaaggaagattatttggtatgtttatttttatcttaacacaactaaaataatttttttagagtttattcttgacttcctattagctggta

SEQ ID NO: 7176 - DNA, 1378 bp, unidentified
  source 1..1378: mol_type = unassigned DNA; note = element_b21f7cc
  misc_feature 1..2: note = core
  misc_feature 3..86: note = LE
  misc_feature 87..1118: note = CDS
  misc_feature 1119..1378: note = RE
  misc_feature 1095..1365: note = bridgeRNA
tgatgggttagatgccccacccgacggtatcacttcatgccacgatggttgagagaactttggtcaatcattaagaggaggcctacatgtcggaagtcacgatgatcggcgtcgatcttgcaaaacgcgtattccagattcacggtgcccgcgcagatggatcggttgcttaccaaaagaagttatcgcgttcgcaactcttagagtttttagcgcagcagccgaaatgctgtgtcgcgatggaggcttgtgcaacggcccatggctggggtcgcgagatccaaaaaatgggtcatcaggtcaaactgataccaccgatctatgtgaagccgttcgtgaaacgtcagaagaacgacgctaatgacgcgcatgccattgtggaggcggcttctcgaccgaccatgcgctccgttgctgtcaaaacgcaggagcagcaggcacgtgccatggtgttccgcacgcgagaattgctcgtcggccagcgcacacagctgatcaacggcctgcgtgcacatcttgcggagttcggcattgtcgcaccgacaggaccagcccatctgaagcgcctgcaggacgcactgtctgatgaaagcctgagcctgcctcaggatgtcagagaattaggtgccctctatcttgaacaaatccagcacttggtgaccaggatcgacggcctcgaacatcgtttgaaggctgcttcggatcagtcggatacggcgcggcgcttaaagacgatgccggggatcgggccgatcacggccatggcgatcgaaaccttcgcgccgaatatggagggctttcgtcgtggccgcgactttgcagcatggcttggcctggttccgcgacagcattcctccggcggcaagcaggtcatgggtcgcacatcgaaaatggggcagcgcgacattcgacggctgcttatcatcagcgcgatggccgttgtgacagcagccacacgatacgggaaaacaacaaccaaatggctcatggccatgttggagaggaagcccagactgctggtcggcatagcgctcgccaacaaaatggccagagccgtctgggccatgctgacgcgacagcacgattacctgaaacctgaggcaattctcgcggcataggcgccgagaaagcccaggggacgtcggagaatgtgagaagatcgacgaaaagtaagggcaattgatcgtaaagatccggatccgttagccatatgtgcccagagagctggatagctctgattgttgatttggaccagatccgcgtatcgccataccggccagtggcgcttgaagccacaactgaaggcctgacacatgaaggcaatcgatcacatgttctgaaatcagaaatcccttgcatttattggggcatctacaca

SEQ ID NO: 7177 - DNA, 1361 bp, unidentified
  source 1..1361: mol_type = unassigned DNA; note = element_b2224a2
  misc_feature 1..2: note = core
  misc_feature 3..74: note = LE
  misc_feature 75..1100: note = CDS
  misc_feature 1101..1361: note = RE
  misc_feature 1076..1349: note = bridgeRNA
cgatggggtggacgccccctgacggcatcgatgtgccagagtggaggtgttcgtcaccactggagtaggcgtccatgagcgaggttagcacagttggccttgatctggcgaagtcggtttttcaggttcacggcgcagacccgagcggcgccgtactcgtgcgcaagaagctgcggcgggatcaggtcctggggttcttcgcgacgttaccaaggtgcgtggtggcgatggaggcgtgcgcgagcgctcactattgggcccgcgagatcgctgccttgggtcatgacacgcggctgatcccgccggcctatgtgaagccgttcgtgaagcggcagaagaacgacatggccgacgcagagtcgatctgcgaggcggcgcagcgcccgacgatgcggttcgtccaaggcaagagcgcggaggcgcaggcctcggccgtggtgttccgcacccgcggcatcctcgtgcgccagcgcacccagttgatcaacgcgctgcgcgggcatctcaccgagtttggctatgtcgtgcggcaaggtgtcgggcacgtcggcaagctggtcgaaattgtcggcgatcctgcttccgacattccggcggaggcgcgaccgatactggtcgtgattgctgcgagcctgaaggcgctgcaggagcagatcgcgctcctcgaccgcgagattgcggctcgggccaaggccaatccggtggcgcagcggctgatgaccgtcccgggcatcggtccggttagcgccaccgccctggtcgcactggcgccggctgcgagcacgttccggcggggtcgcgactttgccgcctggcttggccttgttccccggcagcactcgagcggcggcaaggagcggctcgggcgcacgaccaagatgggcgagcgcagcctgcgacggctgctgatcctgggcgcgagctcggcgaccaaggtcgcagcgcgcgatcccgacaaggcgagtgcctggctggcgggcatactggcacgcaagccgcgcatgcttgtcatcgtcgcgctggccaacaagatggcgaggatcgtctgggcactgatggcccacggcggatccaacagagctccggccgtggcggcataaccgccacggctcgaggcgtcagggacgcagggaaggtcaacagagaggtatggcgcaacggtcagagacggggtcgggaaaaccagtgaagtgtccaggcgcctccagcgcgcccttgcggtctggacccgatccgcgatctccatacaggccagcagccgtgatgatggctgcatcaacaggccggacacacggaagcacctgaacccgcgcaaccatgccactcaaaaaacctcttgcatccaaaggggcgtccacaca

SEQ ID NO: 7178 - DNA, 1648 bp, unidentified
  source 1..1648: mol_type = unassigned DNA; note = element_b22b665
  misc_feature 1..2: note = core
  misc_feature 3..310: note = LE
  misc_feature 311..1555: note = CDS
  misc_feature 1556..1648: note = RE
ttatgaccattcctttccgctgcgctccaaggcaccaaagggaatgaaaccgaagtacctctgacgcaacttatctaaatttgttagactgtacttgaggaagcaggcacactacagagcacgtggaggtgagtaggcccagcccttgctggactgaatctttatgtgtgccggacgctctttcaagcaccaatgagtagggctttgcaccctgtaaccttatctttggagagacggactacttcaatctttcagtgggcgtccaggccctgcctgttccctcaaatacactgtttcgaggggatgtgttatgctcaaaatcgtttatcgtgtctgctgcgggatggacgtccacaagtcctttgtcgttgcctgtattgcttctaccactgagtatggagtaacaacctacaagagcaagcgtttttccaccttcactggggacctacgccgttgtgcagcctggttggctgagaatagctgcaaagatgtgtgcatggaatccacgggaaagtattggattcccatctacaacattctggagccaacctgtaatatcgttcttgctcatccgaaatacgtgaaagcgattcggggcaagaagaccgacaagcgagacgccaagtggatcgcagacatcttcaagcacgaccttgtcgccggaagctttatcccaccggcagatattcgccagcttcgggatttggttcgttatcgttggaaacttaccaacttcactaccggcgagaaaaaccgggcacagaactgcctaaccgtttccaatatcaagttggatgatgtgttctcagatgtgttcggcaaaaccgcctctgcaattacgaccaggattttagaaaatccagctgagaaaattacggatgtttccggtttccgcaccaaaggcatgaaagcgaccaatgaacaggtgctcgccgctgtggacggagagatgtgtgaagaacaggctgaaaagctccgcatcatccgttcccacatggatagtctccaactgtgcaaacttgatttggaatcactgattctggcaactgctgagaaatatcttcctcaactgggccttgttatgacggtgccgggtatccaatcctttaccgcaatcggcatcatttccgaaatcggagtggatatgtccgtgttccccacctcgaagcatctttgctcctgggctgggcttacgccgcagaacaacgaaagtgccgggaagaagaaaaccaccagaatcagccgggccggagcctacatcaaaccgctgcttgttcagtgcgccctcaatgcggttcgtgccaagaaattcccagaagtccgcaatcgctaccttgctctcaagaaacgccgtggacacaagaaagcaatcatcgccattgccagaatgctccttacagctatttacaacattctcaagaaaaatgagtcttacaatcctgaactttaccggcagacagaccgacctccagcgcaccgtgaggtttccgtggcggaagccatcttcattctccagcggcaaggttatctggtagctgctccacctacgccatagactttaagcataccttcgtttttcgcccacttttagtgggcttggttttgtgcgcccttttcgcaatggtgctttgactacaatgtttcaacc

SEQ ID NO: 7179 - DNA, 1227 bp, unidentified
  source 1..1227: mol_type = unassigned DNA; note = element_b22dd64
  misc_feature 1..3: note = core
  misc_feature 4..241: note = LE
  misc_feature 242..1219: note = CDS
  misc_feature 1220..1227: note = RE
  misc_feature 49..221: note = bridgeRNA
catcctatgtttgtgaagtctgtgaaaagagaataatatggaataaatttattgcagaagaaaaaggtaaagagaaaagattacgaagtgtcattagcctctgtcaaggctgttcagcatgctaatccctttaccttttgcttacgagcttgaacagttcattaggcgttggagcctgaatgtaggattgataagccgttaagcaagctcttctactttttattatctcttaaacaaagttatgcaatcacaaacaaattacacaggtattgacatttcaaaattgttctttgatgtagcttttcagattgaaggccgtaattatcattataagtttggtaatgatttaccgggctttaagtctttattaaaagtattacccacagacagccatgtggttatggaagcatccgggccttattaccttaaactggcatgttttcttgaagcgaataacatatgggtaagcgttgtcaacccgcttgtaatccgtaggttttgtcagatgcgtatgtcgcggaccaagacggacaagaaagactcagggatgatagccgaatatggaagaacagaaaagccgggtttatggcagtcgcccaaacaacatgttattactttgcagcaattggaaacattactgtcgaatcttaacaaagaaaaaacagctttgagtaatcagttagagagttttaacagcagcggtatgcttgatggtaaactaaaaaaaacgattaacaaagaattggagcataagcaggcattgattgaaaagttaacaaaggagatgcatactttagctgaagttcattacagcgaaatgcttattaacctagggagtatccctggtatgggaaaaaaaacagcgatgatgctaattgttctcagcggcggttttaatcgttttgatgattaccgcaaattgagttcttacatcggtatctgtcccaggatatatgattcaggaacaagtgtaaaaggtaaggcaaggatatgcaaaatgggaatgtcaaaaatcagagccatgttgtatttgtgtgcctggagtgcgaaaagatgtaataaggcgtgcagggagctttatggccggctaattaacaatggaaaagctaaaaagcaggcactaatagccgtggctaataaattgctgaaacaagcttttgctatcgcaacacaaaaaaccaaatacaatgaaaattattcaaatattatttgcttttaaacacagtt

SEQ ID NO: 7180 - DNA, 1432 bp, unidentified
  source 1..1432: mol_type = unassigned DNA; note = element_b231f9c
  misc_feature 1: note = core
  misc_feature 2..279: note = LE
  misc_feature 280..1107: note = CDS
  misc_feature 1108..1432: note = RE
  misc_feature 1209..1426: note = bridgeRNA
taatgggatggtccgccgcctttaccaagccagcagctagggtataagaggtgagcggaggaggcatcccatggagctacatacgatcggtattgatctcggcaagacagtcttttatctggtagggcttaacccgtgcggcgaggttgtggtgcgcaagaagttttcgcgcaaacaacttctgcacttcactgccaacctgcaggtcaaggtaattgggatggaggcctgcggagggtcccactttctagggcgggccctgcgagagcaggtcacgaggtgcggctgataccggtgcagtatgtcaagccgtacgttaagacgaataagagcggctacattgatgccgaggcgattgcggaagcagtcggacggccgaagatgcgcttcgtaccgatcaagagcgacgaccaactggatctgcagtcgctgcatcgggtaggggagcgttgggtgatgcgtcgcacggccgtcatcaaccagattcgtggcttgctgctcgaacgtggaatcaccttgcgcaagggacgatgctatttcgatgcggccttgccggggatcctggaagacgccagcgccaagctctcgggcgcagtgcgcttgctgctggcacaactgaggccggaactcgatcacttacaaatgcggatcgacgaagccgatgcggccattcagaagatagctggggagaacgaagcctgccgacggctggtcgcgatccctggcatcggacctgtaacggcgacggccatcatcgccgcgatcggcaacggagcagctttcaaaaaagggcgagggttttccgcgtggctcggaatcgtcccgggcgaatatagcactggtggcaagcaaaagctgctggggattagcaaacgcgggaactcttacttgcgaagactcttcgtgcaaggggctcgcgccgtcctgcaacagagcacgaagcaatcttccggtctgagtgcgtggctggcccaactcacatctcgtacccaccggaatgtggcggcagtggccctagccaataagctggcgcgcatggcctgggctgtgctcgctaagaatgagctctatcggcccccaatgctggtcggcgcagctaaagcatgactggcctgcagatgacgcctggctgaggccaggcttggaaatcgcattcgcgattcccacatctgcagaccagcagcgactacggagtggatgattttctgccaggtctgctggcgaactatgagatgacacaacggtcgaacccggcgctctcgaaacctgtaaaccggaaaatgccttccaaggctgcctaactaagtaggacgagcgcgcagcgcattccatcaagtgccaggagctttgtgctccacaaaggccgaatacatttgcgcagaccatcctgtcactttcatttttcgcttgcgacaaagcggcggaccataca

SEQ ID NO: 7181 - DNA, 1350 bp, unidentified
  source 1..1350: mol_type = unassigned DNA; note = element_b23ba3d
  misc_feature 1: note = core
  misc_feature 2..60: note = LE
  misc_feature 61..1086: note = CDS
  misc_feature 1087..1350: note = RE
  misc_feature 1122..1348: note = bridgeRNA
aaaatggtatggacgcctcctcatcgcataatgagacgtcgttaaaccaggagaacgcaattggaaccgacagtcgtaggcgtagatatcgccaagcgggtcttccaactgcactggatcgctgcggacaccggcgaggtgttcaacaagcagctccgccgcagcgattttctcgagcacttcgccaatcttgagccttgtctcatcggcatggaggcgtgtggcggctcacagcattgggcacgccgtctgaccgagctcgggcatcaggtcaaattgatgccaggcaaactggtgaaagcgttcgtgacaggaaacaagaacgatgtcgccgatgcgcgtgcaatctgggcggctgcacgacatccgggtgtgaaagccgtcccggtgaagaccgaagcccagcaagcggttctggcactacatcgtattcgacagcagttggttatatttcggcgttctcaatctaactgcctgagaggcttgctcggcgagtacggagaggtcatgggcgtgggacgcgcagcaatgaatcatgccatgcctgacctgttgctgcgcctcgaaccacgcctgccgcaggttttgatcgactcccttcgggaacagtggcaacgccttgtcgacatcgacaagcagatcaccctcatcgagcagcgactccgcgcgtggctgcatgaaaaccaggcctgcaaacggatcgccgagatccccggcgttgggttcctgaccgccactgctgccgtagcagctatgggagaccccagagcgtttcggtccggccgcgaatttgctgcatggctgggtctcgtccctgcgcagtttggaactggtggcaaagtccggctgcttggcatcagcaagagaggcgatcgatacctgcgcacgctgatgattcatggcgcgcggtccgtcatgaagcacgcgaaagacccaggttcctgggcagtgcagttgagcatgcggcgtccgctcaatgtcgtagtcgttgcgctggccaacaagatcgcgcggacgatctgggctctgctagctcatggccgctcatactgcgacagctatccgcctccagtcaccgtagcatgaggtgcgttggaatcgtatggcgttctatcaacgatctgtaatccaaggttgcgcaaggtagtgttgtaatggcaaacaggtaagaccgggactcatcaaacctgcatcgtcttctggacatcatggtccgtggcaaaaatgaggcatgagtcagcggattccattggggccagcgggcttcgacctgcatgggccggatataaaaccgcagcctgtatctgttgggcagagcaacaaaccttggcaagccggaggcgtccatat

SEQ ID NO: 7182 - DNA, 1152 bp, unidentified
  source 1..1152: mol_type = unassigned DNA; note = element_b23c231
  misc_feature 1..2: note = core
  misc_feature 3..174: note = LE
  misc_feature 175..1137: note = CDS
  misc_feature 1138..1152: note = RE
  misc_feature 1..153: note = bridgeRNA
ctagtatgatccaacgggacacggtataccgttttgtatcaggttcaagagaccgtcacaaagtgatgggtagccgtgtcccttactcgacaaagccgaacagttatctgggctttcaagcccgtatatgctagcaaggctgtcgcagtccaactatcccaggaggtctcttgcatgtctgcccatgaatcacttttcatcggaattgatatttccaagcacagcctggatgtggcgtttggcgcccacccacaggcgccggtcgagaccctgccgtacacagaagaacaggtgcaactcctgctcaaacgactccagaccctgaatccgactctgattgtcctggaggcaaccggcgggctggaaagactgcttctgacccaactgctccaggccggcttgccggtggcgcgtgtgcaaccgcgccgggtacgggccctggctcgcgcagaaggatgctgggcaaagaccgaccccctggatgcccgtttgctggcacgctttgccgagcgggttcggccacctcagcagacgttgcccgacgatcagcagcaactgctgcgcgatttgctggcccggcgcgagcagttggttcacatgcgaaccactgaagtcaatcggttggccaccgctgctcggcaactccagccaggcatccaaaagcacatcgattggctcgaccaggagatcaaagcggtcgagcaggaactcaacgaccatgtggatcgctcggacaagttgagccgtaagcaggaactgctccaaagcgtgcccggcatcggccccatcaccgccctcaacctgctaatcagactgcccgaactggagtccaaaaaccgcaaggaaatcgccgcctttgttggcgtcgcgccgtattccaaccagagcggctcgaataacaaacccaggcatatctacggcggcaggaaagacctgcgcagcgtgttgtacatggcaaccctcgctgccactcgtttcaacccaactatccgagccttttaccagcgcctgtgtgacgccggcaagccacgcaaggttgccatcgtcgccgccatgcgcaagctgctgaccatcctcaacgcaatgctgcgtcatgacaagccctgggaatcggttttgcacaccagctccgcttgacaaacaacacagtta

SEQ ID NO: 7183 - DNA, 1607 bp, unidentified
  source 1..1607: mol_type = unassigned DNA; note = element_b2444e1
  misc_feature 1..2: note = core
  misc_feature 3..269: note = LE
  misc_feature 270..1487: note = CDS
  misc_feature 1488..1607: note = RE
  misc_feature 13..289: note = bridgeRNA
ctactacaatatatttatggttaatatcccttaccgccagtaaggaattatccatcttgttgcttaagctgttagaatgagtggtgcaataggtctggcctaatcctccttggacgttacgtccgtaaacaagtcagcccctcattcgcagcattcgttttacgcaggttgaaccctttggcgttcgtgtgaaaccaccagtagattgaataggcaatgagaaaaactggtatggaccattgctactacattgcaaaggagtttctgttatgaacgctgttggcattgatgtttccaaaggaaaaagcaccgtcactatccgcaggcctggcgacgtggtccttatgcctccctgcgacatcccacacacccaatcttctatcaataacctgattaggcagctccacagccttgatggggaaactaaggcctgtatggaacataccggcagatactatgagccggttgccacatggctttccgatgccggtatctttgtcagcgctgtaaaccctgtccttatcagggacttcggggatgattccctgcgtgccccaaaaacagacaaggctgattcccaaaaaatcgcacgctatacccttgaccgctgggcaaaactgccgcaatatgggagcatggataaaacacgcagccaattaaaaaccatgaaccggcagttcggcttttacatggcccataaaactgcaatgaagaataacctcattgccctccttgaccaggcctatccgggcgcaaatgatttctttgacagccctgcacgaagtgacggcagccagaaatgggtggatttcatccatacctactggcatgtggactgtgtccgctccaaaccattacatgcctttacagagcattaccagaactggtgtaaacgtaaaggctatcacttcagcgcagggaaagcggcggaaatctaccatctctcctctgacctgattgccgtattcccaaaggatggcaatacaaagatgctcctatggcaggctatagcaatgctggatacggcatctgcaaccgtggaagccctccgtcggaaaatggacgaacttgctgccacactgccggaatatccggttgttatggcaatgaacggtgttggccccacccttgggccgcagcttatggctgagattggtgatgtcacccgctttacccaccgggaggcccttaccgcctttgcaggggttgaccccggaaaaaacgattccggacaacgtctccggaaaagtgtacggacctcgaagaaaggctcccccatcctgcgtaagaccctgttccaagtcatggacagcctggttaagcgttcccctgtggatgacccggtttacgcctttatggacaaaaaacgggcacagggtaagccttactatgtatacatgactgccggggcaaacaagttcctccgcatttattacgggagggtaaaagaatatctgtccaccctgacaggaaacggagaaatgtaacccaacttttcatcctgtctcagaccagcgttctgcggtggtctggtttttgtacttttcactcaacctgtataaaattttcaaagttcatgaattcctgcttgactttttatttgcagg

SEQ ID NO: 7184 - DNA, 1484 bp, unidentified
  source 1..1484: mol_type = unassigned DNA; note = element_b245048
  misc_feature 1..4: note = core
  misc_feature 5..238: note = LE
  misc_feature 239..1468: note = CDS
  misc_feature 1469..1484: note = RE
gtcactagggcaccatgctttctgcggatacctgatgggtgttcgttgaagggactcggcgggggccgaggtgacggccaaggtcggtcgctcttcgagggcctgcatgacactgctgccctcggtcctcccggggtcgtcgaccggcatcagggagacgcgccgcagagcgccagttagtgaccgtccggtgctcgatcccctcgccgcgtcgtcgctgccaacctgaggaggtccgttgtcggaggacactgcagaaatcgtttacgtcggcctggactgggccaccgcatcgcatgctgtgtgcgtgctgtctgcggtaggaaaaatactggcacagttcatgtttgaccataccgccgagggaatcgctacgttgatccgcaagcttgccaaattcggtgaacccgccgatgtgcagatcgggatcgaacgccccaacgggcggctggtcgacctgctgctcgaggccggccacccggtcatcccggtgtccccgaacgcgatcaagacctggcgagaaggtgaagtggtctccggcgcgaaatccgacaccggcgacgcgctggtgatcgccgaatacctgcggctgcgccaccgccggctgcgtcccgtggcgccctacagcgcccataccaaggcattgcgcatggtggtgcgcacccgcgacgacatcgtcaagatgcgggtgtcggccaccaaccaactcagcgccttgctcgacgaccactggcccggcgccaaggcgatcttcgccgacgtggaatccccgatcagcctggctttcctgcgccagtacccgaccgccctgagcgccacccgcctcggcgagaaacggttggccgccttcttggccaaacacgcctactccggccgccggccggtaaaggaactgctcggccgactgcgcagcgcacccgctggcaccaccgatcccgccttgaccaccgccatcgccgataccgtgacagccatggtcaacatcctggaaacgctcaacagcaccagcaagaccctcgacaagtcggccatcgcccgcctcggggagcacccggacgccgagatcttcacgtcgctgccaaggtcgggtcagatcaacgccgcccaggtgctcgccgagtggggcgactcccgggcagcctacgacggacccgatgccatcgccgccctggccggggtcaccccggtgaccaaggcctccggtaaacaacacgccgtgcacttccgctgggcctgcaacaaacgcttccgaagggcactgaccaccttcgccgacaacagccgacacgaaagcccctgggccgcaaacatctacaccacagctcgcgcccgcggacacgaccacccccacgccatccgcatcctcgcccgagcctggatccgcgtcatctaccgctgctggcacaaccaccagccctacgaccccaacctccacggagccgcgcaaaacctgcaaaacgcggcctgaggttgactcaggaagt

SEQ ID NO: 7185 - DNA, 1404 bp, unidentified
  source 1..1404: mol_type = unassigned DNA; note = element_b2487f8
  misc_feature 1..2: note = core
  misc_feature 3..121: note = LE
  misc_feature 122..1153: note = CDS
  misc_feature 1154..1404: note = RE
  misc_feature 1167..1399: note = bridgeRNA
agatggggtaacgggccggccaggctctagcccgctgcaggcgtggcggtcgtccctcaaactgatggtgtcaaacggagtcgagcacagggctcgctccaagcatcatcgagggacgaccatgaaccactctgccggaatcgatgtgtcattggaacgctcgagcgtgtgtgttgtgaacgcgagcggcaaagttgtgtgggaagcgaagattgagagcgagccgaaggcgctgatcgcctggttccgctcgcttggcgtcacgctggagcggattgggctggaagccgggccactgtcgcaatggctctatgcggagatgaaggaggcaggccttgcggtcgagctgctggagacgcgccacctgcgcaacgcgttcaagacgatgccggtgaagacagaccgcaaggacgcgcgcgggatcgcccagctggtgcgggtcggctggttccgcccggtgcattgcaagtcgatggaggcgcaagagacgcgggcgatgctgacctcgcgcaagctggtgcagtcgaagctacgggacgtcgagaaccacttgcgtggcattctgcgcggcttcggcctcaaggtcggcaaggtgtcggatcgcatcttcgcggcacgcgtgcgggagctggtggatcgccatccgacccttcagacgatcgccgaagcgttgctcgccgtgcgcggcgcattgcagcgcgagttcaataagttcgagaagcaggtgcggtcgatggcacgcgctgacgccaacgcgcggctgctaatgtcggcgccgggggtcgggccgcaggtctcgctcacctatattagcggcatcgacgatccaatgcggttcaagtcgtccaaagcggtggggccgcattttgggatgaccccgaagaggtatcagtccggcgagacggacgtcacgggccggatctccaagatcggtgacgcgagcgtgcgcaccgcactctatcaggcagcccacatcatcctgacacgaccgatcaagggcggcgccctcaagagctgggccgcccgcatcgccaagcgcgccggcatgcaaaaggcgaaggtggcgctggcgcgcaagctcgccgtgatcctgcatcgcatgctcgtcgacggaaagccgtttgattttgccgccgcggcggcgcgccagtaagggagagagaagagttttcgggcggggccgcgacaccagccttcccgaagcgaagtccctcgccgggacgatggaccaagtcagaccgttgcccgccaagtcgggatctcgaccacgcacccgtagataggtcggcttgttcctctctagaatcccatcaggtggcggccttgcgccgaccccggacagaagcgagtacccggcgagcggataacgcaaaaagggattgactcatcgaggcccgttacaga

SEQ ID NO: 7186 - DNA, 1506 bp, unidentified
  source 1..1506: mol_type = unassigned DNA; note = element_b25705c
  misc_feature 1..4: note = core
  misc_feature 5..419: note = LE
  misc_feature 420..1490: note = CDS
  misc_feature 1491..1506: note = RE
gtcactagggcaccatctttctcgtaggtaccgatacggtgcttgctgtcaggactcggcgggagccggggtgacggcctggttcggtcgcccgtgaagggccggcatgacactgccgcccccggttctcccggggctgcagaccggcaacagcgggacgcgccgcagagcgccagttagtgaccacccgggagccagcctcgccgccgccgcgccgtcgctgccatcttgaggagttaccgtgtctcttgcgctgcctgaagcgctgttcttcaccgggatcgactgggccgccgagacgcacgccgtgtgcgtgatggacgccgggggcaagatcgccgctgagttcacgatcgagcattccggacgggatcgccacgctgatccgccgcctggccaggtacggcgtccccggcgacatgccggtcgccatcgagcgcccgaacggccgcctggtcggcctgctgctggaagccgggcacccggtggtgccggtcagcccgaacgcgatcaagacctggcgggaaggcgaggtgctgtccggggccaagtccgacgccggcgacgccgcggtgatcgcggagtacctgcggctccgccagcacaggctgaagactgccgctccctattccgatgagaccctggcgctgcgcaccgtggtgcgcagccgcggcgacctggtggagatgcgggtcgcggccaccagccagctgtcggcgctgcttgaggcgcactggccaggcgcgaaggcggtcttcgccgacgtcgagtccccgatcagcctggagttcctgacccgctacccgaccccggccgccgccgcgcacctgggcgagaagcggatggcggccttcctggtcaagcacggctactccggccgccgtcccgccgccgggctgctcgcccgcctgcgcgccgccccggcgggcaccggccgcgaaccgctcgccgaggcgctccgcgacacggtgctcgccgccgtcggcgtgctcaccgccatgaacgccgcggtcaagaacctcgaccgctcggtagccgcccacctcggggagcacccggacgggaagatcttcacgtcgctgccaaggtcgggtcaggtcaacgccgcccaggtgctcgccgagcggggcgactgccgccaagcctgcgacgggcccggctccgtcgccgccctcgccggctgcacgcccgtcaccagccagtccggcaagcaccgctccgtgcaattccgctgggcctgcaacaagcgcttccgcgtcgcgatgaccaccttcgccgacaacagccgccacgccagcccctgggccgcgaagacctacagcgacgcccgcgccagcggcaaggaccacccgcacgccatccgcatcctcgcccgcgcctggatccgcgtcatctggccctgctggctcaacggcgtcccctatgaccccgcccggcacggcgccgctgccgcactcgccgaacaatcggctaagcaaatcgcggcctgaggttgacacagggggt

SEQ ID NO: 7187 - DNA, 1465 bp, unidentified
  source 1..1465: mol_type = unassigned DNA; note = element_b2601fb
  misc_feature 1..2: note = core
  misc_feature 3..229: note = LE
  misc_feature 230..1444: note = CDS
  misc_feature 1445..1465: note = RE
  misc_feature 7..226: note = bridgeRNA
ctaatgggtcccgaccggcctgagtgatcagactggtcaccgagccgggcctccgggtgagcactgactgagccaggaccgtcgagtcccagttctagagcgtgcccccggtggtcggcggggacggtcgagatggctgctggggtggcgtgccgatcgagcactggtccattaggtcgccgtgaccttcctcgaacggctccaccggagcaggaggagggacggagcgatgatcttcgtgggcatcgactgggccgaggcacaccacgacatctgtgtgctcgacagcgagggggagctgctgaccacgcgccggatccccgagggcctcgagggcgtggcccggctgcacgccatggtggctgagcacaccgatgagcccgaggcggtgatcgtcggtatcgagaccgaccggggcctgctcgtaaccgccctgctcgccacgggctacggggtgtacgccatcaaccccctcgcggcgtcgcggtaccgcgaacgccacacgctgagccgggccaagtccgaccgtggtgacgcacggatgctcgccgatctcgtgcgcaccgaccggcagcaccatcgtcgggtggctcccgacagtgagctgctcgccgggatcaaggtcctcgcccgggcccaccagaacctcgtctggacccgacagcgcggcgtaaacgcgttacgcagtgccctgcgcgagtactaccccggagccctcaccgccttcgaggagctcggccaccccgacgcgacagcggtgctgagcgtggcaccggacccggagcgaggtcggaagctcaccgaggcccgcatcgtgtcggtcctgcgccggggtggacgacggcgcaacctcgagcggcgggcgagcgagatccggacggccttgcgcgccccacagctggaagctccgacgctcgtggtcgaggcccaggccgccaacaccggtgccctggtggcggtcatcaccacgctgaacgagcagatcgcccggctcgaggccgagctcgtcgacgccttcggtcgacacccggacgccgaaatcctacgaagtctgcccggactgggcgacatcctcggcgcccgggtgctcgcggagttcggggatgcccccgaccgctacaccgatgctagggcccggcgcaactacgcgggcaccgcaccggtcacgcgggcctcgggcacgagtcgggtcgtggtcgcccgcctggtgcgcaacaagcgtttgttcgacgcctgctaccagtgggccttctgtgccctcagccggtcagcgggggcccgggcctactacgacgaccatgatccggggccgcacacgtccaaggtcgcccgtcgcaagctggccaacaagctcgtgggcatcctccacggctgcctggcgcatcggacggcctacgacgaggagctggcctggggtcaagcgcccgaacgactggcggcttgacgagttacggacctggggtgt

SEQ ID NO: 7188 - DNA, 1373 bp, unidentified
  source 1..1373: mol_type = unassigned DNA; note = element_b267f9a
  misc_feature 1..3: note = core
  misc_feature 4..86: note = LE
  misc_feature 87..1115: note = CDS
  misc_feature 1116..1373: note = RE
  misc_feature 1086..1360: note = bridgeRNA
agatggggtggttgccgtccgccccctatccgcaggcgtcaactgtgtcatgcttgtcctgcgacacattcagtggaggacggtctatgaaggatacgattatcggcgtggacttggcgaagcgcgtttttcaagtgcatggggcaactagttcgggcgatgtgctctaccgtaagaagttaagccgcgagcagttccgctcgttcctcgctagcctgccgccatgcctcgtcgtttttgaagcatgcggcagtgccagctactgggcacgggaggcccaatcgcttggccatgaggccaaactcattgcccctcagtatgtccgtccttttgtgaagcggcagaaaaatgatgcggcagatgctgaggcgattgccattgcagcccgtcagccggaaatgcgtttcgtctcgcctaaatccgaagaccagcaggcgcgtgccgcagtctttcgagggcgcgagcggctggtccgccagcgcactgaattgatgaacgctctgcgagccaacttttacgaatatggtgtcgtgtttcctatcggcatgaaccagacgcagaaaatggcgtcttggctgaccgagcatggtgacgatctgcctaaaatcatggttgatgagtgcactgatatcctggcgttgatcggagaactgagcggtcgcatcgctgcaaaaacaaaattgctggcctcactggcggcagaaagtgacacagctcgccgcttgcaaaccatgccgggcgtgggaccgatgactgcactggcggttgaagcctttgctcctaacctgcacgagttcaaatcaggacgggacttcgcggcttggttagggttagttccaagacaacattcgtcgggtggcaaagagcgcttgggtcgcgtctcgaaggcaggtcaaaccgatatacgccggttgctgatcatcggagccatgtcccgggtgatagggagaggttctcgcaatgtggccgcttcgagctgggttggccggttgatgcaccgtaagccaaagatgttggccgccatcgcattggcaaacaagatggcgcgtcagctttgggccatgctgaccaaaaacaaagattatcaggatccagctacattagcggcggcatgatcgcatcactaatgtagctggcaagacggagtgagaagacgctgactatatgggaaatgatcgaacagatcaggattgggaacaccagttaggggctacgagcccagcagctcgctgaatagatttggacccaatcatgctgatctccatatcggcccgcggccttcaaaaaaaccgcaaagagaggcctgacagaagaccgcactcgatccgcccccgacgtcaaaatctgcttgcttcaaggacggcaaccacaga

SEQ ID NO: 7189 - DNA, 1604 bp, unidentified
  source 1..1604: mol_type = unassigned DNA; note = element_b269f61
  misc_feature 1..3: note = core
  misc_feature 4..290: note = LE
  misc_feature 291..1463: note = CDS
  misc_feature 1464..1604: note = RE
  misc_feature 48..270: note = bridgeRNA
actcgtattataaagtagtagtgtttatagaccctctccaaggtcttgatactatatcttcataaccattctttaccttttctatgggtacggttatgatatataagatgctgtggactggtatcacctcactaccactcgatggtttcggaaagtgtccagccacagtctctttgtttgattgttaatcagttagataccgcatgacggtttatttagaacgagttcgcaacttcaaagagcacctgtggttctaaaacagcaccaaatttatacaaaggagatttgccatgatttatgttggtattgatgtcgcaaaagacaaacatgactgctttatcacaaactcagaaggtgaagtactctttgacgtattcaccattcccaataatgcggatggattccagaatctttatcaaaagatttcctctctctcaaatgatctttctaacataaaagtagggctggaagccactggacactacaattacaatctcttaggatttcttattgataaaggtctccccacctttgtcatcaatcctctgcataccaatctgttccgtaaaagtctcagtcttagacagaccaaaacagataaggtagatgcccatacgattgcttttatgatgatgtccggagtaaacttacagtcctactcggacacatcttatcacaacgaagagctgaagtcattaacaagatatcggtttgacaaggtaaaggagcgggcgaaactgaaaacttctgtttcacggctcgtaaacattctttttccggaacttgaaaaacttgttcccaccctccatatagcatctgtgtatgctctccttgcagaacttccttctgccaaaaagatcgcctcctgccatctgacacacctcacaaagttgttgcaggatgcctccaaaggacactatggcagagaaaaagcgcttgaaatcagagctgttgccagacaatctataggttcaaacatgcccgctaaatctctcgaattaaagcatacaatcaagcttattcaagaattaagctctgaaatcagtgaaatagaaaactccatcaaatctattatggacagcattcattcaccgatcctctctatcccggggatcaattaccggatgggcgccatgatcattgctgaaattggcgacttcaaccgctttagttcgccggataagattcttgcctatgcaggactttcgccttctacttatcaatcaggccagcttgacagcagttactcccacatggaaaaacggggttcccgctacctccgctatgcattgttcaatgccacaaaatttgtctgcatttgggataacaggtttgctgtttaccttgcaaaaaagcgtgctgaaggcaagcactataatgttgccatatcccatgctgctaagaaactagtacgggttatttatcggatggagataacgggactgtcttaccagccatcataaactctggtttcatatctccttttggggcaccggaaacgatgctctatttgtcatgcagttttcaagatactgatttatctgaaatgcgttttcgcaatccattcaaaaatttctattttcgtcttgacttttaatagttag

SEQ ID NO: 7190 - DNA, 1718 bp, unidentified
  source 1..1718: mol_type = unassigned DNA; note = element_b26ad0b
  misc_feature 1..2: note = core
  misc_feature 3..67: note = LE
  misc_feature 68..1228: note = CDS
  misc_feature 1229..1718: note = RE
  misc_feature 1266..1482: note = bridgeRNA
agatgctatggggcggcggcgaggatattgcatccatcgttgctgatgtgaaccgatggagcgccccatgcagaagttgaacgacctgagccgatcgccgaacccgctcgatccggacggcacactgatcgctgttatcgaactgagcctgtcgagctggctcgtcgccggaatcgtgcctggcgtcgagcgccagccgttaaagaagctcgcggtcgacgagaacgccttgctgaagctgctgcatcgatggcgagaggaagcggcgaaggcaggacatcggatcaaacgcatcgctatcgctttcgaggccggccgtgacggcttctggctggcgcgctggctcagggcgcgcgacattgaggcccacgtcattcacgcatcgagtgtagcggtgtcgcgcgagcaccggcgcgccaagaccgatcggctcgacaccgagctgctcaaacgctcttttctcggctggctgcgcggcgagcgtgatcactgcaagatggtggcgatcccgacaacccaggacgaagatgccaagcggcccaaccgcgagcacgagagcctcgtcggcgagcaaagcaggatcgtcaaccgaatgaaagcaacattgatccggctcggcatccgcggcttcaatcccaagctaaagaaggccgccgaacgccttgacggcttgcgcacccccgagggcgagccgatcccgcccaacaccctggctgagctgcgtcgcgacatggcgcgccggcggctcgtcagtgatcagataaggcagatcgaggacgctcgcctggagcgtctcaagcaagcgcccagtgatggaccacacgccatggtgcgcctgttggcgcgggtgatcggggttggtgtcgagacggccgacatgctggtgcaggaggtcttgtcgcgaagcatgcgcgaccgacgagcaatcgcgcgttacgccggcctcacgggttcgcccgacgagagcggcagaaaacgccgggagaaagggctgacccgttccggcaacgctcgggttcgacgaggcatgatccaattggcgtggcgatttctcatgttccagaaggacagcaccttggcgcagtggtttcgaacccgcaccgagaacgcccgcggcactcgcaagaccatgatcgtggccttggcgcgcaagctactgatcgccctgtggcgtctcgtgcgggagggcgtagtaccggacggcgtcgttctgcggccggcatcatgaacggaggtcactgaacgacacccaacagtttcggcctggtccgcccgctgacgggtcgccgatgacggttcgaggtggcggagccccgacgtgtttccttggctttcaatgccgtaagggagaatgggtccgccgcttcggagcttcgctgccgatgcgcatgactgcatcatggtttgggtccttggacccaccgaatacaaggttgtggcgcgactgatccgcgcccgaaagcgggctcccctctgatcgtcatcccgatcgcactaagcatgccgtcgtgctcggagctgtcaaggtatggcctggcaacctcggagcatgccgcaaggtcggcgcgacggccaaccttgacagctcctgcgcgcgccgacgtcagcgaactgcgggtcgggacgaagaaacgggctttgagatcaaacaaagaaactgacgaaggacaaaggatttgccgctctggcgaactccttgacaaaaaaagccccataca

SEQ ID NO: 7191 - DNA, 1377 bp, unidentified
  source 1..1377: mol_type = unassigned DNA; note = element_b27a196
  misc_feature 1..2: note = core
  misc_feature 3..86: note = LE
  misc_feature 87..1118: note = CDS
  misc_feature 1119..1377: note = RE
  misc_feature 1148..1365: note = bridgeRNA
tgatgctgtggacggctcctccaccggcactgaagtgccatggatgtgggtgctgttaaggcccccacgattcggaggagccaaatatgcaagcggtcacgacaatcggtctcgacatcgcaaagtcggtttttcaaatccacggggttgacgcggcaggtaatgtaatcgttcgccgccagctcaagcgtcggtacgttttgccattcttccagaagctaccgccgtgtcttgttggcatcgaagcctgcgcctcatctcatcattggtcgcgcgaactgcaggctcttggtcatacggtgcgcctgatgccgccggcctacgtgaagccctacgtcaagcgacacaagaacgatgctgccgacgctgaggccatctgcgaggcggtcaccagggcaaacatgcggttcgtggcgattaagacacccgagcagcagagctgcctgatgctccatcgcacccgccatctgttcattcgccagcagacctcagtgatcaatgcgatccgtgcccatcttgcagagtttggcattgtcgcaccggtcggacgtaatggtgttgaacaactgctcgatgtggtagccgatgcaagcgacagacggttgcccgaggttgcgcgcgcctgtctgctcgctctcggagcccagctgcggacgctgaaggcacaaattctaaatttcgatcagcagatcatggcctggcaccgatccaatgaggcgagcaagcggctcgatgatattcctggcgtcggtccgacgctcgccaccgctttggtcgccagcgtcgctgatccgaaggctttccgatctgggcggaatttttcggcctggatcgggctcgtgccgaagcaacactcgagcggaggcaaggataagctcggcagtatcagcaaacagggagaccgctatctgcgcagcctgttcaccgcgggcgcgctggccgtcatccgctatgccaagatccacggcaccagacatcggccctggctcacagctttgttggcgcggcggcccaccaaggtcgctgcgatcgcgctcgccaacaagattgcaagaatggcgtgggccatgatggccaggggtgatcgctacaaagaacccgtcgcacttgcggcgtgaacgagatcgcgccgagatcgggcgcgatgtgaaggttgggagggcgaacagcacgtaatgcagagccggccgatccggcgatcaggacaacccacatgtgccagtgcattgtcgaatgcgggcttttgaccgggacctgatccgcggagggcattatggccagcggcctgtgtgccgcgctaacaggccgaacacatggctgcaccgaccagcctgcaaacgtgaagaaaacccttgccaactcggagccgtccacaca

SEQ ID NO: 7192 - DNA, 1641 bp, unidentified
  source 1..1641: mol_type = unassigned DNA; note = element_b27c434
  misc_feature 1..2: note = core
  misc_feature 3..299: note = LE
  misc_feature 300..1475: note = CDS
  misc_feature 1476..1641: note = RE
  misc_feature 40..271: note = bridgeRNA
ctcgtattatatagtagtggtttttagagaccctctccaaggtctttataactattaagtcatagtcttttctttacctcttctgtaggttcgactatgatatataagatgctgtggattggtttttttcacctaccactcgatggtttaagtgaggctccaaccacagtctctttgttcatttgttaatcagttagataccgcatgacggtttatttagaacgaggttacaatcgcaaggagcaccatgtggttctaaaacagcattattaattaatacatttcaaaggagatttattatgatttacgtaggaattgatgttgctaaagataagcatgattgctttatcaccaactctgatggagaagtgttatttaaagcattttccatctccaacaacttagatggctttactgaactttatcaaaagattgaatccgttatggatgacgtaacaaaaataaaagtaggactggaagccactggacactacagttacaatcttcttggatatctcattgataaaggtttgcccgcctatgttatcaatccgttacataccaatctatacagaaaaagtctaagccttagacagacgaaaacggataaagtagatgcccgcacgattgcttccatgctaatgtctgatgtgaacttaaagtcctactcagacacatcttaccacaacgagggactaaagtcattaacccgttatcgttttgataaggtaaaagaacgtgcaaagctgaaaacttccatttccagacttgtctgtattctttttcctgaattggaaaagctggttcctcaacttcatatggcatctgtttatgcaatgctctctgaatttcccggtgcaaaacaagtagccagtgctcaccttaccagacttaccaatctactttctgaatcctcaaaaggtcattacggcaaggaaacagcaatcacatttagagatgctgcaagagcttctatcggctcatatatgcctgcgaaatcacttgaactaaaacacaccatcaagttgattcaggaacttgattccgagattgacgaaatcgaaaatgaaatcaaaatcatcatggataaaatcaactccccgattctcagtattcctggaatcagttatcgcatgggagccatgatcattgccgagattggtgatttcagtcgttttgattctcctgataaaatcttagcttatgccggcttttcgccatcaacatatcaatctggacaactgaacggtgcttacgcacatatggaaaaacgtggctccagatacctgcgatacgctctgtacaatgccaccaagtatgtctgccactgggatccaacatttacagcctatcttgctaaaaaacgagcggaaggtaagcattacaatgttgccatatcgcacgctgcaaaaaaattggttcgagtaatttatcatcttgaaaaaacaaagcagcaatacataacagcagcttaaatctttctaattcaatactcctttttgagcacctatcacgatgctctttttgtcatgtagttttcaaggttcaaggaactctaactaagttccaaatatatctaaaatacatttctgtactttattcaaaaaatatcattttaagacttgacttttaatagttagt

SEQ ID NO: 7193 - DNA, 1136 bp, unidentified
  source 1..1136: mol_type = unassigned DNA; note = element_b27decf
  misc_feature 1..2: note = core
  misc_feature 3..173: note = LE
  misc_feature 174..1121: note = CDS
  misc_feature 1122..1136: note = RE
  misc_feature 12..184: note = bridgeRNA
cttgtatctttgatttgccagtcggttttgtaccggcgaggtttgaggcggaagtcagcccggtccccccttgggtgaattgagcccgtggatgagcgaggtgcggcttccgcctttttgtcccgaacccggacagccgcttgggctcgagcccgcatttgcaaggatgggtcatggatgaagctctcgctgttttcgttggcatcgacgtatccaaggatcgtctcgacgttcatctgcgaccatcgggagaggccttcttcgtctctcgcgacggccgagggttggacgaactaacggcacgcctggcggcctgtccggtcgccctggtggtgatcgaggcgaccggcgggtttgaaaccacggtgacggccgcgctcgccggagcaggcttgccgctctgtgtcgtcaacccgcgtcagatccgcgacttcgcccgcgccatgggacgactggccaagactgacgccctcgacgccgaagtgatcgcgctctttgccgagcggatcaggccacaggcgagagccgtccctgctccggaggcgacgaggctggccgaactcgtcgcaaggcgccgtcagatcatcgagatgatcgggatggaggccaatcgcgcgcggcgcatgcctgacaagcgcctcgccaaagggctcgcccgacacatcgccttcctggagaaggagctgagcgagatcgaccgcactatcggtgacggcatcaagaactcgccggcatggcgcgagaccgaaacattgctcaagtccgtgcccgggattggcgatgtcaccgcccgcactctcatcgccgaagttccggagcttggctccatcgaccgccagaagctcgcagccctcgtcggcgtcgcaccgatgaaccgcgattccggcatgatgcgcggccacagaaccatcgtgggaggcagaacctgcgtccgcaacaccttgtacatggcagcgctggccgccattcggcacaacggcgtcttcaaaaccttctacgatcgcctcaccacgcgaggacgacccaaaaaggtcgccatcgtcgccgtcatccgaaagctgctcacaaccctcaacgcaatcgtcagagacaacaccccctggcgaacacaaaacccttgaccaacaacacagccg

SEQ ID NO: 7194 - DNA, 1429 bp, unidentified
  source 1..1429: mol_type = unassigned DNA; note = element_b285be5
  misc_feature 1..4: note = core
  misc_feature 5..209: note = LE
  misc_feature 210..1415: note = CDS
  misc_feature 1416..1429: note = RE
  misc_feature 20..174: note = bridgeRNA
ttccgtaagactgtcgacggcccaggagggccaggtgtggcttagatcgccttgcgctgtggtcgctaactgggaatgtccgcctggctttccggggtgccctggctgctaattgagatctgcgctcggtcgctgctttacggatgtgtcggcggggtgttccacgggccagtgtcatatctggcaatcgaggaacggagaacgcgcacgtggcagcacaacgagatatggcttgggtcggcatcgatgtgggcaaaacgcatcactgggtgtgcgttgtagacgccgacggaaaggtgctgctgtcggtcaagatcggcaacgacgaggccgaaatcgtcgcgctgctggcccgagtggccttgttggcaacgcggttgatctgggcggtcgacatcatcggcgcgccgtcggcgctgctgctcgcgctgctggctcgggccggccagccggtgcgttacgcctcgggacgagtggtcgccgcgatgagcgccgcctacgccggcgagggtaagaccgacgccaaggatgcctacgtgatcgccgagaccgcccgcctgcgccgggatttggcaaccatcgacgccgacacagaccttgtccgcaacctcgcagtgctaaccgggcatcgagcggatctggtcgccgatcgggtgcggatgatcaaccgacttcgagacctgatgaccagcgtatttcccagcctcgagcgggccttcgactactcctcgcacaagggagcgctggtactgctcaccggatacgccagccctgatcggatccggcgcatcggccagacgcgtcttgcaggctggttgcgaaatcgaagcgtgcgcggttccgctggggtagccgcacgcgctgtcagcgcggccaaagcccagtcggtcgtgctggcaggacaagagctgaccacaagcatcatcgccgagctcgccggtgccatcctggccctcgacgagcgcttgaaagccctcgatgcccagatccaggagctgttcgccgaacacccacaagccgaaatcatcgagtccatgcctggattcggtcccttcctgggcgcctcgctactggtcggcgccggcgacctgcgcgccttccccagcgccggccatctcgcggcagcagccggactggtgcccgtccccaatgactccggccggcgcaccggcaacctgcaccgccctctgcgctacagccgcccactgcggcacgtcttctatctgtccgcacagacgagcatgatgcgtaccggccccaaccgcgactactacctgaaaaagcgagcccgcggcgccacccacagccaggccgtcatcgctctggctcgccgccgcatcgacgtgctctgggcactattgcgcgaaaaccgaacctggacagcaacaccgccacccctagctcaggcagcttgacaacaccattgaga

SEQ ID NO: 7195 - DNA, 1513 bp, unidentified
  source 1..1513: mol_type = unassigned DNA; note = element_b289899
  misc_feature 1..3: note = core
  misc_feature 4..79: note = LE
  misc_feature 80..1117: note = CDS
  misc_feature 1118..1513: note = RE
  misc_feature 1251..1500: note = bridgeRNA
tgatggggtggatggccccctcacggcatctgtgtgccaaagttgggttgtcgaaaacgccaacggacgggagccatccatggcagaggttacaacgatcgggctggatttggccaagcgggtctttcaggtgcatggggttgatgcagcgggggtggtaatggtgcggcgggcgctgcgtcgccagcaggtcttggcgttctttgccaagctgccgcgttgcctggtcggcatcgaagcctgtgcgacggcacattattgggcgcgcgagctcgccagcttgggtcacgacgtgcggctgatcccgccgccctacgccaaggcctatgtgcggcggaacaagaacgatccggccgatgcggcggcgatttgcgaggcggtgagccgcccatcgatgcgctttgtcgcggtcaagaccgaggcgcagcaggccgccgcgggcattcacaaggtgcgcgaactgctgatcaagcaacgcacgatgctgatcaacaccttgcgcgggctgatggcggagttcggcatcattgtcgccgaggggccgcgccacgtcagcgagttggtggcgatcctggccgatccagcggatgcacgcattccggcaccgtcgcaccacggcctgatggcgatcgtcgaaaccttgcgcggtctcgagcaacgtattgaacgggtcgagaagcagatcgttggctggggccgcgccaatgccacctgccgccacctgatcaccatccccggctacgggccgatcctgtccagcgccatgacggcgatggttgtcaacccggcggggttcactagtgcgcggcattttgcggcctcgctcggcctggtgccacgccaggacggcaccggcggaaaggccaagctcgggccgatcagcaagcgcggcaacggctatctgcgccggctgctcgtcaatggcgcgatgtcggtgttgggcagcaggcgggccaaggacgatgcgtggctggtcaaattgctgcaacgcaaggagcgcaaagtcgtcgcctgtgcgctcgccaacaaactggcgcgcaccgggtgggcgctgatgatgcgccagcaagactatcgccggccgcggcaggatcagctgtgccccgacctggcctgagcctgacgccgtgctcaccgccatcaagaccgcttcgcgccgcctgcggcggtggcctgcggccagccttgaccgcggcggcgcgcggcgccatgcggaactcaggtcgggacggggaaacggcgcggtgatcgaacaaagaaactggtctttgaaccaacaagacttgcgagggtgaagacgcgtgatggcatcgtcggtcgaccgacggatcgagacagacctacgccgggccatggggcaatgcgacctcgcgggcttgattaggcctcgatccacggatcccatcagggcctgcggccactggccgcgacgacaggccggacacatgaccgcaagcgaccttcagttgccgacacgcggaaaagtccttgcgagccgggggccatccacaca

SEQ ID NO: 7196 - DNA, 1351 bp, unidentified
  source 1..1351: mol_type = unassigned DNA; note = element_b28a58e
  misc_feature 1: note = core
  misc_feature 2..67: note = LE
  misc_feature 68..1123: note = CDS
  misc_feature 1124..1351: note = RE
  misc_feature 1099..1341: note = bridgeRNA
tatgggatggcccgcccctttctgcggcatccggtaggatggcgccttgaggaaggaggggacgggcatggacatcgcggttctggggattgatctgggtaagaacgtctgcagtgttgtggggctggacgggtccggtcgggtgatgctgcggcggcgggtgcggcgcgagatgctggagcggctggttgacgggttgccgcggtgcgttgtggcgatggaggcctgctgtggggcgcaccatctcgggcgggtgtttggcggccagggccatgaggttcggctgatgtcgccggaatacgtgcgtccgtacgtcaaggcgcagaagaacgacgaccgcgacgccgaggccattgcggaagcggcgacgcggccgacgatgcggtttgtgccggtgaagagcgtggcgcagtccgacgtgcaggcgctgcatcgggggcgcgagcggctggtggcggagcgcacggcgctgatcaaccatctgcgcgctctgttgctggagcgcgggatcactgtcccgcaaggtcgcggaaagctggcggtggagctgtgcaccttcgccgacgaggacgacagccggttgagcccgcgcatccggctgctgatcgaggatttgcgtcgcgaatggcggaccctcgacgagcggattgccggcttcgatgcggaattcgcggcgctggcgcgcgaagacgaggcggcgcgccggctgatgacgatccccggcataggcacgatcaatgccacggcgctggcggcggcggtgggcgatgcccggaccttcgggcgtggacgcgacatggcggcatggctgggtctgacgccgcgacagcggaccaccggcggcaagccgcatctgctcgggatcagcaagcgcggcaaccgctacctgcgcaagaacctgattcatggcgcgcgagcggttctgccgcggctcgctgatcagccgacgccgctgggaagatgggcgcggggcttgctggcgcgcgcccgaagaacgtcgccatcgtcgccttggccaataagctggcgcggatcgtctgggcggtgcttgcccatggccgggcttacgacgcggagcttgccgcggcatgaagatccggggacggtacgcgcgtcgcagtgacgaccggccgacggtgtctgcgggtggtggaaaggaagatggcctgacagtcgaacggcagcctgtaaccctggcccattgaacggtcgatcgaggccgttgtgattatgaggaccaagctgcgcggatctccatcttggccgggcaaaacccgagaccggatacgttgacgcagactggacagcgccaaagtccgaaacaccccttgcggacggggcgggccatacg

SEQ ID NO: 7197 - DNA, 1169 bp, unidentified
  source 1..1169: mol_type = unassigned DNA; note = element_b28ee7b
  misc_feature 1..2: note = core
  misc_feature 3..225: note = LE
  misc_feature 226..1155: note = CDS
  misc_feature 1156..1169: note = RE
  misc_feature 31..230: note = bridgeRNA
cttgtatcttggaatcgctgtctttgtggtagaacaggggtgggcgtgagatccggtaaagcggcaggtcatgataaccaatcaagaccgctcgtaagtttgatccacgcctcgcccttggcgctaagtaaaactcgaacagttactggagcgaccaagccggcccaacccaagggcggcgccggcctggccagctcgcatttacaagcaggagttacttaacccatgaagcaaagtgttgtctatatcgggattgatgtggccaaagcgcatttggatgtggcttgggcgggaacatttcgtcgtctgccgaatgagcggagcggccacgccgcattagtgcgctggatcaagcaaagtactacgccggtgcaactgatctgcgaagcaagtggcggctatgagcaagctttgctcgagagcttagaaaagagcgaagtcaaagttactctggtgcaagcagtgcgtgtgcgccagtacgcgcgggcggctggcatcctggccaagaccgacaggattgatgcgaaagtgctcgctgcttttggcagcgcgatgcaaccgcagccaacctcgccactctctgccgagcaaaagcgtttgcgtcagtacgaagcacagcgccgacagctgagcaggattttggtcgcagaagaaaatcgtctcgcgcaacttagctgcaccgagctgcgcactttaagtcgcagcctaattagcaaaatcaaaacacaaattaagacactcgatagaggcatcagcgatttaatcgcgcaggaccaaacgctctgcgtcaaagcacaaaaactcaccgctatcagcggagtcggtgtacgcaccgcagcgctcttgcttgcgcaaatgcccgagcttggccaactcaatcgtcgccaagctgccgcgctcgccggcctggcgccatttaatcacgacagtggatcagtgcgcggcaaacgcgccatctttggtggtcggcccgctttgcgtagcggcctctacatggccgcactctccgccgcccgcttcaatccgatcctgtcgagcttttaccaacctctgcgcaccaaaggcaaaccgcacaaactggccctcaccgccgtgatgcgaaaactcctcctcgccctcaatcaaaccctcaaaccgctcccgtgctccacttgaaatcaacacagtta

SEQ ID NO: 7198 - DNA, 1400 bp, unidentified
  source 1..1400: mol_type = unassigned DNA; note = element_b2920f8
  misc_feature 1: note = core
  misc_feature 2..94: note = LE
  misc_feature 95..1132: note = CDS
  misc_feature 1133..1400: note = RE
  misc_feature 1164..1392: note = bridgeRNA
caatgggatggactcctcctcaacttgaattgttgtcctttttttggtcaatatggtgatggtgagttaccagcattcaaattaggagaagcccatgggccagattactcgagtcggtgttgatattgcaaagtccgtttttcatgtgcacgcggtggataggtttggtgaacggcagtggaaaggaaaatactgtcgaacaaagtggttggatgctattgagaacaaggtccctaaagggactgaaattgcaatggaagcctgtggttcatctcactattgggggcgagaattacaaaaacgaggttttaaagtcaaaatcattcatgcgcaatttgttaagccttacgtaaaaagtaataagaatgatgcgattgatgcagaggcaatatgtgaggctatgagtcggccgaacatgcgctttgtaagtgtgaaatcaagtaagcaacaagacatacaatctatacaccgtatcagggacaagttgatggttcaaaaagcatccaaagcaaatcagatacgaggactggtaagcgaatatgggctagttgcgccagtgggtatcaacaaactgagagaagccatccccctgtggctggaagatgcagaaaatggtttgtcggcgctttttcgcttgttgctacgtgatttgtttgatgacttaaggcagctccaagagcgagtcgatacgctcgacacgcttattgagaaagaagtcaaaaatgaccctgtcgcacgttcgctacttcagttacggggtattggtatcctgtgtgccagcgcattgtcttgcgctattggtgatgcgaaaggataccgtaaaggtagggattttgctgcttctattggtttaacgccgaggcaacacagtaccggcggcaagcctaggttacttggcatcagtaagcgaggcgatggttacttaagaaaactacttgttcatggtgcacggtcagtcatccggcatgctaatcggcatgatgataatttaagtaaatggattgaaaagctctgcgcatacaagcacgttaatacggtaactgtagcgttagctaataaaacagcgcgtgcagcttgggctatggtaaatacaaacgaaagttatgacccagagttgatagcaagcgcttaagcttaaacgaattaagaaatacgaaaagttttcatcccaattgcaaagtaagatgtgagatggctaacaggttagaccgacacttgaaaaaccttacccggacgaagagcctttaagctcgtgtgtccgttcaggagcaagtgtgcgaatagcccatagaggttcgatgcagtaaaagaaaatgcatcattaagaaaccggatacacgttggcaatcatacccaaagttatcgaacaaattacttgcaaaagaggaggagtccataca

SEQ ID NO: 7199 - DNA, 1154 bp, unidentified
  source 1..1154: mol_type = unassigned DNA; note = element_b295ab9
  misc_feature 1..2: note = core
  misc_feature 3..182: note = LE
  misc_feature 183..1142: note = CDS
  misc_feature 1143..1154: note = RE
  misc_feature 36..212: note = bridgeRNA
cttgtcttatgactttccgtgccgacaggcgaaaaaggaaccgctgggagagggtggctgccctctcgtcagcggcgagggatggatcgagaaaaagcgggccggattgatgggccgaagcggagtctgatcaccctcgtcttttccattggcctgaacggatacccgggggagagccccggatgacaagcagaggcacggaaaagatgaccgagactaccattggcatcgacatctcgaaagacagtctcgatgcccatcgcctgtcagatggcatcagccgccagttcgccaacgattccaagggacacaaggccctgatcgcctggatcggcaaggatgttgcccgcgtggtcttcgagcccaccggcccctatcaccgcacatttgagcgtgcgctggccagaggcggtctgccgatggtgaaggtcaatccccgccaggcccggcgtttcgctgaggccgtcggcaagttggccaagaccgaccgcctggatgccatcctgctggccagaatgggggctcttctccaactggaaacgcgcccggcgccggacgagaccattgtcgaactcaggcagttccacctcgcccgcgaggcgctggtcaaggatcgcacggcggccaggaaccgcgcaaaatccctgagcatcaccctgctcaggcgtcagaatgccgagcggctgaagcacatcgagcgtcagatcgccgccatcgacgccgaattggaacgtcgcatccaggccaatgccgaactttcccggcgccaggaaattctgatcagcattcctggcatagggcgcctgaccgcgcttgctctgctgatcgagatgcccgaactcggtgtcttggaaccgggacaagccgcaagtctcgccgggttggcccctattgcccgccagtccggacgctggaccggacacgcattcattcgcggcggacgggctgacgtccgtcaggcgctctacatgcctgctctcgtcgccatgcgcttcaaccctgacctcaaggccaaataccagcagctcatcagtgctggaaagcccgccaagctcgccattaccgcaatcatgcgaaagctcgtcgtcctggcaaatgccctgctcagagcaggccgtccctggataccaaaatcagcttgatcaacacggata

SEQ ID NO: 7200 - DNA, 1363 bp, unidentified
  source 1..1363: mol_type = unassigned DNA; note = element_b2960aa
  misc_feature 1..2: note = core
  misc_feature 3..327: note = LE
  misc_feature 328..1104: note = CDS
  misc_feature 1105..1363: note = RE
  misc_feature 1080..1350: note = bridgeRNA
tgatggggtagacgccccccaacgtcctcgctgtgccaaagtggaggtgttgatgagcacacttgagggaggcgtccatgggagaggttaacacaatcgggttggatcttgcgaagaatgtctttcaggcgcatggcgccgatgcgtcgggagcggtcctgttccgcaggaagctgcggcggcaccaggttctcaccttctttgcagcccagaggccctgcacggtggccatggaggcttgtagcagttcgcattactgggcacgtgagatcgcaaaactcggtcatcacatatgcttgatctcgccggcttacgtaaaaactctttgtgaagcgtcagaagaacgatgccgccgatgcggaggcgatctgcgaggccgcccaacgcccgaccatgcgctttgtggcgcccaagagtgagcaggctcaagcggcggcggttgtgttcagagctcgtgacttcctggtaaaacagcgaactcagatcatcaatgccctgcgagggcacctggccgagttcgggattgtggtcgccaaaggcccagctcgtgttccgcaactcgtgcgggctgtcgaggatgcgaccgagccggtcccagaactcgcccgaccgatcctccagatgctgatcgaaactctccgaggcctggacgagcaggttgtctgtctggatcgcgagattgcccagtgggccaaggaggatgagacggcgcgtcggctgatgaccattcccggtatcggcccggtgaccgcagtggccttggcagcactggccccaccggccgacacgttcaagcgcgggcgggacttcgccgcctgggtcgggctcacgcctctgcagcgctccaccggcggcaagcagaagctgggagccacctcgaaaatgggcgagcgcacgctgcgccgcctgctgattattggggcgaacacgatcttgatccgggctgcccgccatggggcgccggctggctcgtggcttgcgcgtatgatggcgcgcaagccgccgatgctggtgcgggtagcgctcgcgaacaagatggcccggatcgtctgggtcctgatggcgagaggggaagtgtatcgggctccggctgcggcggcataagcacgcgcggccgcgaggctgttggggcgcaggaagagcgaaggagaggtatggcacaacggtcactgagacgggatcagacaaaccagttcaggaacaggcgcttcgagcgcgtagatttgattgggacctgatccgcgaactcccatccgggcccgcggcagtgaacggccgcagttgaggccgcacacatggcagcactgaccacgcgctgcaccaatccgaagattcttcttgcgtcacacggggcgtctacaca

SEQ ID NO: 7201 - DNA, 1307 bp, unidentified
  source 1..1307: mol_type = unassigned DNA; note = element_b2989f7
  misc_feature 1: note = core
  misc_feature 2..267: note = LE
  misc_feature 268..1260: note = CDS
  misc_feature 1261..1307: note = RE
  misc_feature 55..256: note = bridgeRNA
cctttggttaaaattagcacatatcttaagattattattgttgttgaaaatggggggtctggggggtgttaaaaacaaaaaactttgtggataacgttatgataaaaggcagggtgaactttagaccctgcttagttttagagaactaagcgccgtattagtccctgccttttatgattgcccaaggcccagctagaatactccctttgcttcatcaaaggtaattggcaaaaggcaatttattaagaaactttaaaggacaaacgtatggaacgctggaatgttattttaggtgtcgatatatcaaagcttaaactcgacatctgttgtgcagaacgggaattgcacattaaagctgacaattgttcgaaaggatttgctgattttaagaaatggtgcaaaactaatgagatcgatctgaaagaagctttaattgtgatggaatatacaggtggttatgaatatcggttcctgcagttctgcgagtcgaaatctattgcttattgccggataccaggactggaaattaaacaatccatgggtatggtaagagggaaaagtgacaaggcagattctttccggattggaaggtacggagaagaaaagagtgatcgtttggtgccggacaagccgctggataagaatatattagcactcaaacagttgctttcgttccgtaaaaggctggtccgtgaaaaggccggatatgaaagtaccgtaaaagaacggcaacatatgtatgaagtaaagaaaaccgatacgattttccgtattgctcggacaaaaataaaagagaatgaaaaatatatcagcgagctagagcaagagatcatgaaactaattaaaagcaatgaagatatatggcaaaattaccggataataacgagcattaaagggatcggaaaggtaaatgcatggatgaccatagcttataccgaaaactttaccagctttatagacgcacgggcatacggggtatatgttggcgtgatcccatttggccatacttcaggaactagcattaaaaagcgagatcgagtcagccatttagccaataaagaattaaaatctgaattgaaccaggcagccaaatcagcgataaactgtgaccctgaaatcagagcatatgcagaacgtaaacttaagaacaaaaattattcactcgtactgaacaatgtaaaattcaagctgatcctaagaatgttctccctggtaaaaagaggtgaattatatgtggaaaactatagaagagcagcttaaaaaaagcttttttaaaataaatttggaaatatattaatcctagaata

SEQ ID NO: 7202 - DNA, 1352 bp, unidentified
  source 1..1352: mol_type = unassigned DNA; note = element_b29b0f4
  misc_feature 1..2: note = core
  misc_feature 3..225: note = LE
  misc_feature 226..1203: note = CDS
  misc_feature 1204..1352: note = RE
  misc_feature 49..214: note = bridgeRNA
gtcgtacatttgtacggttaaatgtttttgaataatttcaacttcaaatttcaggatattcaagcatggaataaggcagatgtcatgttggttgactccattaagtacgataggtccccatgcttttacatctaaagactggatagttcgttggggcggtgaaaccgaccccgtgtttgcgacgagagtgcaaaagatgtagttcctgacaaaagatttgataatatgacatacataggcatcgacatcagcaaagcgacttttgtagcagccttccttcacggaaaaagctaccgtaccgataccttcccaaatgatgctaaaggcatccgcaggttcatctcgaagcttgaccctgccatccaccactgcgtgatggaggcgacaggcaactactgtttcctccttctttatcttcttgacaagtcgggcatccgggcaagcctcatcaatccgaagaagattaagaactatgcccgcgtgatgatgtccgtaaccaagacggattccaaagacgcttgtctcattgccgatttcggggagaggttcaagcctgaaccctataagttcccatcagaacagataatgattctgaagcagaagaaaacagtcctgcgtcagctccagaagcaactgacagcgacaaagaatctactctcatcgcttgaacctctgccggttaaggacaagaagtgtgtcaattctcttaaacagaccataacgttccttgagaagcagatcaagtacatgcagcaggaaatggaggcggtcgtggccgaggtgtttgacaggcagctgaaactccttacctcaataaagggtatcggggtcacacttgccacagcgctgattatagccaccgggggctttacatacttcgacaatgccaaacagttgtcccgctttatcggtatctgtccaacaatagaacagtccggcacgagcataaacatccggggacatatcaaccgtaacggtgatgagactctgcgttcaatgctttatgtggcggcatggtcagcaagtcagcacaacaaggcgtgcaaggaatgctaccaacgattacgaggcaatggaaaatccggcaaggttgccatgattgccgtagcaaacaaactcgtcagacaggcttttgctgttgtgacatccaataattcatatatcgacggtttcgtctctacgaaacctgataccaccgtctgaacacttcctctctccttctggcgaggggatgccccagcggcgggggcgacctaaaccgcccccaagagcggacggaggcatgactattctcaaataatctaaggtggatgtaatttttgcctcattttatttggattttaatatagttc

SEQ ID NO: 7203 - DNA, 1152 bp, unidentified
  source 1..1152: mol_type = unassigned DNA; note = element_b29b535
  misc_feature 1..2: note = core
  misc_feature 3..192: note = LE
  misc_feature 193..1137: note = CDS
  misc_feature 1138..1152: note = RE
  misc_feature 26..191: note = bridgeRNA
cttgtatctctcagcctgtggcacgatactgccgcccatgacgaattggggcctgatagaccgttggttccatggtccttctcagaccgagtgtcagcgtgggtcgtcaggccccctcacctgtaaagcccgaacagttgcgagggccgctgagcccgcatttcgcaaggctgggcacgacaggaggctgctatgaggtccctcgtcttcgtcggcattgatgtctcgcaggctcgcttggatattgcgatccgtcccggcacgtcgttttcgatcacgcatggtgagtcggccatcgccgcattggtccaacagctctgtgccctcagtcccaccctgattgtgttagaagcaaccggcggaatggaaatccccctcacgagtgcgctcgccaccgccgggttgcccgtggtcgtcatcaatccccgtcaggtgcgtgacttcgccaaagccagtgggcacttggcgaagactgatgcccttgatgcccaggtactcgcgcagttcgccgaggtcatgcatcctcagccgcgaccgcttccggatgcggagacacggaccctcgctgcgctgttgacccgtcgacggcaactggtcgagatgctgacggccgaaaagaatcgcctcctgagcaccgccgcgccaatccgcaaacgtctgcggacgcatatcacgtggcttgaacgggaactgcagtccaccaacaccgccttggcaggagctattcgccaaagcccggtgtggcgtgaaaaagacgaattgttgcagagtgtacctggagtgggacccgtcgtgacctcgaccctgttggcgagtctcccagagctcggcaccttgacgaacaagcagatcgcagccctcgttggcgtggcacccctgaatcgcgacagcggcacgctccggggcagacggacggtctggggcgggcgcgcacaggtacgcgccgttctctatatgggcacgattgtcgcggcccgattcaatccggtgatccgagtcttctatcagcgcttgcagcaagcgggaaaggccaagaaggtggcgctcaccgcctgcatgcgcaaactcctttccatcctcaatgcgatgctgaaacatcgaactctctggcgagaagtggaggtatcccatgcctaaatctcaagacagttg

SEQ ID NO: 7204 - DNA, 1321 bp, unidentified
  source 1..1321: mol_type = unassigned DNA; note = element_b29df0f
  misc_feature 1: note = core
  misc_feature 2..90: note = LE
  misc_feature 91..1095: note = CDS
  misc_feature 1096..1321: note = RE
  misc_feature 1095..1315: note = bridgeRNA
gaatgaaagggacttccccgggccggcgacggcatcgaagtgccaagattgaagtgtctgagttcaatctagatagccggaggggaagtcgtggaacagattactactgtgggcattgatctggcaaagaacgtgttttcgctgcatggcgtggatgcgggcggcaagacggtgttcaggcgcacggtgcggcgtgaccggctggccgagacggtggcgtgtttgtcgccgtgtctgatcggtatggaggcctgctcgggcgcgcacgaatgggggcgccgattcgagcagttcgggcacagggtcaggctgatggcgcccaagttcgtggcgccctaccgcaagagcgacaagaacgacggcaacgatgcggaggcggtgtgcgaggcggtgacgcgcccaaacatgcgctttgtgccggtgaagagcaccgagcagcaggcgctgctgacgctgcaccgtgtgcggcagggattcgtggtggagaggaccgccgtcatcaatcggctgcgcgggctgctctctgagtttggcgtggtgttgccgcttcgctcggtgagcgtgcgccgccaggcggcgcacgccgccgaggcgctgcccgagctcgcgcgccgcgcggtcggcgatcttctggagcagctgcgcctgctcgatgggcgcatcggcggctacgacaaggagatcgaggcccaggcgcggctctcggagccggcacggcgcctgatgaagatccgcggcatcggtgccaccaccgcgcttgcgatcgtcgccaccgcaggcaatgcccgcgagttcaagaacggccgccagttcgccgcctggatcggcctggtgccgggccagtactcgaccggcggcaagagccgcctcggacacatcagcaagcgcggagacgcctaccttcgcaacctgctcgtgcagggcgcacgttcggtcctgcagactgcaggcgcacaccaggatcgcctgtcgcgctgggcgctcgagttgcagcagcgccgcggctactaccgcacgctcgttgccatcgcaaacaagaacgcgcgcatcgcctgggcgctactcgcgaagaacgacacgctgcgaatgaattgactctcatcgactgcattcgaggatgacgaaacggtcagaccgacgcccggagaacctgcaaagtgcggacggcacaaaccaatgccgactaacgatcgaggaccgggcgtgcggctttcatcagggccagagcattcaatgctcacaaacaggccggttatagtgacgcagtccgaccttccatcatcgatcccgcagccgttgcagccgcgaggaagtccttata

SEQ ID NO: 7205 - DNA, 1503 bp, unidentified
  source 1..1503: mol_type = unassigned DNA; note = element_b2a29a7
  misc_feature 1..2: note = core
  misc_feature 3..535: note = LE
  misc_feature 536..1483: note = CDS
  misc_feature 1484..1503: note = RE
  misc_feature 7..239: note = bridgeRNA
ctaatgggagctgccgggtcggcgatgtggcaggctcggtcctgatagccgccagtggatgagcactcttccatccaggagttgccgagtcctaaaggcagatcgtgccttcgctggtggtcgggagggttgaccgctgatgggatgacgtgcccgcctgcgtgcgcgagcacttgaccattaggtcgctggtggtcctcccgcaggcttgtgatgctggcagcccggtcgtagaccaggcagagggaggtgcggggtactgtttgtcggcgatgactgggccgaggaccaccacgatgtcgaggtgcaggacgcgaccgggcggcggctgggcaaggcaaggctgccggaagggatcggtgggatcaccagctccacgcgctgctgggcgtgttgctgcccgaagctgccgaacccgaccaggtagtgatcgggatcgagaccgaccggggcccctgggtgcagacactggtggccgccggctaccaggtggtcgcggtcaacccgctgcaggtggcccgctcccgggagcggcatggacacctcgggcgccaaaagtgacgctggcgacgcgcataccctggccgacatggtccgcaccgaccaccaccagctccgacgcatcgctggcgacagcgacctggccgcagcggtcaagatcgttgcccgcgcccaccagacgctgatctgggatcggcagcgtcacctgctgcggctgcgctcggtgctgcgggagtccttccccgctgccctggtggcgttcgaggacctgaccgcccccgacgtgctggagttgctcggcaaagctcccgacccggccagcgccgcgcggcttgggaccgcccagatcgctgcggcgctcacccgtgcccaccgtcgcaacgtggccgacaaggccgccgcgatccgggcggcgctggcggccgagcagcttggccagccgccggtcgtggccgcggcctacgcggtggctgtgcgcgcacaggtcgcggtccttgccgccctcaatgccgagatcgaggcgctgcaagcgcaggtgagcgcctattttggccggcacccggacgctgaggtctaccgcagccagccagggctgggcgatgtcctcgccgcccgggtgcttggcgagttcggcgacgatgccgaccgctacgccggtgcgcgggcccgcaagaactatgccgggaccagcccaatcacccaggcatctggcaagaagaaggtcgtgctggcccgctacgcacgcaacgatcggctcaccgacgccctgcaccaacaggccttcagtgccttgcaggcatcggcgggttcccgggcctactacgacgcgctgcgcgcacgtggcatcggccaccatgctgccctgcgccagctcggcaaccggctggtcgggatcctccacggctgcctcaagacccgcaagccctacgacgaggcaaccgcctggccacagcacgccgacaccgaccaagctgcggcttgacatcccagatcatgggatgt

SEQ ID NO: 7206 - DNA, 1383 bp, unidentified
  source 1..1383: mol_type = unassigned DNA; note = element_b2aa09e
  misc_feature 1..2: note = core
  misc_feature 3..85: note = LE
  misc_feature 86..1114: note = CDS
  misc_feature 1115..1383: note = RE
  misc_feature 1088..1370: note = bridgeRNA
tgatggagtggatgccccctcctgacggcatcgagatgtgccaaggtggcgatgttttcgcatcccacgaacggagcgggcatccatggaaaatgttagcatcatcggtctcgacctggcaaagcgatcgttccaggcacatggcgccctcgccgacggcgccgtggctttccgcaagaagctttcccgagagaaagttctcgctttctttgccgagcagccgcgctgcgtcgtcgccatggaggcctgcgggagcgcgcaccactggggtcgggccatccatgatcttggccacgaggttcgcttgatcccacctgcctacgttaaaccctttgtcaagcgtcaaaagaacgacgcggccgatgcgcaagcgatcgtcgaggccgcaagtcgacccacgatgcgctttgtcgcggtcaaaaccgaggaacagcaggcacgcgcgatgcttttccgcacgcgcgatattttggtccggcagcgcacgcaactgatcaacgccctccgcggtcatttgtcggagcatggcgtcgtggccgcgcaggggccggcgaatgtgaaagttcttgaagaggcggtcggggatccaggaacctcgcttccccttcttgtcgtggagctggcgcgcgtcttcctcgatcagatcgaggggctttcggaaaggatctctggactcgagaaagtgtcggctcacgaagcggcatccggagaaacgacacggcgtttgcaaactatgccaggcgtgggtcccatcacggccctggccattgagacctttgcgccgccaatggatgtctttaaacgcgggcgcgatttttccgcctggctgggggtagtgccccggcaacattcaaccgggggcaaacagattctcgggaaagtctccaagatggggcagcgcgacatccggcgtctgctgatcattggcgccatggccgtcgttcgctcggctttgagaaagggcgcgccggaggaaagctggctacagcgcatgctggcgcacaagccacggatgctggtggcgatcgcgctcgccaataagatggcgaggtcgatctgggccatgcttgtgaaaagagaagattttcgagttcctgtggttgcggcgtcctgatcgacgattggacgcagtgactcgagaaacgtcaggcgtgtgaggagttcgacgaacggtaaggtcaaatgatcggtcagatccggacccggaaacgcacgacgtaagcaaagggcttgcagcccgctcaaatgatctgcgccaggtccgcgcatctccataccggccagcggccacgtcaggctgcatctgaaggcctgatacatgaccgcacccgatcacgcgatcaaaccgctaaaactccttgcgcgaacgggggcatccataca

SEQ ID NO: 7207 - DNA, 1152 bp, unidentified
  source 1..1152: mol_type = unassigned DNA; note = element_b2aede4
  misc_feature 1..2: note = core
  misc_feature 3..186: note = LE
  misc_feature 187..1137: note = CDS
  misc_feature 1138..1152: note = RE
  misc_feature 52..197: note = bridgeRNA
cttgtatgtttcatttaccagacattaaagaattgttagaatgatttgttccggcctggctcggcagctcggaatccccgtgggcaccgagcccgtggatgagcaaggagcgccgagccggtgtttcaatgttaacccgaacggttgtaggggcaaataagcccgcattttacaaggatgggtattatggacgaaacaacgatggagaagtttgttggtattgatgtatccaagtccagtctggatgtatgcattgagcctgttacacagacgtttcatgtagtttacgatgaggcggggatacgccggactgtcagccgcctggaggaggtgaagcctactttgatagtaattgaagccacgggcggattggaagtgcgtatcgcgaccgaactcgccggcaaaggcctgccggttgccgtcatcaacccgcgtcaagcacgtgattttgccaaagccacggggcagttggccaagacggatcgggtcgatgctgcggtgctggcggcgtttgcccgggcgatccgtccccaggcccgtccgctccaggacgcagacacccgtatcctgaacgacttggtgaacaggcggcgtcagctgattgacatgcgcgttcaagagaccctccggctcaatacggcagcatcaaagccgctggagaaaagtctgaaaaagcacattgcctggctggacaagcgtatcactgaggttgacaacgacttgaccaggcgtttgcgcaactcggaggtgtggcggaccaaggacgatctcttgcggggtattcccggcgtcggtgcggtaaccgccctgaccatgctggcgaaatgtcccgagcttgggaaattaaaccgtcgagagatcgcggcgctgactggtgtggctccactggccaacgatagtggcaaacatcgcggaaaacgttttgtctggggtgggcgtgcggacgtgcgggcagtgttgtatatggcaaccatttccgctatccgttgcaacgacacaatcaaaacgttcgcccagcggttgaaacaagcgggcaaacctcccaaagttgtcatcgttgcttgcatgagaaagttgttaaccatcatgaatgcaatgttgaaaaataataccccatggaacccaaaaaccacttgacaccaaacacggttg

SEQ ID NO: 7208 - DNA, 1402 bp, unidentified
  source 1..1402: mol_type = unassigned DNA; note = element_b2b764d
  misc_feature 1..2: note = core
  misc_feature 3..91: note = LE
  misc_feature 92..1153: note = CDS
  misc_feature 1154..1402: note = RE
  misc_feature 1174..1398: note = bridgeRNA
ataatgggatggtcgcccccttcctagaacggcatcaaggtgccaaagtggaaattcaacaacatccactgaaatgaaaggagcgaccactatgaagattacgacaatcgggttggacttggcaaagaacgcatttcaggtccatggtgtcgatgagcggggcaaagcagtgctcaagaagcagttgaagcgggcgcaggtactgccgttcttcgccgatctgaaaccgtgtctggtggggatggaggcatgcggtggcgcgcactactgggcgaggaaactcgctgagctggggcacacggtgaagttggtagcgccgcagtttgtgaaaccctatgtcaaatccaacaagcacgatgcggcggatgccgaggccatctgtgaggcggtagctcgaccgaatatgcgattcgtcccggtgaaaacggtggagcagcaggcaatcctggcactccatcgagcccggcagggattcgtgaaagcgcggacagcgcaggctaaccagatccgggggctagtggccgaattcgggatcattctcccgcagggcattcactcgatagcgcaacggattcccgacattctcgaggatggtgagaacgggctgccagacatgctgcgccagctccttgagcgactgtcggtcaacctcaaggaactgagccgacaggcggatgagtgtgaagccaggatccaggcttggtaccgagaaaacgaagccagtcggcgtctggcagatatccccggcattggtccgatcactgcgagtgctctggtcgcctctgtcggtgatgccaagtgctttgccaacggccggcaactggccgcttggctggggcttgttccccgacagagctccactggcggaaaacagaaactcctcggcatcagcaaacggggcgatacctacctgcgtacgctactcgtccacggggctcgctccgttatccgtgtcgccgagcgtaaggccgacaagcacgagaactggctccatcgagtgatgggtagacgccataagaatatcgccgcggtcgcactagccaataaaaacgcacggaccgtctgggcgctgctcgctcacgagcgcctatttcaactcaattaccgggcggcaatgaccagtgaggagagcacccgggtcccaatcgaataacgggttagaaggaggaaacaccaccgattgcacaggcagttatgaactgatggcaagataggtcagaccggggttggctcaacctgattgaagtcatagcgctaccagcgcggcacaatgataaggtgtcaacccgcagatcccatcagggacagaagcatctgcttcaacaaagtccggatgtatggccgcaatcttcaccttctcgtcatcagccgtaatcgcttggcaaacagggggcgaccatgt

SEQ ID NO: 7209 - DNA, 1361 bp, unidentified
  source 1..1361: mol_type = unassigned DNA; note = element_b2b8608
  misc_feature 1..2: note = core
  misc_feature 3..74: note = LE
  misc_feature 75..1100: note = CDS
  misc_feature 1101..1361: note = RE
  misc_feature 1076..1349: note = bridgeRNA
tgatggggtggacgccccccgacggcatctatgtgccagagtgaggtgttgaacagcactcgaaggaggcgtccgtggaacaagttagcactgtcggtctggatctcgccaagaacatctttcaagcgcatggcgctgatgcctcgggcgaggtggtgtttcgcaagaagttgggtcgaggccgattgctggcgttcttcgctggcctgtcgccctgcgtggtggcgatggaggcctgcgccggcgcccattactgggggcgtgagctggcccgccagggtcatacgatccgattgatcccgcccatctatgtaaagccgttcgtgaagcgtcagaagaacgatgcggccgatgccgaagccatctgtgaggcggcgcagcgccccagtatgaggttcgtgccgctgaaggaggaggagcagcaggccagcagcgtggtctttcgggcccgcgaccttctggtccggcagcgaacccagacgatcaacgccctgcgcggtcacctggccgaatacggctggattgttcccaagggcgttccgcacgtcgataggttgatcgcgcgcgtcgaagatccggcagaggcgcttccaaccgccgcgcggacgattcttctcgtcctggtctcgaccctccgatcgctggaccagcagatcgccgtgctcgatgcggagattgcttcccgggccaagaacgatccggttgcgcgtcgactgatgaccattcccgggatcggtcccatcacagctacagccttggtcgcactggccccgtcacccgaagccttcaagagcggtcggcacttcgccgcctggctgggactgacgccgcgacaacgatccaccggcggtcagcagaagctcggcgcgatcaccaagatgggcgagcgaacgcttcgacggctgctgaccatcggggccagcgcggtgatcaaacaggccgtcattcggggcgcgccagcaggttcctggctgagccagatgctggagagaaagcccaagatgttggtcatcgtcgccttggcgaacaagaacgcccgcatagtctgggcgctcttggccaagggcgatgtctaccgagctccggtcgtgtcggcctagccagcacgaccgcgagacgtcgaagcgtagggatgagcgaaggagcgtatggcgcaacagtcggcgagacgggatcaggaaaaccagggctttccactgtgcttcgagcacgccgtgggtgatttggaccggatccgcgaactcccatacaggccagcggtctttgagcgaccgcatcaacaggccggacagatggcagcatccgactacgtgtcagaaattcccgaaaatcactcttgcgctgaagggggcgtccacaga

SEQ ID NO: 7210 - DNA, 1514 bp, unidentified
  source 1..1514: mol_type = unassigned DNA; note = element_b2c066c
  misc_feature 1..4: note = core
  misc_feature 5..106: note = LE
  misc_feature 107..1498: note = CDS
  misc_feature 1499..1514: note = RE
gtcactagggcaccatccttagcaggggcaccgatagtgtgccctttgttggaactcggcgggagccggggtgacggcctggttcggtcgcccgtgaagggccaccatgacactgccgcccccggctttcgcggggctgcagaccggcaacagagggacgcgccgcagagcgccagttagtgaccgcccgggagccagcctcgccgccgccgggccgtcgctgccaccgccattgcaaggagtcgagttgtcgctcgcgctgcctgaagccctgttctttaccgggatcgactgggccgccgccacccacgccgtgtgcgtgatggacgcggccgggaagatcaccgccgagttcacgatcgagcactccgcggacgggattgccacgctgatccgccgtctggcccgttacggcgacccggccggtatgcccatcgggatcgaacgcccgaacgggcagctggccggcctgctgctggaagccgggcacccgatggtcccggtcagcccgaatgcgatcaagacctggcgggagggcgaagtgctgtccggggccaagtccgacgccggggacgccgcggtgatcgccgggtacctgcggctccgccagcaccggctgcgggtcgccgccccccactccgaccagaccaaagcgctgcgtaccgtcgtgcacacccgcgatgacctggtggagatgcgggtcgcatccatcaaccagctctcggcgctgctggaagcgcactggccaggcgccaaggccatcttcgccgacgtcgagtcgccggtcagcctggcgttcctcacccgttacccgactcctgacgcagcccgccacctcggcgagaaacgcatcgccgcgttctgcaccgcgcagggttactccggtaagcggccggccgcggtgctgctcgcccgcctgcgttcggccccggccggaacgaccggcgcggccctgacccgggccctgcgcgacgccgtcctggccctcgtcaccgtgctgacggcgcagaacgccgcgatcaagagcctcagccggtgtgccgccgcccatctcagcgagcatccggacggcgccgtcttcacgtcgctgccaaggtcgggtcagatcaacgctgcccagatgctcgccgagcggggcgactgccgccaagcctacgacggccccgactccgtcgccgccctggccgggtgcacgcccgtcaccaaacagtccggcaagcaccgcgacgtgcacttccgctgggcctgcaacaagcgcttccgcaaggcgatgaccacgtttgccgacaacagccgccacgccagcccctgggccgccaagatctacaacgacgcccgcggtaacggcaaggaccacccccacgccgtccgcatcctcgcccgcgcctggatccgcgtcatctggccctgctggctcaacaccgtcccctacgacccagccaggcacggcgcggcagcagcactcaccacacaggcaaccggccagattgctgcatgaggttgacacagggggt

SEQ ID NO: 7211 - DNA, 1378 bp, unidentified
  source 1..1378: mol_type = unassigned DNA; note = element_b2c0861
  misc_feature 1: note = core
  misc_feature 2..76: note = LE
  misc_feature 77..1102: note = CDS
  misc_feature 1103..1378: note = RE
  misc_feature 1146..1375: note = bridgeRNA
tactgagatggacccgacgccaccctccggcgaaactgtgtgtccctcatcaaccgttgaaatgcggaggttcatcatggaaatcgacatcctggggatcgaccttgctaaacgtgtgtttcaacttcacggagcagaccgccgaggtcaggcgatgcaccgatccaaagtatcgcgcccagctctgatggaaacgattcgtcaacttcgtccacgaaccatcgctatggaagcctgcagctccgcacaccactgggccaggcagttccaagcactgggcattgaggtccagctcatcagcccccactacgtcaaaccgttcgtcaaaacgaacaagaacgacaggaacgatgccgaggccattgttgaggctgcttgccgcccaagcatgaacttcgtacccgtcaaatctgttgagcaacaagacattcaggcagttcatcgtgttcgtgagctgttggtgcaccagcgcacagccctgatcaaccaggcaagagggctgctcgctgagcgcgggatcatcatcgccaagtcacctgcggcgttcaaacgctccattcccgacatcctctcggagccggatggggagctgaccacgttctgccagtccttgctgaccatgcttcttgagcagttccgagtgatcgaaaaccagataggtagagccgaggactggatcacatccttcatgaagaactcggctctgtgccaacgactcgtaaccattcctggtgtgggagccattacggcaacggcaatcgttgcggcggtgggggacgccaaagcgttcaagaatggacgacatctcgctgcgtggatcgggttggttccacggcaacactcatcaggcggaaagaaccgtctgctgggcatcagtaaacgcggtgacggctatctgcggacattgcttatccacggggcgcgatcggtactgatccgtgttgcctgcaaatctgatgcgcgaagtcgctggctgcaggaattgattgcccggcgtgggtacaaccgtgcgacggttgcgctggcaaacaagaacgcacggatcattcaggcgatgttgagtcacgagaccaactactgccccgcgatggttgcggcgtagctgcgaccgtgttcaaaaacaaaaaaaagggagagcacccacactggtttgcgaagcctcttaaacgtgatgacacaaccggttagaccagcgttccgggagcctgcactttctgtcggctgatcactcaagccgaactgctgctaaggacggaacgcgcggatctcatcaaggctgcgggcatgcatcgacgactgcccatcagcaagccgtatacatgtgtgcagaccgttgaacatcaccaaaaggggcttgcaaaaggcgtcggtccataca

SEQ ID NO: 7212 - DNA, 1430 bp, unidentified
  source 1..1430: mol_type = unassigned DNA; note = element_b2c6095
  misc_feature 1..3: note = core
  misc_feature 4..221: note = LE
  misc_feature 222..1415: note = CDS
  misc_feature 1416..1430: note = RE
gctgatatagatccttgtaggggcaggatggacctgacctctgcggggagaccggcgttcggctatccggcttgagaccgtcggagctagataccggccctcgctctttgactgagacggcgattgggttccgacggcagagaccggagatggcacatcagcggacgctggtcagaggtaagcgagaaaccctggggtcgaccaaatcgaaggagggcgccatgagcgctgtggtcggcatcgatgtgggggcctacaagcacgccgccgcggtgtgtaggtcgggtgaacgggaggcggagaaagcggtgttccggctggccgccaaccgggctgggttcgaggagctagacggctggctggagcgccaaggcccggtcgaacgggtggtgctggagtcgagcggacactattactggccgctggccagccacctccaccggggcggttatcaggtggcggttgtcaatccgctgcaggccaaatactttgccaagagccggttgcagcggagcaagtcggacccggccgatgcccgcacactggcggcgttgggtatgagtgaggaaccacgggtcaaggacccgctcctgggcgccgaggccaaagaggcagcccgcttttggagcggtctggtcaaagagcagggccaggtccgccagaagctgttgcggctggtggagattggcttcccggagctgaaggagtgcttcgaagaccccctttgcgaaaccgcactggccgttctcagagaagccccgacagcgcgcgcggctgcccgcaagcgagtctcaacgctggccgatgcaaccaggccaggcggccggcgccggttgggggagaacacggcccgccggctccatgagctggccaagggcaccatcgcgccgcccgagttggatacccagatgggctttgaggtcgggctgctcatccagcagttcgaccttctcgagaagcagatcgagattgccgagcagagggtgtcggaggtcctcgactcggagctggcccagaggctccagaccatccccggggtggggccggcgctggcggctaccttcatcgccgagatcggggatatctggcgcttcgacgagtttgaccagctcgccgcctacgccggtgtgcaccccaaggagcagagctcaggcaccaagggtcagaacccggagaccagctggcacatggccaagacaggcaacgctttcattcgctcagccgcctaccggatggccgtcgtcggcatccagcacaacccggtcattcgcgctcactacttacgaaagcgagctcagggcaagaccgccatgaatgccctcggtcactgcatgtccaaatccctggccatcgtctggggcgtctggcgctcagggcgcgacttcgaccccagtctcggaggtcccagaacttgacaagaccctatgggt

SEQ ID NO: 7213 - DNA, 1312 bp, unidentified
  source 1..1312: mol_type = unassigned DNA; note = element_b2c7315
  misc_feature 1: note = core
  misc_feature 2..66: note = LE
  misc_feature 67..1083: note = CDS
  misc_feature 1084..1312: note = RE
  misc_feature 1085..1306: note = bridgeRNA
taataagatggtacgcccctccattccactaaactcgatagatcgagcaagggaaaggtgaccttcatgagtaacacacacattatcggtatcgatttagcaaaaaatatttttcatctggttggccatgacctatcaggccatgaaacatttcgtaaaaagctaactagacaaaaaacacttcaattactttctgttcacgagcctgtgattgtggcaatggaggcatgtggtgggtgtcactggtttgccagaaaatgtcaggagtatggtcatcaggttaaattgcttccttcgcaatacgtcaaaccttacgtaaaaacgaacaaaaatgacttcattgatgctgacgcaatagctgaggcagcattgaggcccaagatgaggtttgtttccccaaaaagcgagcaagcacaacttggtatagtcgttagaagagttcgatctggctatatcaaggaacggacagcttgtatgaatcgtattggttctattctgctagagttcggggtcagtttccctagaggccatcatcacatgaaaaacctgttccaatggttggcaaataggaaagaatctattccaccgctccttattctcgaactcaggcagcagctagattactacaaccttttgaatcaatggatcaagcaacaagaagataagctattagaattaaacaaaaacaatgagttaaatggtttgttacagagtatcccaggtattggccccatgacagcggcatgctgcctatcagtagttggtagtcctagcgacttttccaatggaagaaactttgccgcctggataggcttggtaccgtaccaatatacaacagggggcaaacctaagttactgggtatatccaagcgcgggaacaaagagctgcgtgaattattcatccatgcagcacgttcggttctttggcgagattcgtcagcggaacgatattttggctcttggctaatagaccttaagcaaaggaagccttttaatgttgccgttgtcgcgttggccaacaaattagcccgcatagcatggtcagtgatgacaacgagaaagccatttgaagtaagaacataaccagaatttgcatatgatatcgagagatgacaaaacggtcagaccaccagattgaagacctgatgtccagaacagcaactaaagtgctttgaaggttttgaggacaatctggcgcggatctcatcgtagagctgagactagtgatgtctcctatagactctgaaaacattagcgcaaaccagctccgttattttgaatttatcacttgcaaaacggggcgtaccataca

SEQ ID NO: 7214 - DNA, 1351 bp, unidentified
  source 1..1351: mol_type = unassigned DNA; note = element_b2ca6e4
  misc_feature 1..2: note = core
  misc_feature 3..77: note = LE
  misc_feature 78..1103: note = CDS
  misc_feature 1104..1351: note = RE
  misc_feature 1107..1348: note = bridgeRNA
ttaatgagatggtcagcctgaccgaaacagcccgatcggcttacgctgattgggctgtttcctttttggaggccatcatggcgaacgcggcgctcatcggtattgatttgggcaagcagtgcttctttctgcacgcgcaggacaggcgcggtaatcaggtttggcgcaagaaggcgacgcgcaagcagttgtacgagctattggccacttgcccggcctgcgtagtggccatggaggcttgtgccggtgcgcactggctggcacgtaaatgccagtcgttcggccaccagccgcgactgatcgcgccgcaattcgtcaggccattcgtgaagggcaacaagaccgatttcgcggatgcgcaagccatctgcgaagccgcctgtcgccccgcaatgcgctttgtcgcgctcaagaccacgcagcaacagacattgcttgcgttgcatcgggtgcgcgatgcgctggtcactgaacgcaccgcgacgagcaatcagatccacgcctttctgctcgagttcggtattagcttgccggccagtgcgctcgcgatcacgcgtttgcccctgttgctcgatgatccggccaatgcgctaccgcctctcatggtggctttgctgcatcgtttgcatcgacgccacgcgcaactcgcccaggaaatatccgaactcgacactcagatcaaacgacaggtcatcgaggacgatgccggccgacgtctgcttaccattccgggcattggacccgtcaccgccagcaacctgttggcgatggcgggggacatggatggattcaaacgtggccgggacttcgccgcatccatcggtcttgtgccgcgccagcattcgaccggcgggcgtccgacgctactgggccttttccagcggggcggccaacattttcggcgtttgttggtgcaaggcgcgcgttccgtgatgcgcgtgatcgaccgacgccacgatgcgcttggtcgatgggcgcaggagctgctgcggcgacgccacagcaacgtggttgcctgcgcgcttgccaacaaaatggccagaatcgtttgggcgattctggccaagggaggcgagtaccgggcgcaaccggttatcgcttgaacagccttactgcctgcttttgcgaccactgacacctgtgatgaagataaacggcacacggcccgactgaaaacctgccacgaaatccagtcctcacgagactgagctttttttaaggacagttgggcgcggctcctcatcgagggccgggcgcttgatccgcgcccattccgagcccggatacatttgcgcaagcccttttatcttaggtcacagatcaaggttgcaaaaaacaggctgaccataca

SEQ ID NO: 7215 - DNA, 1362 bp, unidentified
  source 1..1362: mol_type = unassigned DNA; note = element_b2d8183
  misc_feature 1..2: note = core
  misc_feature 3..84: note = LE
  misc_feature 85..1116: note = CDS
  misc_feature 1117..1362: note = RE
  misc_feature 1149..1337: note = bridgeRNA
agatgtatggactcctccccattaacgggagagtacggtataaagaaattgcaaaacatcttttaccaattaaggagtccatacatgacacagtctaatttaattgctattgatttagcaaaaaatattttccaagtagcgcagtttcaaggcagtaaacttaaatctaataaacaagctagccgcaaagcattgcttgagttattagttaaagcaaaaccatccgttgttgctatggaagcatgcgcaagcgctcaatattttgcacgcactgcacaatctttcggtcataaagttatgttgcttgacccgttatttgttaaagcatttagacaaggccaaaaaacagatgcaaacgatgctattgcgatagccattgctagtaaagtccctaatgtccgcacctgtaaaattctctctatcgaagagcaagcattgcaatctcttagtaaggttcgggcgctagcagataaacaaaagattcaattatcaaaccaaatacgtgggttactccttgagtttggtattgtcattaaccaaagtgaggccgcatttaaagcagccatacccgatattttagaagatgcagaaaacacgctgccattagaactaaagcatgcgcttgcgctgacttacgctctttatcaacagcagtgtgacaacaaagtagagttacaaaaacaaatcgagcgtattgtaaaacaaaatgatggctgtcaacgcttaatggcactcgaaggagtcggcccaatcactgctatcgagcttttgtcttttttaggtgacacaacacagtttagcaatggaaggagtgcagcggcgtgtgcaggagtgacaccgctgcagcattcgacaggcggtaaagcaaagataggccgtatacctaaaagacgaggtggagcattaaggcgaaatctatttttaggcgctcgctcgatagtgagtaaattaaaaaacagagaggcctcgactgaaaaagaacgatggataaaaagcctgctgataagaaaaggggttaagtgcgcggcgattgcattagcaaacaaaacaatgagaaccgcctatgccttactaaaaaatggaacgaattatgaaccaacagcactgacagcctagcgtaaaagaataaaaaatcagtaagcagaagaattgaacaagccaagatagagcattaagaggtgagacctacccttgatagcctgaaaaatcgctagtgtacgaagataccgtgtagcagataaggcacaagggcgcgaaaacatcgaagtggccgaggtagcgcctcatcagagcccgtatataagtacgcaatcacatcagcttaatgtaaaaaaggcttgtgcaatcggaggagtccatata

SEQ ID NO: 7216 - DNA, 1426 bp, unidentified
  source 1..1426: mol_type = unassigned DNA; note = element_b2db41d
  misc_feature 1: note = core
  misc_feature 2..130: note = LE
  misc_feature 131..1150: note = CDS
  misc_feature 1151..1426: note = RE
  misc_feature 1187..1426: note = bridgeRNA
atgaaatgaacgtctcccacccatcgtaggtagtgcacaggaagcgcaagatgggctttcacggtgcattggcagacattgccagcagaagaagatctccatgatcttcaacccaaacggagaatctgacatgacgcttactgttatcggtgtagacatcgccaaaaacgtatttcaggtgcacttcgtggatagcgaaacgggcgaaatcgttaacaagcccatcaaacgtgcagctttccttgcattttttgtcaatcggcaaccctgtctgattggtatggaggcatgtggtggtgcgcatcactgggcaagacagcttcgccagttggggcatcaggtcaggcttatgccagggcggtttgttaaagcctttaacatcggcaataagagcgatgcagcagatgctcgtgcgatctggttggcactccaacagcctggcaagacggtggccgtcaaaaccgaagcgcagcaagctgtactcgcgatgcatcgcatgcgtcagcaattgatcaagtttcgcacaatgcagatcaactgcctgcgagggctgctgactgagcacggtgaggtgatgggcagaaaccgctctgcgctggataaggcaatgcccatggcattggaacggctagctgaacgcttgccggctatgctgatcgacactttccgagaccagtggcatggcttaaccaaacttgaccagcaggtcgatgagattgagcaacggttgcgtaaatggatgcgaacagaagagtccgtcaaagcaatccatgccattccaggtgttggcctcttgactgctactgccgtagtggccgccatcggcgatgcaagaacattccgttctggacgtgagttcgcggcatggctggggttagtcccccgacatacaggctcaggagggaaagttcagcttcatggcatcagcaagcgtggggatacctaccttcgcaccttgcttatccatggggccagaatcatccatcgccatcaggctgatacctgcagctggctgaaacagctgggtcagcgtcgccacaagaatgtggccattgtggcccaagccaacaaaactgccaggattatctgggcagtacttgcacgcgagcaggcttatcaagcagggcatatcagtgccagacccgcataaggcagctggcatagcagattaacttaactattgaggatgacgttgaaaggttgcgcaggcaatcaagtgtgatgacaaaacaggtaggaccgtgactcactgaacctgaacgatgctctgagcctacaggctcgcaaaggaaatgaggtgtgagtcagcggatttcatcggggcccgcagcacagtagaaggctgcaacaaggccggatataaagctgcaaccgaacctgtcagtcaaaacatgtgattcttgctcaaacgggagacattcatata

SEQ ID NO: 7217 - DNA, 1371 bp, unidentified
  source 1..1371: mol_type = unassigned DNA; note = element_b2e23ad
  misc_feature 1..2: note = core
  misc_feature 3..94: note = LE
  misc_feature 95..1114: note = CDS
  misc_feature 1115..1371: note = RE
  misc_feature 1140..1369: note = bridgeRNA
cgatgagatggtctcctccccgctcgtacggcatcgcaatgtgccatgattgaatctggaaaacacaatcaacggagtcgcagaggagaccaccatgaaaggtacgataattgggttagatttggcaaaggatatatttcacattgcagtgctcaaccaggccggcaaacaagcgcggaagaagaaacttcggcgccgccagttgcgactgtactttacccagactgaaccgtgcaaagtcgccatggaagtctgtgccagtgcgcactactgggcgcgtgagtttcagcgtaggggtcatgaggtggtgttgttaccccctcagcatgttaaggggtatttacgcggccagaaaaatgactataacgatgcactggctatcgcagaatccgcccagcacggcgctatcaggccagtaatcatcaagagcatagagcaacaagatacacagtcctttcatcggatccgtcgacagctggtaggtgagcagacccgcctggcaaaccagatccggggccttctggcagaaaatggaatagtcatgaggaaaggtgtgtcggttgtcaggcgagacattccagagattctgggggatgctgataatggcttgtcggaacggtttagagcattgctgtgtagacagcatcagcgtttcctggaccttgatgaagagctggcctggtataaggctcagctcgttgccgaggcaaagagtgatgagacttgtcgccgtttaagtgatgttcccggttttggccctgttgtcagcagtgccttcaaaagctggatcggtgatggcaagcagtttaaacgaggccgggatgcctccgctgcgcttggggtggtaccccggcaacacagtacggggggtaaggaattgctccttggaatcagtaaacgaggcgattcttacgtgcgctcactggtaatacatggagcgaggtcggtcgtatcgcacgccgggaagaagacggatccactgagtgtgtggattaatcgcctggtagccacgcgaggctttaacaaagcggtggtggccctgacaaacaagctgatacggatcgcctgggtggtggtggcacgcggcgaagattatcgcccacaagcggtttagtgtagaaacgaaagttagagaggttccaaccccaggttgcgagggcaatagacgatagatgacataacaggttacacctgcataacgaaaacctgaaaaatccgcgggcagtcaatgccggtagggcgataaggacgttatgtgcgcaggctcatcaaggccagaagcaactgcttcgtaaacaggccggatatacggccgcaacctatccctgttatctagatcctatgccttgcaaaaggggaggagaccatata

SEQ ID NO: 7218 - DNA, 1375 bp, unidentified
  source 1..1375: mol_type = unassigned DNA; note = element_b2e3a27
  misc_feature 1..3: note = core
  misc_feature 4..88: note = LE
  misc_feature 89..1111: note = CDS
  misc_feature 1112..1375: note = RE
  misc_feature 1110..1362: note = bridgeRNA
tgatgggatggacggcccctgtgtccggcgtcgatgcgccatagggtggtcgttgctgaagcaaccgccacagcaggagccgccgatcatgaagactatcacgatcgggatccttctcgccaagtctgtgttccagattcacggggttgacgcagagggctgtgttacaatcaagaggaaccttcggcgcactgaagttttgaagtctttcgaggcgctggctccttgcctggtgggcatggaggcgtgcgccatggcgcacttctgggcgcgcgagatcagcgccctgggacacgacgtttggctgatgccgcctagctatgtgaaggctaatctgcgccgacaaaagaatgacgcggccgacgccgaggcgatctgcgaggcggttacccgtccgagcatgcgcttcgtgccgatgaagagcgccgagcggcagggcgtgctgatgttgcatcggacgcgcgatctgctggtgcgccagcggaccatgctgatcaacgccattcgtggtcactgcgccgagttcgggatgatcgctccgcagggagcccgccggtccgccgacctaatcgagcgggttcgccaagccgatggatcgttgcttcccgaccttgctcggtcggccttactgatgctggccgggcagctcgacgcgttggccgcccagatccatgcgatcgagcgccagctcatggtctggcatcgccaggatgaggccagccagcgcctggcgaccatccccggcgtcgggatcattacggcaactgcgctcgccgcgtccgtgaccgatccgagcctgttccagtccggccgcgagttcgccgcttttctggggctcgtgccgcgtcagaactcttccggcggcaaggaccgcctcggccgcatctccaagatgggtgacggctatctcagaaagctcctcgtggtcagggcaacctccgtaatccgctgtgcggcggacaatgcgacgacgatcggcgcctgggtgaggtctctgatggagcacaagccgagccgggtcgtcacagtcgccatggccaacaaaaccgcccgtatagtctgggccgtgctcgctcgcggcgaggtctatcgcgcgcctgcgacgagctgatcgagaccgcagcggcaggggccgctgctccaaactgcgagagtgtagatgagctgatgaggatcaagaagcggaccgcggaggaagacaacccgcagagctgtcggagcacaaagctcgataacttgagagggacttctccagcggactccatctgggctagcggccatcgaggccgcgccaacaggccggacagatgaccgcacccgacagatcttcaactggggtcaactttccccttgcagctcaggagccgtccacaga

SEQ ID NO: 7219 - DNA, 1646 bp, unidentified
  source 1..1646: mol_type = unassigned DNA; note = element_b2ebe4a
  misc_feature 1..2: note = core
  misc_feature 3..285: note = LE
  misc_feature 286..1524: note = CDS
  misc_feature 1525..1646: note = RE
  misc_feature 12..305: note = bridgeRNA
ctattacaatagatttacggtagaaggcacggcagccagccgtgtctttttccgcattgttgccaaagctgttagaatgagaaggaaatggcctgacgtaatcctccaaggaccaacacgtccgttgaaaagtccgtcagccagcctctcattcgcagcgttcgatttatgcaggtagagccgtctcgccgtcttggcccggcgcgcccgtgtcatcaaatagatagaatcggcaatgatggaagggctggacgccaatcaatctacagatgggagtgtttcgcaatgaacgcggtagggatcgatgtttccaagggcaagagcatggtggcggtacgccgccccttcaacgagaccgtggcaaagccctttgaagtgcgccacaccggcagtgaactcaagcagctggcagactacttgaaaagcctggacggtgagacgcgggtggtgatggagcacaccggacggtactacgagcagatcgcccagtacctccatgacgcagggctttatgtcagcgcggtgaacccaaaactcatcaaggactatggcggtgggaccagcctgcgccatgtgaagaccgataaggccgacgccaggaaaattgcaggatacgcccttgacagatgggctgaattgcggcaacatacacccatggacacgatccgttatcaactgaaaatgctgaaccggcagtgcggcctgtacaccaagaccaagacgatgatgaaaaacaacctcatcgccctcttagaccagacctatcccggcgtaaacgccctgtttgacagccccgtgcgggaggacgggacacagaaatgggtggatttcgccgcctccttttggcacgttgactgcgtgcggggcatgagccgaaccgccttcgtgcagcggtacgccaagtggtgcaaacagcacaggtatcaggccagggcgggcagggctgaggaaatctacgagcactcccaagacctgattgccatgctgcccaaggatgccatgaccaagctgctggtgaagcagtctgttgatgccatcaacgccgtttctgctactctggagcggctcaaggctgagatgctgaagctggcttccttgcttcccgagttccctgtggtgatggccatgcgcggcgtgggcgacaccctcggcccccagctcatggcggagatcggggacgtggcccggtttgcccaccgcagtgccattacatccttcgccggcgtcgatcccggtgccaaccagtccggcacccacgaggctaagagcgtgcgtatctccaagagcggctcacctgagctgcgtaaagccctgttcctggtgatggactgtctcatccagaccaaaccccaggatgatcctgtgtacctgttcatggacaaaaaacgcgctgagggcaagccttacctggtttacatgacggcgggtgccaacaagttcctgcgtatctactacggcagggtgaaggagcatctggcctccctgaaagggaatcctgtgcctgatcctgaaggacatacctgagcattgccggatacgccttgacaggccggcgcttcggtgctggccttgtttttgtgcccttttcgatcacctcattctttttcacctttctgcaaatttactcttgactttttatttgcaga

SEQ ID NO: 7220 - DNA, 1328 bp, unidentified
  source 1..1328: mol_type = unassigned DNA; note = element_b2ef0d4
  misc_feature 1..2: note = core
  misc_feature 3..74: note = LE
  misc_feature 75..1106: note = CDS
  misc_feature 1107..1328: note = RE
  misc_feature 1087..1313: note = bridgeRNA
agataattggactcccccatcctcatagcgatactctgcccaggtcgatcagcagatgataaatggagaccattatgggaaatactatcgttggtgtagatttagcaaaatatgtgattcaagtttgtgttttcacaaataaaaaagtgcgttcgaataccgaaatgacaccgtctgaattcatagattttctcgctaacgctaaattgctaaccattgtatttgaagcatgtggcacttccaattactggaagcagaaggcaatatctctcggccatgatgccagacttatttcagcaaagttagtatcggcagtaagacagaaccaaaaaaccgatagaaatgatgcgcttgcgatcgttcaagcggcattattacctgatgtcacgttcatcactgggaaatcaattgaacagcaacagttacagtcgatcatgcgattacgggagctttgtgtaaaacaaaaaacggccacaggcaatcagattacatctctgttgttagaattcaatatcaaagtatcgagcagaaatggcggcttaaagggggcggttgaatccaccttggaagatgctgagaacgggctatcatttgaattcagaacggcgttagatacagcctggaaccaatatctgtccatcgtaaaatcgatacaaacttatgatgactgcctggaaaaatccatggaaatacattctgagtgtaaaaagttacttaaacttgaaggtgtgggcacattaaatgccataaatttatacattgcgttgggctgcgctgaactgggcgtgtttgaaaaagggaaagatgcatcagcctgtatcggattaacgccgatacaatactcatccggtgggaaaaccaagcttggttcaataggtaaatatgtgaaaaacagtgtcctgcgaagtcaactaattacaggggcaatgtccgcagtaaaccatgctacaaatagaaaagctagaactactaaagacctgtggatacagtccatggtggaacgacgagggaaaaaatgtacggctgtcgccttagccaataaaacggtaagaacggcctatgccatgcttactaaaaatacagaatatagagccgaactaatctaggctttagcaagcgttcaaccaacaaaaatgcacaatcgaagataaaaatcagcccgttaatacagtagtcaacattgagccttgagctcgtaggatagatttgcagacgggttcgcgtaaatatcaaagagcctgagttcgctactcatttagagctcgtacataagttcgcatttatttcttttattggcatattgttgttgacactggggagtccacata

SEQ ID NO: 7221 - DNA, 1475 bp, unidentified
  source 1..1475: mol_type = unassigned DNA; note = element_b2ef954
  misc_feature 1: note = core
  misc_feature 2..221: note = LE
  misc_feature 222..1241: note = CDS
  misc_feature 1242..1475: note = RE
  misc_feature 18..233: note = bridgeRNA
ctgatagaggatgtgatgcaaggacgttgcggtcttcgtagcgttcggggtctggccgggtgtgtctctcgaatgccctgtcaccgtgatggttgacttccgagcgaagcgatcagccggtcagatccagtcgcggtgtggctcgtaagaggaacggcatcaaccacgtatcaggtgtgcccaccgtggcgaactcacttccatcagcattggagcacgccatgttcataatcggcatcgaccctcacaaggggtcccacaccgcagccgcggtcgaccacagcgagacggtgatcgacacgttgcgtgtggtcgccgactgccatcagcgtgaacggttgctcgcttgggcggtcccgttcacaccgcgtacgtgggctgtcgagggggcgaccggcatgggtgcgttgctggctcagcagctcgtcgctgccggcgagcacgtcgtcgatgttccaccgaagctgtcgtcgcgggtgcgcttgttggagaacggcaagatcgacaagacggacccgaacgatgcacgttcggcggcgatcgtcgcgtggcacaaccggtccttgaacgttgtcgccgccctcgatgaacaccgcgtcgtgctccgactgttggccgatcgtgatcatcagatcaccgcgcaacgaacacgcacgatctgtcgcctgcatgcgctgttgtgtttgttgatcgagggcggaacgtcacgtgcgctcagcctccaacgcgctgaacagctcctggtcaacatcgatatcgacggaccggtgacccgagagcggatcgccgcgggacatcagcttttggaggaagcacgcgtcctggacgcgtcgcgtgtcgaggtccgcaaacgcaccgccgaaacgatcatcgcgtccgcgaccaccgtcaccgacgtctacgggatcggtccgttgatggccgcgatcatcatcggtcgcgtcggtgacatccgccggttcccgacgtcggggcacttcgcccgccacaacgggaccgcaccgatcgaggcgtcacccggaccgaagaaacggcaccggttgaacccgcgcggtgaccgccagttgaaccatgcgatccacatggccgccgtcacccagatcagctacgacaccttcggccgcgtctactacctccgcaaacaagccgagggcaagacccgcaaagaagcgatgcgcgcgttgaagcgacacatcagcgacgccgtctaccaacgcctcatcaccgacacgcgccgctgacaagatcgagccgagagcacgctacttgagcatgtccggtgggctcgggaggacaacgcgaggacgacactgaatccagcgtggccggcatctcacctcacacgacccgactcttcggaacagtcacccccgaacccgacaacacgctcgacccgaccgctcgcgtcaccgacccgggccacctcgacgcgccccaacgcggctcgaaaacaaccgcttgacacaaagaggatt

SEQ ID NO: 7222 - DNA, 1473 bp, unidentified
  source 1..1473: mol_type = unassigned DNA; note = element_b2f5051
  misc_feature 1: note = core
  misc_feature 2..230: note = LE
  misc_feature 231..1454: note = CDS
  misc_feature 1455..1473: note = RE
  misc_feature 1..215: note = bridgeRNA
cgttaccttgtgagtacccccgatagtcggggggtctggtcgctcggccgggtatggctttgttgccctgccatccatggtccggggggtgttgccgcccggtcgagagacacgcgttgaccgctgatagggacacggcccagcactgctgaggtctcttcgtaacgtgggtgccggcatcgggtgtcgtgactgcgaccagcagtgatgcgtcaaaggaggacagcatcatggagacaagattcgcggtcgtgatcggcttagacgttgggaagacaggccaccatgcctgcgccctggaccccggcggaagccggttgttcgacaagcccctgccccaggacgaggcccagctgcgggagctgttcaccgaactccagaagcatggcaacgtgctgatggtcgtcgatcaacccaacaccatcggagcactgccgatcgcggtcgcccgggatgcgggctgtgccgtggcctacctgcccggactagcgatgcgaaaggccgcggacctgtatccgggccggtccaagaccgatgcacgcgacgcgttcatcatcgccgacaccgcccgcaccatgccgcacaccctccgtgccgtcgaccgtgacaacgaagtcctctccgcattgaaggtcctcgctggctttgatgaggatctcgctcacgaaacaacacgggcgctgaaccggatccggtcgctgctcacgcagatccatcctgccctggaacgggtgttcgccggcggtagcctcgccaacagtctcaccctggagctgctgatcaagtatggcggccccaccgggctcaagaccgcaggccgggggaaggtattacggttcgcccgcgcccactctcgccgagaccccgaagccctgatcgaccagatcttcgcggcgctgggtgagcagaccgtggtcgttcctgcgaccgccgcagtggagttggtgatcccgagagtcgctggccaggtgaaagagctgaaggagcagctagcgacggtggctagggaggtcgaggggatgttggaggacttccctctcgcctcggtcttgaggagcatgccggggatcggcctcaagaccgccgcgcagatcctcctgaacatcggcgacggttccgcgttcgagactcccggccacctcgcggcctacgccgggatcgcgccggtcacacgaagatccgggacctcgatccgcggagagttccccgcccgatcgggcaacaagcggctgaagaacgccctgttctactctgcctgggtcgcctcgaaccacgacccgatctcgaagacctactacgatcgcaaacgcgccgagggcaagcgccacaacgccgccgtgatctgcctggcccgccgccgctgcaacgtcatcttcgcgatgctccgcgacggcacgtactaccagtcacccacaccagtcccgacccccgagccacccactctcgcggcttgactcgaaacatagggacacc

SEQ ID NO: 7223 - DNA, 1210 bp, unidentified
  source 1..1210: mol_type = unassigned DNA; note = element_b2f77db
  misc_feature 1..4: note = core
  misc_feature 5..210: note = LE
  misc_feature 211..1182: note = CDS
  misc_feature 1183..1210: note = RE
  misc_feature 33..203: note = bridgeRNA
tcatcctatgcttatagtcgctaggttataattaataattctagcacaaaggcaggacacactattgatcgtcatgcgtgtttaacaccgtcgggaatgtaagtacctgcctttatttaagagagttaagctgaacagttcgaaaggtcatcatgaacctgcatttaggattgcgagctaagatctcaatattaaattaggagatttaagatgaaaaaatttgtcggcattgatatttccaaagagacatttgatatttattttgagcaagaaggtaaaggctgtcatgttaaattacagcagacagaagaagactacaaagtcttacttcgtttaattagtaaagatgcaatttgcatcatggaagccacgggcaattatcatttaaagttagcccactatcttcatcaggcaggtataaaggttattgccgagaatccattaaaaataaagcggttttcgcaaatgagtttacaaagaactaaaacagataaggctgatgctaagcttatttgtgagtatggacggcttattttatcatcgaacaaactccattgttggcagccggatgaaacggaaataggtcatttaaaacaatatgatacagttcgacatcaattgataaagcaacggactgctttaagtaatagtgaagaggctttgaacgctctgactcatttaaatgatgaggtcactcaagtattgaacgacatggttaccgctgttgataaagccataaaacagcttgataaaggcatgcttaagcttgttaaagagcatcattcagagacgtttgatttggtaacgagtgtaccaggggttggacccaaaaccgcgaccctgatgatttgtttaactgatgggtttaataaattttcccacgatcaagtaaagcaatttattagctatattgggatgagcccaagaacatttgaatcgggaactagcgttaaaggacgagctcatattagcaaggtagggaatagcaggatgcgatcaatgttgtacatgtgtagctggacagccaaaagaaaaaatcagcaatgcatagcactatatgagcgtttatcaggaaaaggaaagcctgagaaagtaataaaagtagccattgctcacaaacttattcgccaagtttttggggttataaaaagtggagaacctttttcaaaagagtatgcttaatgataatttcgttgacattaagcacagt

SEQ ID NO: 7224 - DNA, 1331 bp, unidentified
  source 1..1331: mol_type = unassigned DNA; note = element_b2f7edf
  misc_feature 1..3: note = core
  misc_feature 4..82: note = LE
  misc_feature 83..1093: note = CDS
  misc_feature 1094..1331: note = RE
  misc_feature 1097..1329: note = bridgeRNA
tgatgtgatggtcttctccttattcggcatctacgtgccatgattgaagtatcaacatgcaatcaaaacgggagaagaccaaatgcagattacaacaattggtattgatatagcaaaaaaactatttcatgtggtgtgctgtaacagcaagaataaaatcatccgaaagaaaatgctcagacgcagtcaactaatggattatttatcaaatatcccaaggtgtttagttgcaatggaagcctgtgcaacatcaaattattggggcagagaaataatggcactggggcatcaagtaaaattattaccaccccagcatgtgaaagcttttttaacgggcaataaaaatgattacaacgatgctcatgcaattgttgttacctctgggcaagcacacataaaagcagttccggtgaaatcagttgagcagcaagacaatcaaatagtacatgcggtgagagaattagccatcaggcaacgtactgctttgtgtaatcaaattagagggttgttacttgaatatggtattagcgtcagcaaagggattaacaatttacgcaaagaggtggttcatttacaggatgatacctcagcgcttagtcaaacattcaaacaagtacttagcctattatataatcaactctcgttactagatgatagtatagcgcagcataaccagcggataacacagcaagctaatcaccatgaaacttgtttgcgattacagactattccaggcgttggtccattagtggctacaagtatttttaatgaaataggtcatggtagcgcttataaacgaggtcgagaggtatcagcctcaatagggttagtgcctcgccagcacagtacaggtggtaaagaacgactgcttgggataagtaagcgaggaaatcgctatttacgatgtttgcttatccaaggagcaaaagcggttgtctttagagcgaagcataagacagacaagcttagtttgtggataaacagaattgttgtcacacgagggcacaataaagcgtgcgttgcctacgcaaacaaaatggcaagaatagcttgggctattaccgtttcaggtgagagttaccaagcgatataaatactcttcagcgaattgcgaaggtaagtggcgagatgacataacaggtcaaaccggcatagtgaaaacctgataaccccaacggacgataaaccccgaagagctgataaggacactatgcgcgatttacatctaggccagagcataaaaaggttgctcataaacaggccgaatatatgacagcaaacctgtccctgttatcaaaaactcaccttgcaatatgggaggagaccatata

SEQ ID NO: 7225 - DNA, 1541 bp, unidentified
  source 1..1541: mol_type = unassigned DNA; note = element_b3015a8
  misc_feature 1..2: note = core
  misc_feature 3..241: note = LE
  misc_feature 242..1468: note = CDS
  misc_feature 1469..1541: note = RE
  misc_feature 27..249: note = bridgeRNA
ctcgtataatcaacttgcggtggaaaaaagtgaaggaaagcaggtcaccgcatacacctgcgtcctgagaatatgggacaatggttccgtacaggcagggggcgcagtcttcctccttgaggtgtagcctccaaaaaaagaattgcgcctctgcttttacgggcggatgcgaatgagctggatagcgttgagcgctccatatctaacgaggttgcatcccgtaaatgccggaggaatacctttgcctgtcgattcatccagggaggtgacaaggatgttttatgcagggatcgacatcgcgaagcgaaaacatgaggtttccataatcgacacagaaggcagagcgctttctcaaagcctttccttcaccaacgatcgggaaggcagcgaccgactcctcgccctcttcgagagactgagcatatcccctcaggagctcgtgatcggcatggaggcgacagggcactactggctgagcctgtattcctggctcctggaaaaagggtatgatgtgaaggtcatcaatcccatccagtccgatgcctttcggaggctgtccattcgcaagaccaagaacgattcgaaagactcgctggtcattgcacagcttatgcgcttcggagaatattccgcgacccggctttccgaagaaaatatccacgcgctgaaacagctttcacgatatcgtctgtctctggtcgaagagtgcggaaactgcaaacgcagagtcatcgcacttctggaccaggtgttcccggaatacgaaaccctgttctcggacacattcggaaccacttctaaagaactgctgctcaactgccccactcccgaagacatgctgacaatatcttccaggaagctgacaacactgctcaccaaaaccagcaaaggaagattccgggacgagaaggcgaatcagatacgaaaaaccgcttcaaattcctttggcgtcaccttttcccgcgatgccttttctttccagatccgacagctgatcgaacagatcacctttctcgaaaaacagacggaagaactggaaaaaaagatcgccgccctgttaaggaaaaccaatacagtgatcactacgattcccggcatcggagagactattggcgccgccattatcggtgaaattggtgatatcaaccgctttgacactcccggcaagctcgtcgcattcgcaggcctggatgccgccgttcaccagtccggagagttttcagggaccaaggggggaatatccaaacggggctcaccctatctccgcagggcgatctggatggccgcttccagagccgtcttttgtgatccgattctctccaaatattaccagggcctcaaagagcgggggaaacatcatctgacagccgtcagcgctgttgcaagaaaaatgtgcaatatcattttcactatcctaaaagagaacaggccatacgaggtaaatcctccaaagcctttaagaaactgagttttgtcccatattcgcttttcaaggttctcttttttgctccttgttttgctattgactttttatagctggt

SEQ ID NO: 7226 - DNA, 1612 bp, unidentified
  source 1..1612: mol_type = unassigned DNA; note = element_b30277f
  misc_feature 1: note = core
  misc_feature 2..279: note = LE
  misc_feature 280..1491: note = CDS
  misc_feature 1492..1612: note = RE
  misc_feature 13..299: note = bridgeRNA
cctattacaatatatttacggatcaaggcacggcagccagccgtgtctttttccgcatcgttgccaaagctgttagaatgagagagtaattggtctgacgagcgcctccaaggactttgcgtccgtgagattgtcagtcagccgtcctctcattcgtagcgttcgatttatgcaggtagagccaccgcaccggtgcgttcgtgtcaccaaactgatagaatcggcaatgaggaatgggcggtctaccaaattgcaagttcagtgataggagtgttgaatatgaacgcagtcggtattgatgtttcaaaagggaaaagtatggtttccgtacttcgcccctttggagaagtggtggcaacaccttttgaagtccgtcacaccgccattgaactcaaaaagttggcagactatctgaaaagtctggacggtgaaacgagaatcattctggagcatactgggcgatattatgaacctgtggctcaattactccatgattccggcctgtttgtcagcgcagtgaatccaaagctgattaaggactacgggaataactcgttgcgcaaggtcaaaacggacaaggctgattctcgaaaaattgctcgacatggcctagataactgggtagaactgcgccaacatactcctatagatacaattcgctaccaactgaaaaccatgaaccggcagtatagcctttactccaaatctaaggtatccatgaagaacaatctcatctctttgttggatcagacctttccatgtgtcaacactcttttctccagccccgcccgtgaggacggtagccagaagtgggtggactttgccacgtcattttggcacctggactgtgtacgaggtttgagcctcgcctcttttactcagcattaccaaaagtggtgcaagcggtatggctacaacttcagcaacgggaaagcagccgaaatccacgaaagcactaaaaaccagattgctatgctccccaaggatactatgaccaagatgttagtccaccaagctattgaacaactcaacgccgcctccagggcagtggaatcgctgcgcacggagatgcaccatcttgcacagcagctcccggagtatcctgtggtcatggcgatgggcggtgttggcaagtcacttggaccccaactcatggctgaaattggagatgtgacccggttcgcccacaagggttctctggctgcctacgccggcgtagatcctggtgccaaccagtccggcacacgtgaggccaaaagcacagcttcttccaagagcggctccccggaattaaggaaaacactgtttatgataatgagcgttctcctccaaaactcgcttgcaaatgaccctgtgttccaattcttggacaaaaaacgcgctgaaggaaaaccatactatgtttacatgaccgctggagccaacaaatttcttcgtgtctactatggcagggtgaaagaatacctgttgtcattcgaagcagctgattgattcataccggctcttacattcaggctggcgctatggcggcagtctttttgcgctgctatttttatctccctatacagcctgcatatttttctcaatctgcgcttgactttttatttgcagg

SEQ ID NO: 7227 - DNA, 1480 bp, unidentified
  source 1..1480: mol_type = unassigned DNA; note = element_b3129e5
  misc_feature 1..2: note = core
  misc_feature 3..206: note = LE
  misc_feature 207..1220: note = CDS
  misc_feature 1221..1480: note = RE
  misc_feature 13..190: note = bridgeRNA
cttgtatgtaatagcagtgtggtggttagctactaccacatgaagcggagtgagccagtccctgtcctaaaggtataaccttgttcaacagcttatagctctccgcttccctttcacgccagcattgatcttgaacggttaccaagagcacgactctgcatgtacaaggcaaacaggcgtgatggttaagtgaaaggagagtaaaaatgtatcaattaggaatcgatgtcagcaaagcaaccctggatatttgtttgcttctcgacggtattcacgggcgaataaaaaccaagaaagtgaagaatgattatcaggctgtacatattattctggcctggcttcaacaacagaactgcagacctgaagatgtccataccattatggaagccacaggggtgtaccatgaactgttagctacaggactacatctggctggagtaacggtttctctggctaatcctcatcgtagccgggagtttgccaggggaatggacatattgatcaaaactgacaaggttgatgcgtggatgttggcctgttacggcgcactaaaacagccacagccctggacaccacctccagaggaaattcgctatctcagcgcccttcttaagcgtagagatttacttgttgcggatgctgttcgtgaaaagaaccgactggaaaaatatcacgctaccagcaccccagaagtcattgtccagtccgtagaaaaaatgctgttgcggctgaatgaagaaatagcagttctggaatctttgctgaaagaacatatagatagccatctcagtctgaaggaagatctggcacttttgacctcaataaaatcagtgggagcacagcttgctttaaacatgctggtgattatgcggtcacatgattttgactcagcagaacaggttgcagcttttctgggtgtggttcccgtagaaaaacgctccgggacatcagttcgtggacgtcctcagatgtcaaaaattggccctcctaaaatacgcgcaaaattgtatctatcagcgctgtgcggcctgcgctttaaccccctgatgaagtcaatctacgaacgactttgcctggcaggtaaacctaaaatggttgctgttggtgccctgatgagaaaactaattcactggtgctttggtgttctaaaaaaccgtcatccgtttgacgtaaactatcaaagggttgatgcgcaaagcgcatgtaaggcggcactttgaactgacatattgcattgtcgggtagccgccgaagcccggcgtaagccggtggaggatcattaaagatcctgatacccctcccgccctgtagagccatgagggcttacagcaaatgattatgctgagttaagcccttttaaccccgttagcgcggcgtagccgcgatgtatcggggacttagtgctggcagtttactgacagcgcttagtgggctgtatttcctaaaaacaaagcgatattttcttgacagagcacggtag

SEQ ID NO: 7228 - DNA, 1344 bp, unidentified
  source 1..1344: mol_type = unassigned DNA; note = element_b3141fc
  misc_feature 1: note = core
  misc_feature 2..67: note = LE
  misc_feature 68..1093: note = CDS
  misc_feature 1094..1344: note = RE
  misc_feature 1111..1341: note = bridgeRNA
taatgagatggtccccctccgctctggtctaagcccgacgaggttaacttttgggacggaggctatcatgcaacaggttacgctcattggcatcgatctcggcaaaagcgtcttccacgttcacggccaggatcagcatggtaaggaacaactgcgcaagaagttcagccgtaagcagttgatggaatttttcgccacgctgcagccgtgcaccgttgtgatggaggcctgtgccggagctcactacatggctcgaaaattgatcggattcggtcatagcgccaagctgatctcgccgcagttcgtgcggcctttcgtcaaaacgaacaaaaacgattacgtcgatgccgaggcgatctgcgaggccgccagccgcccatctatgcgctttgtcacaccaaaaaatgaatcccagcagaccttgtcggctctgcaccgtgtacgcgaatccctcgtgcatgatcgaaccaaggcgtgcaaccagatccacgcgttcttgcttgagtttggaataagtctaccgatcggccatgccgctattcgacgactgccgagtacattggctgagcatgaactgccgcctcgactggtggcggtcttggagcgcctgcacatccatttcaaatatctggatgagcaaatcgatgcaatcgaggaagatttagctacccagctcgcagacgatgatcttggacagcgcctgctgaccatcccaggcgttgggcccattacggccagcgtcttggcgagcgaaatgggagatggcaagcagtaccactgtggtagggactttgcggccgcaattgggcttgtaccccgccagtacagcactgggggcagaaataacctgatgggtatcagcaagcgcggcgacaagaacctgcggcgattgctagtacagtgcgcgagaacctacatgctgcgcgtagaagggaagacagggcaactcgcggagtgggtgcgatccttgctgacacgtcgacactccaatgtcgtggcatgcgcgcttgccaacaagctggcacgaatggcctgggctatcgccgcgcaccacagtacttttgatacaaagcgctccctcatgaaaacatgagagagcctggattttcttaacaaccacctcacggtttgcgactgctgaatttggatgacgtgaacggcacaccggcctgtcggataccctggcaaaaaaatcggctgtagcaagccgagcgccttttaaggaccgacaggcgcgactctcatcgtggcgcggagctagcctccatcagacgccggatagatttaagcaagcctcactcacttcttacagaatcagcttgcaaaaaggaggggggccataga

SEQ ID NO: 7229 - DNA, 1372 bp, unidentified
  source 1..1372: mol_type = unassigned DNA; note = element_b315314
  misc_feature 1..2: note = core
  misc_feature 3..204: note = LE
  misc_feature 205..969: note = CDS
  misc_feature 970..1372: note = RE
ctcgtattatatagtagtagtttttatagaccctctccaaggtctttacaactattaggtcatagtccattctttacctcttctgtaggttcggctatgatatataagatgctgtggattggtttatttctcctaccacttgatggttttaggaaggctccaaccacagtctctttgttcatttgttaatcagttagataccgcatgacggtttatttagaacgaggttacaatctccttggatatctcattgataaaggtctgcccacctatgttatcaatccgttacatacaaatctgtacagaaaaagtctaagccttagacagacgaaaacggataaagtagatgcccgcacaattgcttccatactcatgtctgatgtgaacttaaagtcctactcagacacattttaccacaacgaagagttaaagtcattaactcgttatcgttttgataaagtaaaagaacgtgccaagctaaaaacttccgtttcaagactggtctgtatcttattccctgaattagaaaaacttgtaccaacacttcatatggcatctgtttatgcattgctttctgaatttcccagtgctaaacatgtagctactgcacaccttaccagacttacaaatcttctttccgaatcttccaaaggtcgatatggtaaagatactgctattactttcagagattctgcaagagcttctatcggctcaaatatgccagccaaatctcttgaattgaagcacaccatcaaacttattcaggaacttgattcagagattgatgaaatcgaaaatgagattaaaatcatcatggatgaaatcaactctccaattcttagcattcctggaatcaactatcgcatgggagctatgattattgccgagatcggtgatttcaatcgttttgattctcctgataagatcttagcttatgccggcttttcgccatcaacatatcaatcctgacaactggatggtgcctacgcacatatggaaaaacgtggctccagatacctgcgatacgctttgtataatgccaccaaatatgtctgccactgggatccaacatttgcagcctatcttgctaaaaaacgagcagaaggtaagcattacaatgttgccatatcacactctgtaaaaaaattggttagagtgatttatcatcttgaaaaaacaaagtagcaatacataaaagtagcttaaatctttctaattcaatactcctttttggagcacctatcacgatgctctttttgtcatgcagttttcaatgttcaatgaactctaactgagttccaaatatatctaaaatacatttctgtactttattcaaaaatatcattttaagacttgacttttaatagttagt

SEQ ID NO: 7230 - DNA, 1536 bp, unidentified
  source 1..1536: mol_type = unassigned DNA; note = element_b316be8
  misc_feature 1..3: note = core
  misc_feature 4..244: note = LE
  misc_feature 245..1423: note = CDS
  misc_feature 1424..1536: note = RE
  misc_feature 8..225: note = bridgeRNA
tttcgtattattaggtcagccagagatttctggttggcttattttattaggcactttaagatggcagagtcgggaagaacgttggccttttagggagtatagatcccgttcttaaaactgttctccccaccaccctcaatcaccatgtttgagctggtagaggcaagtgacctcgtatcacaagcgaagctatgggacgtggaaaagcgtgggattaccgacaaattgttagggggaggttgttatggaaccggttgtaggaatagacattgccaagggtgctagtgtgttgcaggttttttttaaaaggaatgaaccttacgggaaagccgagagcatttcgcatgacgaaatcggattcaaacgtttaggagaacttttgacagaattacaagcaaaaacgttggtcgctcccgtagttatcttagaagcaacgggacattaccaccgtccactcgtgagttatttagtagacggtggctggaagcatttcgtcattaatcccttgcagtcaaaacgggctaaaggaactcaattacgcaaggtcaagacagacgcaatggatgcctggcacttagcagatatgtattatcgtggagatgtcaaacctcatcgaacatgggaagagacgtataccgaacttcaacatgtgacgcggcagcatgagttcgtcacagatatgtttgtgcaagccaaattgaacgcgagagctttgctcgatcaggtctttccagcctacacagaggtgttttacaacctgttctctgtaacggctttgaacgtgctacaacagtgtttagacagaaaaacagaggggctagtcgaattaatccaaacgtttgcggggagatctcacactaaaaggtgggcttacgagaaagcagagcaacttgatcggttgttgcttacttggaacaaacagacgaaaagcccgtctcagacagccatgctctcgagcatgattcaacttctgctggcgttcatcaaccaactcagtcacctagagaaacagatgaatgaaatctcctcattcctacctgaagtagcattagtgaaaagtgtaccgggtataggggataaacttgccgcagccattgtagctgaaatgggtaacgtcaagcaatttacaagcgccaaacaactcgttgcctttgcggggctcgatcccggtattttcagttcgggaaaatttacagctacgagttcccgtattaccaaacggggttcaaaacggcttcgacgctccttatatttagcggttcaatgtggactaagacggagctccaatcggaaaatcaaggaatattacgataaaaaaaggaacgagggcaagccctacaaggtggtcgtgatcgcctgcgccaacaagcttctccatcacgtttacgccatccttagtaaaagccagccctataaagagtaatatccatatttaaccataaccttcaagccaatgaaggttatttgtgttgcacaaaaagtataacattctatttgactttaaccaagcgataatgcttgacaaacattagctgg

SEQ ID NO: 7231 - DNA, 1405 bp, unidentified
  source 1..1405: mol_type = unassigned DNA; note = element_b327d40
  misc_feature 1: note = core
  misc_feature 2..463: note = LE
  misc_feature 464..1378: note = CDS
  misc_feature 1379..1405: note = RE
  misc_feature 12..240: note = bridgeRNA
ctacttaagactggtgtcagggcttgatcccggccaggatcgagtcccaggtgcccggtgggaggctccctaatcggctgcccccggcttgtttggtgtggctcactaatggcttgcgtcccaccggattaccgtgcgggcgtggctggaaggggtctgccctggctcgaagtagcggtgcccttcccgcacggacacccagttcgttcggacttctggaaggacaccgtgacggtcatcatcggaatggacccgcataaacgctcggccaccatcgaaattatcgaccagtcctccaccgtgctggcgaccggccgatatagcaccgacaccaccgggtaccgcaagatgctcgccgcggcaggacagttcccggatcgggtctgggcgatcgaggggctgcaacggcgtcggccggcacctggcacaccggctgatccaccatggtgagattgtcatcgatgtgcccgccaaactgtcggcgcaggtgcgggtgttcgccaccggcaacggccgcaaaaccgacccggtcgacgcccattcggtcgcgctggccgcgctgcggtcgccgaacttgcgacgagtgcaagcagatccggaactcgtcgcactcgggctgctggtcgatcgtcgcgacgaactcggccgcacacgcaccgaactgttgaaccggatccaccggctgctcatggagctggttgccgggggagccaaacggttcctgtccgcgatgcaggcccgcgccctggccgaggccatcgaaccagccgatgcggcggcacgcgtccggctgcgcctggtactggagctgatcgacgacctcgaggtcgtggaccggaaaaccaaagccgcggacaaggaactgaagcaactggttgtggaccgtggctcgaccttgatggacctcaacggcatcggcccctccggcgccgcgcggctactcgccgacgtcgacgatgtccaccggttcgcgtcgcgggatcggttcgcgtcctggaacggcaccgcaccattggatgcttcttccggtcagcagcagcggcaccggctctcccgcgccggcaaccggaagatcaaccgcgtcctgcacgtcatggcgatcgtccaactacgcaacccgactcctggccgcgtctactacgacggcaaacgagccgccgggaagacctcgatggagtcgatgcgggcactcaaacgccgattgtcgaacgtggtctatcaccggatgctcgctgaccagcggcgacgggatgcggcaagcccgggaggcattcgggaacgacaactgactccagcgcgaccggcccgaccccgcacaccgatccttcggacaagccacaacccggacctacctccacacagcctaacgccgagctgaccaccgcctcttgacataaaggggagc

SEQ ID NO: 7232 - DNA, 1379 bp, unidentified
  source 1..1379: mol_type = unassigned DNA; note = element_b3295ca
  misc_feature 1..2: note = core
  misc_feature 3..86: note = LE
  misc_feature 87..1118: note = CDS
  misc_feature 1119..1379: note = RE
  misc_feature 1149..1367: note = bridgeRNA
tgatgctgtggacggctcctccaccggcacatgagtgccaaggatgtgggtgctgttaaggctcccacgattcggaggaggcaatcatgcaagcggtcacaacgatcggtctcgatattgcgaagtcggtgtttcaggtgcatggcgtcgatgcggaaggcaaagtgctcatccggcgcaagctgaagcgccgctatgtgctggcattcttccagaagctgccgccgtgcctggttgggatcgaggcctgcgccacgtcgcatcattggtcacgtgaactcaaggcgcttggccataccgtgcgcctgatgccgccggcctatgtgaagccctacgtcaagcgacagaagaacgatgccgctgacgccgaggccatctgtgaagcggtaaccagggccaatatgcggttcgtcgagaccaagacgccggagcagcagagctgcctgatgctccatcgcacgcgccacctctttatccgccagcagacctcggtgatcaatgccatccgtgcccacatggccgagtttggcatcgtcgcgccggtcgggcgccaaggcgtggaggctctactcgaggtcgccgctgatggaggcgataatcgagtacccgaagtggcacggtcgtgtctcgccgccctcggcgcccagctgcgggccttgaaggcgcagatcctcgagtttgaccgccgcatcacggcctggcatcgatccaatgagacgagcaggcggcttgatgccattcctggtgttggtccggcgctggccacggctctggttgccagcgtcgccgatccaaaggccttccgatcgggacggaacttctcagcctggatcgggctcgtgccgaagcagcattcgagcggaggcaaggacaggctcggtagtatcagcaagcaaggcgatcgctatctgcgcagcctgttcactgccggagccctcgccgtgatccgttatgccaagatccacggcacaaagcatcgaccctggcttacagccttgctggcgcggcgtccgactaaggtcgctgccatcgcgcttgccaacaagatcgccagaatggcttgggccatgatggctaggggcgagcgctacaaggaacccgtcgcacttgcggcgtgaacgagatcgcgccggacatccggcgtgatgtgaaggttgggagggcgaacagcacgtaatgcagagccggtcgatccggcgatcgggacaacccacatgtgccagtgcatcgttgaatgcgggctgttgaccgggacccgatccgcggagggcattatggccagcggtcatgcgaaccgcgctaacaggccgaacacatggctgcaccgaccagcaacgcgacgtgaagttttgacttgccaaccaggagccgtccacaca

SEQ ID NO: 7233 - DNA, 1815 bp, unidentified
  source 1..1815: mol_type = unassigned DNA; note = element_b32b216
  misc_feature 1: note = core
  misc_feature 2..231: note = LE
  misc_feature 232..1443: note = CDS
  misc_feature 1444..1815: note = RE
  misc_feature 9..229: note = bridgeRNA
cgttaccttcttcgtggccccgcaacggggctcccggcctccggctcggcatgactgttcccccctgtagttcgcatgatccggggggtggtgtcaccgggccggaggcaccggtagaccgctgataggggcaggaccaccagctcgctgggaggctcttcgtaacgtggatgccggcgactggtgccacgccaacgaggccgggacagcacgacctcgtaagggaacagcgtgatcaacaccggcgacgtggacgtcttcctcagcctggacgtcggcaagggcgaacaccacggaaccgccctgacccgggcgggcaagcaggtcttcgacaagcggctgccgaacagcgagcccaagatgcgggccatgctcgacaagctcaccgccaagcacggcaccgtcctggtcgtcgtcgaccagcccgcctccatcggcgccctgccccgggcggtcgcccgcgacgccggctgccgggtcgcctacctgcccggtctgacgatgcgccgcatcgccgacctctaccccggcgaggccaagaccgacgcacgcgacgccttcgtcatcgcggacgccgcacgcaccatgccgcacaccctgcgcggcatcgagctcaccgacgagaccgtcgccgagctggagatgatcgtcggcttcgacgacgacctggccggcgaggccacccgcatcgccaaccgtctgcgcgaactgcccacccagatccacccgcatctggagcgtgtgctggggcccaggattgaccacccggcggtcctggccctgctggagcgattcggctcaccgaccgccctgcacaaggccggacgccgccgcctgctcaccgttgcccgaccgctggccccgcgcatgttcgagcgcctcgtcgaggacgtcctcgttgcgctcgacgagcagaccgtggtcgtcccaggcaccgatgcggccgcgctgatcgtgccgagcctggccggctcactgcgagccgtcctcgaccagcgcagacacctggagaagcggatccaggaactgctggacgagcacccgctctcggagatcctgacctccatacccggcatcggaacacggaccggcgcccgcgtcctgatcgacgtcggcgacgcgagcgcgttcccgaccgccgcccacctcgcctcctacgccggcctcgcccccgccacccgcagttccggatcctccatacgcggcgagcaaccctcccgacgcggcaacaagcagctgaaacgcgcgttcttcctcgccgcgttcgccgcgttcgcctcgctaggcgacccggcctcccgcgcctactacgacaagaagatcaaccagggcaagcgccacacccaagccttgctctgcctggccagacgccggaccgacgtcctgttcgccatgctccgcgacggcaccctccacgaatcccggcccgcggccgcgacgtgagcttgcctcttgtccaccggcagcagccgtgatccgctctgcccatgagcaccagcaactccgagcacatgaggaccatcgaccgctggctcgctggcgaggtggtcaacaacaccgtcggcatcaagatcgtcggcggaccgttcgacggccgcaccaagatcgtccttctcggtcaggacgggacgccgcccgccgtcatgcgcgcatccggcgggccagccggcccgagtcggcatgcctacgaggcgatccgctccaccgacgtccgggccggttggatctacgcctacaccggtcctgagccagccaccgagagctgaggaacaacctcgaaccgcttgaccaaacacataggggtacccccccgcc

SEQ ID NO: 7234 - DNA, 1618 bp, unidentified
  source 1..1618: mol_type = unassigned DNA; note = element_b32e11a
  misc_feature 1..2: note = core
  misc_feature 3..279: note = LE
  misc_feature 280..1476: note = CDS
  misc_feature 1477..1618: note = RE
  misc_feature 14..299: note = bridgeRNA
ctcctacaataataaataaggtgacaggcacggtacccagccgtgtctgtttccaattcaatgcctaagctgtagaatggaaaggaatggtctgacacacgtgaccttgaactaacacgttcgcacaggagttggtcagccgcctttctcattcgcagcgttcgatttacgcaagttgctccgtcgctttgccgacgcgttcgtgtaacaaaaccgggagattgaataagcattgagtaaaaagcggaatgccatatcaaaaatttaggaggtttcattatgaactcagtcggaattgatatttcaaaaggaaagagcatggttgcagcgctgcgtcctatgggtgaggttgcgatgcgccccacagagtatctccacacggaggtcgagatagaacggctggcttatgccattctcgctctcggtgaggatacgagggtcgtgatggaagcaacggggcgttaccacgagcccgtagccgcagcgctgcatgaatatgggatttacgtcagtgttctgaatcccattttgatccaccaaagcggtggaggctctgtcagaaaagtcaagtccgataaaaaggacgctgttaagatcgctaaatacggacttgacaactgggtcgatctaagggagtacaccccggttgacgccgttcgccaacagctcaagctctgctgtagacagtatgatctctacatgaagagtgtaatctcgcttaaaaacaaccttatctctttaaccgacaaggtgtttcccggcgtgaacgagtgcttcacaagtccggataaggctaacggtcaccagaagtggattgatttcatcactaccttctggcattgcgactgtatttcccttgtcagcgaaaaagcgtttacggaaaggtatcgtaaatggtgcaagcggttgggttatcattttacggttgaaaaagcgcttgatctgtacgctgacagctgcggtcatattaccacgctgccaaaaaacagcaacacaaagcttctcatcaccactgccgccaagcagctcaccgcgttcaaatgtcaggtcgcagccttgaaagccgagatcatctcgcttgctaaacagctccccgaatacgataccgttgtcggaatgtacggtgtcggtgagatctctgccgctcagttgatggctgagatcggcgatgtgagacgctttcacaacagaaacgcgctcgtcgggtttgccggcgttgaccctatcgttgatgaatcgggaaaggatgtttccaagtgtcatcccaccacaaaacgcggttccgctcatttgagaaggacactgtttcaggttatcagtacatacgtgaagcgtgctcctgccaacgagcctgtttaccaattcatcacaaggaaacgctcagagggcaagccctactacgtttacatgactgctgccgccaacaagttcctgcgtatttattacgccagagttaaagagtgcttggctgactaatctatcttgactgcaatttatttgattaattcaggctgaaaaaaatttcgcttttttcggtttgctttgctatacccttcttttcagctgtcaaaaaaattttaacttttttcatttttggtcttgacttttatttgcaaga

SEQ ID NO: 7235 - DNA, 1228 bp, unidentified
  source 1..1228: mol_type = unassigned DNA; note = element_b335cdd
  misc_feature 1..3: note = core
  misc_feature 4..223: note = LE
  misc_feature 224..1213: note = CDS
  misc_feature 1214..1228: note = RE
  misc_feature 25..206: note = bridgeRNA
cttgtatcttggttttggtcgttcacaatgcggccaacatgggcgcgacagaccgattcctccttggtccaggctcttcgccaagaccgtctgaaagcactcgtcgtcgcgcccctagttttggaggagtccgaacggttgccggagcctctgctccagtttcgctggtgagcaagctcgtatccgcaaggccgggcctgaatgaagagcaaggagaaaacgagtgagtagtccatcccaacaagaaatccacgtcggcatcgacgtctccaagaaaaccctcgacgtgtacatcctgcccagcgaaggaaaaggcggctcccaaggcgagtccttcgtggtgaccaacgatcaggagggcattgacgaacttctccgccgcctggcggagcctggattgagtccgaaactcgtcgttttggaggctaccggacgatacgagcgtctggccgcctcctccatcgccgccaaggagatccccgtggctgtcgtcaatccccgccaggcgagggacttcgccaaggccatcggaaagctcgccaagaccgacaaaatagacgccttcgttctcgcccggttcgccagggcggtcgagcccagagccagcgtcattcccgacgaggaagctaccgctttgcgggccatcctcgcccgtaggcgccaactcatcgagatgctcgtatccgagaataaccgcctcaagatggcgcgagagaagcctctccaaaagcgcatccgctcgcacatcaagtggctcgatcgtgagatcgagcgcactgactccgaccttgaccacgccatcgaggagaactccgccttcaaggccaacgaggctctgctccgttgcgtccccggcgtggggaaagtcctctccaggacgctcctggctgagttgcccgagcttggaacactcacccacaagcgtctgtgcgtcctggtcggtgtcgcacccttcaaccgcaactccgggcagggacgtggtaagcgagaggtgcggggcggcagggctccagtgagggccgccctctacatgggcgctctggtcgccactcgacacaaccccgtcatcaaggaattctacgagcgcctgctggccgccggcaagcccaagaaggtggctctggtggcgtgcatgagaaagttgctctccatcctcaacgccctgatgagagatcgctctatctggaggtgtcctcatgccctgactccttgactttcaagacggttg

SEQ ID NO: 7236 - DNA, 1568 bp, unidentified
  source 1..1568: mol_type = unassigned DNA; note = element_b34712b
  misc_feature 1..2: note = core
  misc_feature 3..247: note = LE
  misc_feature 248..1423: note = CDS
  misc_feature 1424..1568: note = RE
  misc_feature 3..225: note = bridgeRNA
ctcgtattatatagtagtgtttatagtccctctccaaggactgtatgctatactatttggaaatgctgtggattggtaaatcactcctaccactcgatggtttctgaaaggctccaaccacagtctctttgtatatttgttaatcagttagataccgcatgacggtttatttagaacgaggttacaatcacaaggagtacctgtggattccaaacagtatcaaaatacttttcaaaggagatttgttatgatttatgtaggaattgacattgcaaaggataagcacgactgctttattaccaattcggacggtgaggttttgcacaacccgttttccatatcaaacaacagggaaggatttaatgacctctacaacagaatttgctcaaccacggaagatttaaccaatgtaaaaataggactcgaagccatcggacactacagctacaatcttctgggtttcctcattgataaaggtctagccacctttgttatcaacccgttacatactgatctgtacagaaaaagtctaagccttagacagaccaaaacggataaggttgatgcccgcatgattgcttccatgcttatgtctgacgtgaacttgaagtcctactcagacacatcataccacaatgaggaattaaactcactaacacgttaccgttttgataaggttaaggaacggtcaaagctcaaaacctccgtttcccgtcttgttcttattctctttccggaattagaaaagttagtaccaacacttcatatgacatccgtatatgctttattatccgaatttccctgtgcatccaaagttgcatcagctcatcttacaagactttccaaccttctgaaaacagcctctaaagggcattattccaaagataccgctatcctgttccgtgaagctgcaagaacttccatcggctcaaatatgcctgctaaatcattagagctaaaacacaccattaagctaattcaggaattggataccgaaattaaggaaattgaagctgaaatcaaaaccataatggatgaaatcaattccccaatcctgtccatccccgaaatcaactatcgaatgggtgcaatgattattgcagagattggcgacttcagccgtttcgattctcctgacaagatactcgcttatgcaggattatctccatccacttatcaatcagggcagcttgacaactgttattcccacatggaaaaacagggttctcgttatcttcgctatgccctattcaatgctacaaaatatgtctgcatatgggactcttcattcaacacctatcttgccaaaaagaggtcggagggaaagcattataatgttgccgtatcacatgcagccaaaaagcttgtgagggttatttaccaactagaaaaaacaggtcagacatacattaaagatgcctagcataaacaaatttcatatttcttttttgagcacctgcaaagatgctctgttcgtcatgcagttttcaaagtacaaattcatctgaaatacatttctgtaattcattcaaagagtttcattttagacttgacttttaatagttagt

SEQ ID NO: 7237 - DNA, 1396 bp, unidentified
  source 1..1396: mol_type = unassigned DNA; note = element_b34c096
  misc_feature 1: note = core
  misc_feature 2..87: note = LE
  misc_feature 88..1110: note = CDS
  misc_feature 1111..1396: note = RE
  misc_feature 1161..1391: note = bridgeRNA
caatggaatggacgccccacccgtaacagcatcagatgtgccaaagtggaagtgtcaacccaccacttaaccgaggggagcgtcatcatgcagattacgacaattggcattgatctagcaaaggctgtttttcaggttcatggcgtggatgcccacggcaagacagtcctgaagaaacaactcaagcgtacccaagtggccgagttttttgccaatctgccgccttgcctgatcggcatggaagcatgtggcagcgctcattactgggcgcgcaagctgcaagcactcgggcacacagtacgtctcatggcaccacaattcgttaaaccctacgttaaaacaaataaaaacgatgccgccgatgccgaggcaatttgtgaggcggtaactcgaccgacgatgcgctttgttccgatcaaacatgtcgagcagcaggcggtattggccgtgcaccgggtgcgccaaggcctggtcaaggcgcgtaccgcacaagctaaccagatccgtgggctgttaagcgagttcgggctgatcattccccaaggaatcgctcacatcagcaagctgatgccggagatgctcgacaacgctggcgatgaagtgcctggcgtctttcgtgagctgatgcagcgcctgctagaccacctcaaggatttggaccagcaggtcggagaactggaacggcaaatccggacatggcaccgttcccacgccttgtcgtgcaagctggagaaggttccggggattggccccatcacagcgacagcgctggtggcttcgattggcgacgcgaagcagttcgccaatggtcgtcagcttgcggcatggctgggcctggttccaagacagcactctactggtggtaaatccaatttgctaggcatcagcaagcgaggcgattgctatttgcgcacgttgctgatacatggcgccagggcagtcatcctggctaccgaacgcaaggtcaccacacagggctggctagttcgtttgctagatcggagtcacaagaacgtggcggcaatcgcattggctaacaagacggcaaggatcgtttgggcattgctcgcgcacgagcgggagtttcggtccgattacgctaaggcgtaaccggaccgactagtaacaggaacgagtaaggcagcatagcgacagatagatgattccaccgattgcacaggcaatcatgaagtgatggcagcattggtaagaccgtggttggataagcctgataagcctgtcgcacgaaaagtgcgttatcccgttgaggccccaaccagcacattccatcagggacagtggttagcgccacagctaaagtccgaatgtacgactgcaatctttaccagcgtgtcttcatgcattgagagcttgcgcaaactggggcgtccatgta

SEQ ID NO: 7238 - DNA, 1360 bp, unidentified
  source 1..1360: mol_type = unassigned DNA; note = element_b35dfc7
  misc_feature 1..2: note = core
  misc_feature 3..312: note = LE
  misc_feature 313..1101: note = CDS
  misc_feature 1102..1360: note = RE
  misc_feature 1077..1348: note = bridgeRNA
cgatggggtggacgccccccgacggcatcgatgtcccaaagtggaggtgttgaacaccactgcaaaggaggcgtccgtgggagaagttaccacaatcgggctcgacttggctaagtcggtctttcaagcgcatggggctgatgaaggcggcggcgttgttttccgcaagaagctgcgacgggaccagctgctggcgttcttctcaagccagccgcgctgcctcgtggcgatggaggcctgcgccagcgctcattactgggcccgcgagatcggcacgctgggtcatgagatccgccgatcccgccagcctatgtgaagccgtttgtgaagcggcagaagaacgacatggcggatgcagaggccatctgcgaggcggcgcagcgcccaacaatgcggttcgtggcgcccaagagcgccgatgcccagggctcggctgtggtgttccgaaccagcgatctgctggtgcgacagcgaacacaactgatcaatgcgctgcggggccatctggccgagttcggcttcgttgtgaggcagggcgcgggttacaccgccaagcttattcaggtggtggaagatcccagtagtgatctacccgccgaggcgcgaccggtgctgaccatcatcgtcgagagccttcgggcgcttcaggacaaggtcgcgcaactggatgccgagatagccgcgcgggccaaacgcgacccggtcgccagacggctgatgacgatcccgggcattgggcctgtggtggcgaccgccctgatggcgctggcaccggcggcctgcaccttcaggcgcggtcgcgactttgcagcctgggtggggcttacgccacaacagcattcgagcggcggcaaggagcgactggggcgaactagcaagatgggtgagcgcagtctgcgaaggctgctgatcctgggagctagttccgctgcgaaggctgcggcacgcgacggctcccgagccagtccttggctcacgggcatgctggcgcgcaagccgcgcatgctggtcactgtggccttggccaacaagatggcgaggatcgtatgggcgctgatggcgcacggaggaacctacagagctccggccgtggcggtctaaccgtcagggtctgaggcgtcggagaggcaggaaggtcagacgagaggtatggcgcaacggtcagaagacggggtcgggaaaaccagtgaatgtccgagcgcctcgagcgcgcgattgcggactggacccgatccgcgatctccatacaggccagcggcgtgtgaaaggccgcatcaacaggccggacacacggaagcacctgatccgaccgcgtcagaatccaaaaaaaccctcttgcatctaacggggcgtccacaca

SEQ ID NO: 7239 - DNA, 1508 bp, unidentified
  source 1..1508: mol_type = unassigned DNA; note = element_b35f187
  misc_feature 1..4: note = core
  misc_feature 5..241: note = LE
  misc_feature 242..1492: note = CDS
  misc_feature 1493..1508: note = RE
gtcactagggcaccatccttagcaggggcaccgatacggtgctctttgtagggactcggcgggagccggggtgacggcctggtgtggtcgcccgtgaagggccttcatgacactgccgcccccggttttcgcggggctgcagaccggcaacagcgggatgcgccgcagagcgccagttagtgaccgcccgggagccagccgcgccgccgccgggccgtcgctgccatcttgaggagttgctgtgtcgtttgcgctgcctgacgcgttgtttttcaccgggatcgaccgggccgccgagacctacgccgtgtgcgtgatggacgccgggggaaagatcacggccgggttcacgattgagcattccgcggacgggatcgccacgctgatccgccgcctggcccgctacggggagcccgccggcatgccggtcgccatcgagcgcccgaacggccgcctggtagacctgctgctggaggccgggcacccggtggtgccggtcaagccgaacgcgatcaagacctggcgggacggcgaggtgctctccggcgccaagtccggcgccggggacgccgcggtgatcgccgggtacctgcggctgcgcgcgcacaagctgaaggccgccgccccgtactccgacgagaccaaagcgctgcgcaccgtcgtgcgcacccgcggcgacctggtagagatgcgggtcgcggccaccagccagctggcggcgctgctggacgcgcactggcccggcgccaaggccatcttcgccgacgtcgaatcgccggtcagcctggagttcctgacccgctacccgactccggccgctgccgcgcacctgggtgagaagcggatggccgcgttctgcgtcaagcacggctactgcggccgccgcacccccgcgcagctgctcgcccgcctgcgccacgtaccggccggcgccaccggcgaagccctcagcgaggcgctccgcgatgcggtcctcgccgccgccggcgtgctgaccgccctgaacgcgtcggtgaagaacctcgaccgctctgtcgccgcccacctcggggagcacccggacggcgcgatcttcacgtcgctgccaaggtcgggtcaggtcaacgccgcccaggtgctcgccgagtggggcgatgcccgccaagcctacgagcaccccgacgccgtcgccgccctcgccggagtcacaccggtcaccaaagaatccggcaagcaccgcgccgtgcacttccgctgggcctgcaacaagcggttccgcgtcgcagtcaccaccttcgccgataacagccggcacgccagcccctgggccgccaagatctacaacgacgcccgcgccagcggcaaagaccacccgcacgccatccgcgtcctggcccgcgcctggatccgcgtcatatggcgctgctggctcgacggcaccccctacgaccccgccagacacggggccgccgccgcgctcgccgaacaaccggctaagcaaatcgcggcctgaggttgacacagggggt

SEQ ID NO: 7240 - DNA, 1367 bp, unidentified
  source 1..1367: mol_type = unassigned DNA; note = element_b3658db
  misc_feature 1..3: note = core
  misc_feature 4..82: note = LE
  misc_feature 83..1114: note = CDS
  misc_feature 1115..1367: note = RE
  misc_feature 1137..1355: note = bridgeRNA
tgatgctgtggacggctccaccgccggcatcgcaatgtgccatggaggttatttgaaccgccaaaaaggggagctgcccaagatggacgttagcacgattggattggacatcgcgaagagcgtttttcaggttcacggcattgatgcggcaggccaggttgttgttcgccgacaattgaggcgacgccagctactgggttttttcgagaagcttgctccctgtctggttgggatcgaagcgtgtgccacggcccatcactgggggcgcgagattgcggcgttgggacacgaggtgcggctgatgccggcgcactacgtgaaggcttatgtgaagcggggcaagaacgatgcgaccgatgccgaagcgatctgcgaggcggttcaacggccgacgatgcgctttgtcggtctcaagagcccaaaacagcagagcctgctcatgctgcatcgaacccgggaactgctagtgcgtcagcgcacgatgctggtcaatgcgatccgcggccatatggccgagttcgggattgtgacgcgtgttggcctaccgcagctcaaggagctgctggccgtgatcgccgacagggatgatcaccggcttccgcctgacgcccgtgcttgtctagagagccttgggcggcagttcctctccctgaacgaagagatctgtgcagctgacaagcgcctccaggcctggcaccgttcgagtgagctgtcacgccgccttgcgaccatacccggcatcggaccgatcacggcgagcgcgttggtggcctccatcaccgacccttccgcgttcaggactggccgcgagatggcggcctggatcggactggtgccgcggcagaactcgacaggcgggaagccgcggctcggcagaatctccaaacagggcgatcagtacctgcggtggctactcgttgccggcgcgatggctgtgatccggcacgccaaacggcgcggcacagcaaaccatccttggctcgatgacctgatcgccaggcgtccgaccaaggtggctgcagtggccttggccaacaagatggcccggatggcctgggcccttctcagccatggcggcgcctatcgacagccagtcatcacggcgaacctataggcatcaagagacaaagcagatcacaagtttggcgaggtgcacgtgaggtaatgcaaaatcggtcgaaccgagggtcgggaaaacccgtttgggtcagggtgcactatcagcccgcgctaatgattgggacccgacccaagcggatcgcattagggccagcggcacacaggccgcagcaacaggccggacacatgacagcactcgaccagtttgcagccaaaatacaccttgccaaaacggagccgtccacaca

SEQ ID NO: 7241 - DNA, 1370 bp, unidentified
  source 1..1370: mol_type = unassigned DNA; note = element_b36f033
  misc_feature 1..3: note = core
  misc_feature 4..83: note = LE
  misc_feature 84..1118: note = CDS
  misc_feature 1119..1370: note = RE
  misc_feature 1134..1326: note = bridgeRNA
agcatgcgtaattgggctgcccctattcagaggtcgagctcccgttaaaatcatagtcagaccgtgaacaagggagatgaatgatggaatattttgccggtttggatgtgtcacttcgctcatgtgccatctgtgtcgtcgatgccaaaggcaaggtgatgctcgaaagggaactaccctgtgaagttggcgatatcgccgattgcctgaacacctccggttatccgatcgagcgcattggttttgaggctggcacgctgagccagcatctcttttatggtctgaccagtgaaggttttgatgtcgtctgcatggaagcccgccaagtgaacgctgccctttcagcgatgcgcaacaagaccgacaagaacgacgcgcgtgggattgcccatgttctgcgaaccggctggttcagcccggtccacatgaagagccgagaagcgcatggtgtgcgggccttgctcagcacccgcagagcattgctcaataagacaatcgatctcgccaatgaagtgcgcgggctgttgaagatctttggcctccgccttcccaagacagtgcagcatggcaactttgacggcctcgtccgtccggtgattgaaatggatgagatcctggcgcatgcgattatcccgctgctcgatgcgcgtcgggtcttgtatcagcactttcttgaactggaccgccgtgtcaaacgtgccgccgcccgggatgaggtttgcctccggatgatgaccgttcccggtgtcgggccgattgcggcgctgaccttcaaggctgccgttgacgatcctgcgcgcttcaaacgggctcgcacggttgccgcgcattttggactgacaccaaggcgctatcaatctggtgagcatgatagtcctggcaggatttcgaaagccggagaccgggatgtccgagcgacgctttacgcggccgcgaatgcactgctgatgcgcacgatggcgggctctcagatcaaatcttggggcatgcgattgatgcgaaccaaaggacgccgccgcgccgttgtcgcggtggccagaaagttggccgtcctgctgcatagaatgtggtcagatggcaccgagttccgtccggcagaggtggagggcacggcatgatctgatccgccacccgccaaagccgaacgggatcgtccctcaccggacgaggtctgtggaagaagccgaaaatggctgctgcacaacgagaagcgcgtctcagagcaaggctctccgctaccaatccgacacatgcgtgcagcgatgcccgatggcatcaaccagactgcgaagagaagcgtgacccggatgagtgacaatgatccacgagaaggaaggaaaatgagcttgacccaaacgcccaattagaga

SEQ ID NO: 7242 - DNA, 1377 bp, unidentified
  source 1..1377: mol_type = unassigned DNA; note = element_b373cea
  misc_feature 1..2: note = core
  misc_feature 3..85: note = LE
  misc_feature 86..1117: note = CDS
  misc_feature 1118..1377: note = RE
  misc_feature 1147..1365: note = bridgeRNA
tgatgctgtggacggctcctccaccggcacgtgagtgccatggatgtgggtgctgctaagggcccacgattcggaggagccaatcatgcaagtgatcacgacaatcggtctcgatatcgcgaagtcagtctttcaagttcacggcgttgatgctggcggccaagtggtcatgcgccgtcagttgaagcgacggtacgtgctgacgttcttccagaagcttccgccgtgcctggttgggatcgaggcctgcgcctcgtcgcatcattggtcgcgcgagctccagacgctcggccacaaggttcggctgatgccgccggcctatgtgaagccctacgtcaagcggcagaagaacgatgccaccgatgcggaggcgatctgcgaggccgttagccggccgaacatgcggttcgtcgagaccaagacgcctgagcaacagagctgcctggtgctccatcgcacacgccatctcttcatccgccagcagactgcggtgatcaatgcgatccgcgcccaccttgcggagtttgggatcattgcgccggtcggacgcaatggtgtcgagcaactgctcggcgttgtcgccgatgcaagtgacaaacggttgcccgaggttgcccgtgcatgtgttgccgctctcggcgcccagctgcagatgctgaaggcgcagattctagagttcgatcgcatgataagggcttggcaccgatccagtgaggcgagcaggcgactcgatgattgtcccggcattgggccggcactggccaccgctctggtcgctaccgtcgctgatccgaaggtcttccggtcagggcgcaacttctcggcctggatcgggctcgtgccgaagcagcactcgagcgggggcaaggacaggctcggcagcatcagcaaacaaggtgaccgctatctgcgcggcctgttcgtggctggtgcgcttgccgtgatccgctatgccaaaatccatggcaccaagcatcggccatggctcacggcgttgctggcgcggcgacccaccaaggtcgcggccatcgcgctcgccaacaagatggcgcggatggcctgggcgatgatggccaagggcgagcgctacaaggaacccgccgcgctcgcggcataacgagatcgcgccggacatccgacgtgatgtgacggttgggagggcgaacagaacgtaatgcagagccggtcgatccggcgattaggacaacccactcgggccagagcattgtcaaatgcgaggttgtgaccgggacctgatccgcggagggcattatggccagcggtcatgtgaaccgcaccaaaaggccgaacacatggctgcaccgacccgacctgcgacgtgaagattctccttgccaacccggagccgtccacaca

SEQ ID NO: 7243 - DNA, 1481 bp, unidentified
  source 1..1481: mol_type = unassigned DNA; note = element_b375eb1
  misc_feature 1..2: note = core
  misc_feature 3..91: note = LE
  misc_feature 92..1150: note = CDS
  misc_feature 1151..1481: note = RE
  misc_feature 1192..1460: note = bridgeRNA
tgatgaggtggacggctccttcacaacggcatcaaagtgtcatacaagctggagttatagcgtcgtaacaacagcaaagaaggaaccatacatggagaggattagcataatcggtcttgatttagcgaagagagtgtttcaggtgcacggtgtcagtgagaaacatgaagtcgtgacgcagaagaaactgtcacgatcagagctattgatctggtttacgaaactggaaccgtgcctcgtgggaatggaagcttgtgcaacggctcattactggggaagggagttgaaaaagcttggccatgaagtcaggctcatacctcccgcctacgttaagccatatgtcaaacggcagaagaatgaccgtgccgacgcagccgcaatctgcgaggcggtcagccgacctgccatgcgatttgtggcaatcaaggacaaagatcagcaggccgttcaggttttgcaccgaacacggagtcttttgatccgacagcgtgtgcagctcggcaatgctttgcgggcgcatatggccgagtttggctgggtcttcccgctgggcatggcaggcgtgacgcaagcgagcagcgccgtgcgggaaacaccggatgcggatttgccagctctcgcaagacaggtgttgctcggactggtcgatcagatcgatgttgtgaaaaagcaaatcagcagtctcgatcgacagatggttgtctggcatcgggatcatgccgaaagtcaacggctggcgacaattcccggcattggcgttgtgaccgcctccgcgattgtggcaaccctcggggatggcaagcagttccgctccggccgcgactttgccgcttccataggtctggtgccgcgtcaaaattcgagcggaggcaatgatcgtctggggcggatatcaaaacagggtaatccctatttgcggcagatgctgattctgtgcgccatatcgcagttgagcggccgatgccgggaaaagcctgccggaggcgtatggttcgagcaacttttaaaacgcaaaccggcacgggtagcagcggcagcgctcgccaacaagatggcgcgggttgcctgggcggtgcataccaagggtgagaactatcgtgtagccagaaccgtgatctcaccggaaggtgtcgttacaatggctgcatgaagcggctgcaagaaaaaggtttattgataagggtttttgactgccatgtttgaaagaacatagcggacagcagaagtgccaaaggagatgatgacaaagaacaaacaaggcgttaccgctagatcggacgataccgtgtaatgtcggcgcttcttgagcgcgtatgactgattggtagccgatatgcggatctcatcagggccagttgccaaagctgagtaactttattgctttaagccaggacaacacaaaacaggccggacacatgactgcaacacttgctttgttcttacgtcacattttcttttgacatgtcggggccgtccacaca

SEQ ID NO: 7244 - DNA, 1341 bp, unidentified
  source 1..1341: mol_type = unassigned DNA; note = element_b37cf40
  misc_feature 1..2: note = core
  misc_feature 3..73: note = LE
  misc_feature 74..1087: note = CDS
  misc_feature 1088..1341: note = RE
  misc_feature 1086..1328: note = bridgeRNA
tgttgggtggacggcccccgacggcatcatagtgccaggctgtgatttgcaacgcagccaagggagccgcccgatgaggattatcaggattggcctggatacctccaagcatgtccttcaggtgcacggggttgacgagaacgagcagccggtgttgcgccgtcagctgcggcgcagcgaggtggagaagttcttcgccaagctggcgccgagccggatcggcttggaggcgtgcggggcctcgcaccactgggcacgggtcctgcgcggcctgggacacgaggcggtgttgctgccgccgcaatacgtcaagccgtatgtcaagcgcggcaagaacgatcagatcgacgcggcggcgatctgcgaggcgatgagccggccggggatgcgctttgtgccgatcaagaccgccgagcggcaagctgccctgatggtgctgcgggtgcgcgatctgttgatcaagcagcgcacgatgctgtgcaacgcgatccgtggtcatgcggcggagtttggcgtcgtcgcggccaaggggccggccaggatcagcgagttgctgcagcgggcccatggcgaagcggcgggggtaccggcgttggcgcgcgagatgctgagcctgctggccaaccacctcgatgcgctcgaggccaggctgaaggcgctcgaaacccagctggtggcgtggcaccggcaagatccggtgagccaatgcctggcaacccagccggggatcggcccgatcggggcggtcagcttcgcgctcaaggtaaccgatcccaagggcttccgctcggctcggcatttcgccgcctggctcggcttgaccccgaaagagcacgcgacgggcgggcgccgccggccgggccggatcagccgccagggcgacgaaaccttgcgccgcctgctggtgctcggggccaccgcgaggatccgtttcgccaaggccggccgagcctcgccttggctgatcaatttgctggcgcggcggccgaacaagctcgcggccgtggcgctggccaacaagatggcgcgcatcctgtgggccatgatgatgagcggcgaaacctaccggcatccgcagcaggcttgaggctcgctcaccaccactgactgacctggcgcttgcaaggaagacagcaagatggcgatcggtcgatccgaggatcgggacaccccgaggaatccgacgatgctcagacatcgcgttcatgttcagggacctgatccgcgaaacccatctgggccagcggtcgatccgaccgcacacacaggccggacacatgaccgcaatcgaccagacccgttcaagctgccaaaccttgcaaaccgggggccgtccacaca

SEQ ID NO: 7245 - DNA, 1413 bp, unidentified
  source 1..1413: mol_type = unassigned DNA; note = element_b37f23c
  misc_feature 1..2: note = core
  misc_feature 3..228: note = LE
  misc_feature 229..1413: note = CDS
ctcctaccattaattcctgtgtaacaatcgtataaacaggtaagatttgccccaagaaaggcagggggacttacaacttcctgggtcgccgaacccttattttcagtctgttccctgcctcttggagccatgataagttgattgggcctttaaagagcccttgtcattacaggaggattggccggaggtaaccctgtttttcatatattaccacaggaggtgcgcgatatgaattgctttgtgggaatcgatgtatcgaaagaaaagtttgatgcatgcggtataggagaacaaggagaaaaagtattctctctggcctgtacaatggaccgtgagggatttaagaaatttaccctttgtttgccaacagataaggaatctttcctcctgggcatggaatccaccgcttcttaccatattgccctgttctcttatcttaccgcaaacggctacaaagttgctgttatcaacccccttcttattaatgggttctcaaaacgttccctgaggaaaacaaaaaccgacaggaaggatgcactcatgattgctcaatttctcatgcaggaacaagccaccttatctgcacaggtacctgactgtctgacgacagagcttaaggaccttgccaggagaagagaaaaacttgccgattatgtgacctctctgaaggcagatatgaagaggcttctctctgttatattccccgagcttgaacatatcaccggtgtctttacaaaatcgaccctccgtcttttgattgaatatccttctgcacatgccatcaggaaagcaggctactctgttgttgaggacatttttgtgacccggtcccgcggcaacaaaccccaagcttctgccaagacccttatggaggccgcagcatcatccgttggtattgcaagtcctgcaaaggagcttgttcttaagcaagaagcctcgttgcttatccatgtgcaggaacagatgaaagaagtaacaaaactgctcaagaccctcttaaacgaaaggatgaaacaggatatagagatcctctgttccattaagggtgtaggagaaaataccgccatgaacttcctcatcgagatgggaacagaggtagagatgtatgagaacgacaagaaactgatcgctgcatcggggcttgatccttcaacctatcaatcgggcaaatatgaagggaaaagcaggatcagtaaaagaggaaatcggcacttaagaagagtgatctggctaatggcgaccaaagttattattaataatggcctcttcagaacctacttctataaaagaagaaatgaaggtttgccctataaaaaggcggtccttgccacagctcataagctcattcgcgtcatgtttgtaatgctgagccgtaaatcattttttattgaaggaggaattaaatatagttga

SEQ ID NO: 7246 - DNA, 1378 bp, unidentified
  source 1..1378: mol_type = unassigned DNA; note = element_b383c3a
  misc_feature 1..2: note = core
  misc_feature 3..86: note = LE
  misc_feature 87..863: note = CDS
  misc_feature 864..1378: note = RE
  misc_feature 1147..1366: note = bridgeRNA
tgatgctgtggacggctcctccaccggcacgcgagtgccatcgacgtggagcctgttgaggctcccacgattcggaggagccaagcgtgcaagcggtcacaacaatcggttttgatatcgctaagtcggtctttcaggtgcacggtgttgatactgtcggccaagtgattattcgccggcagttgaagcgccggcaggtcatagggtttttccagaagctgccggcgtgcctggtcggcatcgaggcgtgcgcctcatctcattattggtcgcgcgagctgcaggcgcttgggcacaacgtgcggctaatgccgccggcctatgtgaggccgtacgtcaagcgccagaagaacgacatggccgacgctgaggcaatttgtgaagcggtcaccagagccaatatgaggtttgtgccgaccaagactgctgaacagcaaagcggcctgatgcttcatcgcacgcgccatctgttcatgcgccagcagacctcagtgatcaacgcgatccgcgctcatcttgccgagtttggcattgtcgcaccggttgggcgcagaggcgtcgaggaactgctgcgtgtggttgctgatccaagcgacaaacggctgcttgagattgtccgcgcctgccttgccgccttgggtagccagctgctcagcctcaaaaagcaaatcctagattttgatcggatgatcatggcttggcaccgatccaatcaaacgagcaaacgccttaactgcattcccggtgtcggtccgttgctatccaccgcccttgtcgccagcgtcgctgaccccaaaaccttcagatcgggtcgcaacttctcagcttggatcgggctagtacccaagcaaaactcgagttgaggtcgggataagctcggtagtatcagcaaacaaggtgaccgctatctgcggggcttgttcgtggccggtgcgttcgccgtgatccgctatgccaagatccatggcaccaagcatcggccctggctcacagcattgctggcacggcgacacaccaaagtcgccgcgatcgcgcttgccaacaagctagcccgcatggcgtgggcgatgatggctactggcgagcgctacaattatccggcctcgctgaaggtctaacgcgatcgcgccgacatccggcgtgatatgaaggttgggaggacgaacagcacgtaaagcagagccggtcgatccggcgatcaggacaacccacttgtgccattgcattctcgaatgcggggttttgaccgggacctgatccgcggaaaagcattatggccagcggtcatgtgaaccgcatttaaaggccgaacacatggctgcaccgaccaagtctgctacgcgaagattcttcttgccaacccggagccgtccacaca

SEQ ID NO: 7247 - DNA, 1192 bp, unidentified
  source 1..1192: mol_type = unassigned DNA; note = element_b38c41b
  misc_feature 1..4: note = core
  misc_feature 5..210: note = LE
  misc_feature 211..1179: note = CDS
  misc_feature 1180..1192: note = RE
  misc_feature 24..189: note = bridgeRNA
atccattaggtttgttttagatttgaaagatatcgcaagccagaggtgaaccatgttctatcgtaggtgtagagacctaattagggattcggtcctctgactctgctatgctcagggctttaatagaaattcaggcatcagggcctattatcatggatataagcgataagcataactgcgatactctctaacaactcaaaattaaacattatgaagcagttttctttttttacaggtatcgatgtgtctaaactatggctggatattgcagttctaagcgctaccgatggtatcgtttatcaggccaagatcaataataacgcaaaagatatccgaatctttctcagagaacttaaaaagctcttgaaaaccgaaataacccaacatcttttctgcatggaacataccggtaaatatggcaacgcttttcttgctgtagctgcagttgccggtgcggaagtttgggtagaactacctctccagatcaagagaagccagggactggtcagaggtaagacagaccagtgggacgcagttcgcattgccaaatatgcactccggtttgctgataaagcagtcttttggaaacctgccgatcaaaccattctggacatcaaggagcttcaggtaaaaaggaaccggctggtcaaagcacattcacaacttgttcaggagaacaagaacgatcctttgttcaaaaagcctttactggccctgaaacaagccattgaagctattgaactaaagatggaacagcaacttgaacaaaatgaagatgcctgccatcaatacaaattactaaaaacagtaccaggcatcggtaaacaaacagcgctggcattgatcgccgttaccaatggctttaccaggttaaccgagagcagaaagctaagctgttatgccggtcttgctccatttccttatagttcgggaagctctgttaaaggcagaaccaaagtctctaaaatgggagatatgaagctcaaggtattgctaaacctttcagcatggaacgctattcgttccatcagtgcttttaaagattatttcaaaagaaaggtcggcgagggtaaacataaaatgtccgttatcaatgctattcgaaacaaactgcttgcactggctttagctgtcattaaaagaaacagtccttttgaaaaaaactacactttttcttgattatgccatagaa

SEQ ID NO: 7248 - DNA, 1263 bp, unidentified
  source 1..1263: mol_type = unassigned DNA; note = element_b3909d7
  misc_feature 1: note = core
  misc_feature 2..75: note = LE
  misc_feature 76..996: note = CDS
  misc_feature 997..1263: note = RE
  misc_feature 1031..1257: note = bridgeRNA
gaatgacatggactccccctcatccggctctgccacacttgatgagtcaggctcgataaaatcttggaggccaccatgtcactttcaatctatggcattgatcttgccaaacatagcttcagtatccatggcgaagatgcgacaggcaaggtactgatccacaaaacaatatcaagatctaaagttcttgcaacgtttgctaatatcccgccagccctcattggtattgaagcctgtggcgcttcccattattgggcgcgtaaattgaccaaactcggtcatactgtaaaaatcatggcatcgaaatatgtggcgcctttcaggacaggtgccaaaaacgacctcaacgatgcagctgctatttgcgtcgctgtcacccgtccttcaacgcgcttcgttaaaatcaaatcagctgagcagcaagccattttgatgcttcaccgtgctcgtgataattgggtacatgaacgtaccgcattacttaatcaaatccgcgccatcatggcggagttcggcatcatcacaccgaaaggaaggcacgctttgcaatccatgatcccgcttgtgcttgaggacgctgacaatcaattaccggatttagccagagcgatcattgctgattgttatgaacatctctgttgtatcaatcaacgcattagtgaccaagaacatttcttcgatatgctgatatctcgtagccataatgcgaaaaagataatgaaagtggcaggtattggccccattacagcaacagctatcattgccagtgtgggtaaaggtgagcaatttgataaaggccgcgattttgccgcctggctgggtttagtaccgacccagtattccacgggtggtaaaccaaggctcagcctttggtgtaaaagcttggttgagcgacggggattgaaacgagccattgtggcattagccgctaaaaatgctcgtattgtctggtcattgctgtatcacgatacagaatacgcccccatgaataactaacagatgtagaaactcatttatcacggagaaatacgcttcaccgggtcattgcaatagccaatgatgatgtaaggttcagaccttttgcgggaaaacctgataatgcggcgggcacaaaagatgccttctaacgaatgaggaaccgcaaccgcgtagtgtcatcagggtcatggcgacgaatacgccaataaacagaccgaatgtgagcggcagtcccaaaccttatattacctgacgctgttgttgacaaccgggggagtccatgta

SEQ ID NO: 7249 - DNA, 1498 bp, unidentified
  source 1..1498: mol_type = unassigned DNA; note = element_b393082
  misc_feature 1..2: note = core
  misc_feature 3..256: note = LE
  misc_feature 257..1477: note = CDS
  misc_feature 1478..1498: note = RE
  misc_feature 16..247: note = bridgeRNA
ctaatcagtcatagcgggtcgctttagggcagactcgctggttggtagccgtcctgcaggtgagcaccccggttcctcctgggctttgagtcctggcgaaagaaagtgcccctgctggatcggccgggagagttgatcgctgctgggatgtcgttgcccaccgtgatggtgtgagcactgcttgattaggtcgccgatggttctcccgctggctgctgtaaggcgttcgacaggttagggagcaggactgttgcggttgttcgtcggggatgactgggccgaggcgcatcacgatgtggagatcatggacgaggccggccgcacgctggccaaggctcggctgccggaaggcgtggccgggatggcgcggttgcacgcgatggttgccgagcagatcggccaggccgctgatgacgaggtcgaagtgctggccggtatcgaggtcgaccgtggcccatgggtactggcgctggtcgcggccggatacacggtgttcgcggtgaacccgctgcaggcatcgcgttatcgcgagcgcctggcggtgtcgggatccaagagcgatgccgccgacgcgcacatgctcgccgacatggtccgtaccgactcccaccagttgcggcccatcgccggggactccgcgcaggccgaggcgatcaaggtggtggcccgcacccataagacgctgatctgggaacgcacccggaccgggcagcggctgcggcacgcgctgcgtgagtacttccccgccgcgctggcagcgttcgaggatctgcacgcccccgaagcgctcgatctgctggagcgggcggcgagtccggccgaggccgccaagctcaccatcagccagatcagcggcgcgctccaacgcgcccaccgccgcggcgatctggcgatgcgtccccggcccattcaatcggcgctgcgcaccgagcagctcggccagcccgatgtggtcactgcggcctacgccgcctcgacccgcgcgctggtggcggtcctgaccgtcttgaaccagcagatcaccaccctgcaagggcaggtcgaggcccattttggggcgcacccggccgctgagatcgtcctgtcccagcccgggctcggaccgatcctcggcgcccgggtgctcgcagagttcggcgacgaccccagccgctacgccaccgccaaagcccgcaaaaacttcgccggcaccagcccgatcaccagagcatccggcaagaagaagaccgtcctggcccgcttcgtccacaacgaccggctcatcgacgccctcatcacccaggcctccaccgcgatccgtgtctccccgggagcccgcgcctactacgacaagctccgagcccgcggagccggctacaacaccgccctgcgccaactcgccaaccggctcgtcggcatcctgcacggctgcctcaaaaccggcacgttctacgacgaagcgaccgcttggtcgcaccaccagaacgctacgacttgacacagctaactcctgggatgt

SEQ ID NO: 7250 - DNA, 1206 bp, unidentified
  source 1..1206: mol_type = unassigned DNA; note = element_b39c6c4
  misc_feature 1: note = core
  misc_feature 2..214: note = LE
  misc_feature 215..1180: note = CDS
  misc_feature 1181..1206: note = RE
  misc_feature 34..203: note = bridgeRNA
tcttaagtttacaattcattaaatttattagataatcagaaagaacaaaagagagaaataaggttagtatacacggtgaagctttcgacttcgacaacattgataaccctctctctttttctactaagatttcgttcagttctgtgagacctagatctcgattttaagttgttgaaacgtcagtagctatgttctttccaaatttcaagttgttatgaataaatataaagaaatttatggaattgacatcagtaaagctgtgtttgatgtttatggctctaaaagtggccacaaccaatttaaaaatgatgcaaaaggttttgtaagctttctaaaacatttaccaaaagatgttttggtggttatggaagctacaggttattaccattatcgtttagcccagtttttatatacatcaggagttagcgtatctgtgattaatcctttatctgttaagcgttttatccagatgaaactggctaaggtaaaaacagataaaagtgatgccaaagcaataagtgaatatggtgaaatgaatgaagttcccttgtatacagccttaacagatattcaggcagaatgcttgcaactgtttagactattggatagttatataaagcatagaacagcgacaaaaaataagttaaaaggagaagaggtattaggtgttccatccaagattgtttacaggtcattaaagcgaaatctaaagcatttaaacaaagaggttttagagttagaatcacgtttgttagagcttgtaaaacaagaccagcagcatcaattaactttacttaagagcattccaggaatgggaataaagacagctttgtttttaatagttgtaaccgatggctttaagaattttgaaaatgcatcacagctctgtagttatgttggtattactccaactatacgtgaatctggaagcagtgttagagggcgaagtagaataagtaaggtaggcaataagaaactaagaaatttattgtttttgtgtgcattctcggcttgtaaacataacaaggcttgtaaagaaatttatgaacgattagtagcaaaaggaaagagcaaaaaactagccttaatagctgtggcaaacaaattattaaaacaagcatttgctattgcaaaatcaggattaccttatgatgaaaactttgtttctaaattagcttaaaaaagcttgttttttaactcagttct

SEQ ID NO: 7251 - DNA, 1352 bp, unidentified
  source 1..1352: mol_type = unassigned DNA; note = element_b3aee1c
  misc_feature 1..2: note = core
  misc_feature 3..72: note = LE
  misc_feature 73..1098: note = CDS
  misc_feature 1099..1352: note = RE
  misc_feature 1074..1341: note = bridgeRNA
tgatgatgtagacgcccaccgctggctctgatgtgggaaggtgggattttctcgatcctacaggaggcgtcaatgtctgaagttcacacaatcggtcttgatcttgcgaagtctgttttccaggcccacggagctgatggatcaggtgaggttgtttttcgcaagcgactgcgtcggaaacaggttttggcttttttcgctgatcagccgcgctgtttggttgcgatggaggcttgcggtagcgcccattactgggggcgtgagcttgctcggctcggccataaagtgaagttgataccaccaatctacgtaaagccgttcgtaaagcgccaaaagaacgatgctgcggatgccgaagcgatctgtgaagctgccaaccgcccgacaatgcgctttgtgccggtgaagagtgaagaacgtcagggcattgcggttttgttacgcacgcgagaaatactgatccgacagcgcacacagaccatcaatgcattgcgcggtcatttggcggagtttggcgtgattgttccaaaaggcgcaagcaatgttgcaaagttgattgagcgtattgcctctcctgaaatctctcttcccgaggtggcacgagcagccctgagttatttaacagacagcttgttgcgattggaagatcaggtgcgggaactggatcgtgagattgccggtctcgccagggcgaatgaaacggcgcggcggttgatgacaattcctggaattggccctttgattgccgttgccatggtggccctggctcctccgccagaaactttccggcgcggacgagactttgcagcttggttaggactgactccgaggcaaaattcgacaggtgggaaacagaggctgggggccacgacaaagatgggagagcgctccctgcgtcgtctcctgattattggtgcaaacagtgtggtcatgtggcgctcaaagaaaggagctgcgccgggaacatggcttgaggggatgcttgcgcgcaagccagccatgctggtgagagtggcgcaggcgaacaagatggcacgtattgtctgggcgatcatgtcaggcaatcagacataccaggctccggtcgctcaagcataataaagcaagcgactgcggagacggcggcgcaagagaggtctttggaagtttggcacaacaatcatgggatggggtcggggaaaccagtttgcgacacagtgcctttgagcacgtgggcttgatttggactcgaccttcgaacaccatacgggccagcggcagttgaaaggccgcattacaggccggacacatgtcagaacccgactgtgccagaaaaatccaaaattttctcttgcaattcgggcgtctacaca

SEQ ID NO: 7252 - DNA, 1614 bp, unidentified
  source 1..1614: mol_type = unassigned DNA; note = element_b3b3781
  misc_feature 1..3: note = core
  misc_feature 4..250: note = LE
  misc_feature 251..1486: note = CDS
  misc_feature 1487..1614: note = RE
  misc_feature 8..224: note = bridgeRNA
gttcgtattataaggtcagccagagaattctggttgactattttttattcaatttatagattgatagtagccggggaagaacggacgcacccgtgggacttgatcccgacaactaaactgttctccctctacttgttaacacatgattaggctggttgggacatgatgatcccgtataacaagcgaagatatgaatgacaagctagatagaggttaccggtcaatccactacactaggaggagataatttatgaatccagttgttggtctggatgtcgctaaaggtgaaagtcaggttcaaatgttcttggataaaaaaatgccctataaaaatagtgtgaaagttgaacatacggtggatggtttaaaagagttatactcttatttactagatttagagcatcaaacagggatgaaaccaccagttgtcttggaatcaacgggtcactatcatgccccagttgtacagtttttagaagcaagagagtacattgtcattatcgtaaatccattggtatcttaccgagcaaaaagttctagtttaagaaaaaccaaaacagatgccattgatgcttatcacttaggcgaactgtattacaaagaggatttagagccgcagaaaaagcgtggtgttcagttattaaaccttcggcatctgacaagacaacatgaaaatatgacgggaattatggttcaaacaaagcttcaatttcaatctgtattagatcaagtatttccagagtataaaggcgtttttggcgatctgtatgccgaggtttcattaagaactttacaaactttccctatctcggagactgtcttaaaaacttgtgtggaggaaattgcacaatttattgataggcattgtaaagcaagatcgtttaattgggcgcttgaaaaagcagagggattaatcgcagctgcagaacgcaacccatttcagtcaacgcgttatcaaagccttcttgtcagtctgaatatgtatattgatttacttcaagtgtaccaccaacagctttctacgttggagcgtgagattgatcagttagcagtacagctcgaagaatatgaactactccaaacaattcccggtgtaggcgaaaaaatcgctgcaacgattatttctgaaatcggggaaattgatcggtttagtcatcccaaaaagttagttgcctttgcaggacttgatcctagtgtatttgaatcaggtcgctttaaaggcacgaagaatcatattactaaacgaggctctgcaaggcttcgccacatgctttttacagcagttcggtgttccattcgagatagtcgtaaaaagaaaacaactgaagaaaccattgcacgaaatatgcgattacgtgccttctacgatttaaaacgtgaagaaggtaagccttataaagtagccattattgcatgtgctaataagcttttacactggatttatgcgatgttaaaaacgaaaacaccattccaagaaactatttagtaacaacattttcctatacaactaaaaccttccaaattgaatcaggagggttatttgagttatgcatttttagtatagcatttagtaattataaatttaaaatatatttattgacaaactattagctg

SEQ ID NO: 7253 - DNA, 1400 bp, unidentified
  source 1..1400: mol_type = unassigned DNA; note = element_b3b7ce2
  misc_feature 1: note = core
  misc_feature 2..90: note = LE
  misc_feature 91..1125: note = CDS
  misc_feature 1126..1400: note = RE
  misc_feature 1170..1392: note = bridgeRNA
caatgggatggacgcccccatccaatagcggcatcgatgtgccagagtggaggtgtcatcgaccactcgaaccgaaaaggggcgtccaccatggagattacgataatcggcgtcgacctagccaagaacgtgtttcaggtgcacggggtcaacgaccgtggcatggcggtgctgcgcaagcagcttcggcgagaccaggttgctgcgttcttcgccaatctgccagcgtgcctggtggggatggaggcctgcggtggcgcgcatcactgggcgcgcaagctgcaggcgttggggcatacggtgaagctgatggcgccgcaattcatcaagccgtacgtcaagagcaacaagaacgatgcagccgatgcggaggcaatttgcgaggcagtcggccggccgacgatgcgcttcgtgccgatcaagaatatcgagcagcagacggtattggcgctgcaccgtgttcggcagggtttcgtcaaagcgcgcactgcgcaagcgaatcagatccgtggtctgctcggggagtacggtctgatcgtgccgcagggcatcgggcatatcgcgacccgcgtgccggatctcctcgaggatgccggcaacgaactgccgggaaccttccggcagctgatccaccgactgctcgagcacctgaagcagctccagcgacaggttgccgagatcgagggacagatcaaagcgtggcatcgatccagcgaggcgagccgaaggctcgagaaggtaccgggtattggcctgctcactgcgacggccttggtggcgacggtgggcgacgcgaagaacttcgacaacggtcgccagcttgcggcatggctgggactggtaccgcgacagtattccagcggcggcaagtccacgttgctcggcatgagcaagcgaggcgacgcgtacctgagaacgctcttaatccacggtgcccgatccgtgatctaccgcgccggccagcgggctcctgtcgatagctggctggtcaagctgatcaggcgacgcaacgccaacgttgctgcggtcgcgctggccaacaagacggcaagaatcacctgggcattgctcgcgcgggatcgagagttccgacctgactacacgaccgtcgcggcgacggcgtagccaatcggctcagaacaaccttcagaaacggaaaggatcacaccaccgattgctcaggcgatcacgcaatgatggcaagacaggtcagaccgtggttggcacagcccgcaacggacgcggcaccgagagtgcgtgtaagcgatcgaggcgccgaccagcagaacccatcagggacagcgagcatgtctcgcacacaaagtccggatgtacgggtgcaatctttaccttcgcgccgtcaggaactgaaagcttggcaaaccgggggcgtccatgta

SEQ ID NO: 7254 - DNA, 1447 bp, unidentified
  source 1..1447: mol_type = unassigned DNA; note = element_b3b80b6
  misc_feature 1: note = core
  misc_feature 2..142: note = LE
  misc_feature 143..1165: note = CDS
  misc_feature 1166..1447: note = RE
  misc_feature 1208..1445: note = bridgeRNA
atggaatggacgcctcccccgcaagggcaacggacgaagccggcaggggtaagtagagaaagagtgggttctcacacccgacggcatcagatgtgccaaagtggaagttgtgacacgaaccacttgagggaggagaacccaaatgaagcataccgtatatggcgtagatattgcaaagaacgtatttcagttgcactgtgtcgatccggaaacgggtgaggtattcagtcggcaggtcaagcgagcgaaatttctggaatattttgcgaaccgtgacacgtgcctgatcggcatggaagcttgtggaggtagtcagcactgggcgaggcgactgacggaaatgggacaccgggtaaaattgatgccaggcaaggcggtcaaagcatttgtgagcggcaacaagaacgatgtagccgatgcgcgcgcaatctggttggcagtgcaacaagcgggcataaagtcggttgccgtcaagtctgaagagcagcaggcgatactagcgttgcatcggatgaggcagcaattagtaaagttcaggacgatgcaaatcaatggtttgcgtggattgctgacagagtacggagaggtaatggcggtaggccgggcggccttgaatcgagccatgtccgatgtcttggcacgacttaatgagcgattgccggcggtactgattaatacactgcgcgagcaatgggaaatgctgagcaaattggatcagcaaattgcagagatcgaacaacggctccagacgtggatgaggcaagacaaggcatgtaagacgatagcggaaatacccggcgtaggtttgctgacggcaacagccgcagtagcaacgatgggcgacgctaaagcattcaagtctggccgagaattcgccgcatggctgggtctggttcctcggcagataggcacaggtggcaaagtaaaattgttgggtatcagcaagcgcggcgatacgtatcttcgcactctgctgatacatggcgcccgagcagtgttgacgcatgcgaaagaacctggagcgtgggtgcaagaaattagcaagcgccgtccgccgaatgtagtgactgtagcactagccaacaaaatagcacgaacgatctgggcattgctggcacatgatcgaaagtacgagaaggcttacgtcggcgccaaaccgacatgagctgccaggcaggctaataacggagttttttaacgaaatggtggttacgtcaaaaggttgcgcaaggtaatagagtgtgatggcaaacaggtcagaccgggactcaccaaacctgaatctgagtacgggctcagagcccgctcaaaaaatgaggtgtgggtcagcggattccatcaaggccagcagggatatatccactgcaacaaggccggatataaaactgcaacctaatctgtctgactacacacgaaaaatccttggcaaataggaggcgtccatata

SEQ ID NO: 7255 - DNA, 1510 bp, unidentified
  source 1..1510: mol_type = unassigned DNA; note = element_b3bc951
  misc_feature 1..2: note = core
  misc_feature 3..250: note = LE
  misc_feature 251..1489: note = CDS
  misc_feature 1490..1510: note = RE
  misc_feature 7..243: note = bridgeRNA
ctaatggggcttaccgagcccgctggtctctggcaggttcggcgccggtagcggccggtgggtcagcactctcctcgcctggaacggttgattcctaggctcagatcgtgcggcccgccggtcgtgagggggcgtgactgctgatgggatgacgtgccccgggctgcgctccggtgagcactggaccattagggcgcaggctgtcccttcctccgctgccgaccgaccggttcgagctggggagctgcggatgctgttcgtgggtgatgactgggctgaggaccaccacgacatcgaggtccaggacgagggcgggcgccgactggcccgggctcggctggcggaggggatcggcgggctggcccggttgcacgagctcatcgccgagcacctgaccgatgacgacgtcgacgccgagaccgggttcgtcgcgcagagcgtggtgatcgggatcgagaccgaccggggcacctgggtgtcggcgttggtcgcggccggctaccaggtgttcgcgctcaatccggtgcaggtggcccgctaccgagaacggcacggcgcctccggggccaagtccgaccgcggtgacgcgcacgtgctggccgagatcgtgcggctggaccgggcccatcaccgcccgatggccggtgacagccccgaggtggaggggctgaagctggtggcgcggtctcatcaggcgttcatctgggaccgcacccggcacttccagcggctgcggtcggcgctgcgggagtattttcccgccgcgttggaggcctttcccgacctgatggtgcctgaggcgctcgagctgttggagcgggccccggatccggcgcgggcggctcgactgtcgaggtcgaagatcactgccgccctgatccgcgcccaccggcgcgaccccgagcccagggccgaggccatccaggcggtgctgcgggcgccggcgttgcgccaggacccggccatcgaggccgcctacgcggtcatcgtggccagcgccgtccggctgatcgcctcgctgaacaaccagatcgccgagttgcaggcggtggtcgccgagggttttggccgacacccggacgctgagatcgttaccagccagcccgggctgggaccggtcctgggcgcccgggtgctcgccgagttcggcgacgaccacggccgctacgccggcgccaaggcgcggaagaactacgccggcacctcaccgatcacccgcgcgtcaggcacccggcgggtcgtgctggcccgctacgcgcgcaaccgacacctcgccgacgccgcccaccagtgggccttctgcgcgctgaccgcctcgcccggcgcccgcgcctactacgacaccctccgcgcccgcggcaccgaacatcacgccgccctacggcaactcggtaaccgcctcgtcggcatcctccacggctgcctgaagacccgcaccacctaccgcgaggacaccgcctggccccacctcaacgccgacgcagcttgacgcctccgaaccatgggatgt

SEQ ID NO: 7256 - DNA, 1432 bp, unidentified
  source 1..1432: mol_type = unassigned DNA; note = element_b3e7ff6
  misc_feature 1: note = core
  misc_feature 2..71: note = LE
  misc_feature 72..872: note = CDS
  misc_feature 873..1432: note = RE
  misc_feature 1212..1426: note = bridgeRNA
taatgggatggtccgccgccgctacccagccagcaggttgggtataaagaggtgaacaaggaggcgtccccatgcaactacagacggtcggcattgatctcggcaagacagtctttcatctggttggacttaacgaacgcggcgaggtcgtggtgcgcaagaagttttcgcgcaaacagctgctgcactttacggcgaacctgaaggtgaagttaattggcatggaagcttgcggagggtcccactttctagggcgggctctgcgagagcagggtcacgaggtgcggttaatgccggctcagtatgtcaagccgtacgtaaagacgaacaagagcgactacattgacgccgaggcgattgctgaggcagtcggacggccgaagatgcgcttcgtgccgatcaagagcgatgaccaactggatctgcagtccctgcatcgggtacgggagcgttgggtgatgcgtcgcaccgccgtcatcaaccagattcgtggcttgctgctcgaacgtggaatcactgtgcgccaagggcgacgccacatcgatgcggcattacccgggatcctggaagacgccagcgccaagctctccggcgcattgcgcgcgctcctagcgcaactgaggctagagctcgatcacttgcaaatgcggatcgacgaagccgatgccgtgatcaacaaggctgctggcgagaacgaagcctgccgacggctggtagcgatccctggcatcggaccggtgacggcgaccgcaatcatcgcctcgatcggcaatggagcagctttcaaaaaggggcgagggttttccgcgtggctcggaattgtccccggcgaacatactactggtggcaagcaaaagctgctgggggattagcaaacgggggaactcttacttgcgaagactcttggtgcaaggggctcgcgccgtcctgcaacagagcgcgaagcaatcgtccggtctgagtgcgtggctggcccaactcacaacccgcgtccacagtaacgtggccgcagtagccttagccaataagctggcccgcatggcctgggccgtgctcgccaagaatgaaccctatcggcccccggtcgtggtcggtgcagttccagcataactggcctgcagatgacgcctggctgaggccaggcttggaaatcgcattcgcgattcccacatctacagaccagcggctgctacggagtcggtgattttctgccaggtctgctggcgaatatgagatgacacaacggtcgaacccggcgctctcgaaacctgtcaaccggaaaagccttccaaggctgcctaactaagtaggacgagcgcgcagcgcattccatcaaggccaggagctttgtgctccaaccaaggccgaatacatttgcgcagaccaacctgtttcctcatttttcgcttgcgacaaggcggcggaccataca

SEQ ID NO: 7257 - DNA, 1562 bp, unidentified
  source 1..1562: mol_type = unassigned DNA; note = element_b3e826f
  misc_feature 1..4: note = core
  misc_feature 5..286: note = LE
  misc_feature 287..1552: note = CDS
  misc_feature 1553..1562: note = RE
ctcactggactaccttcctgaagtcttcgcttctggatgaagcgttgatgcacccgaggtgccaccaggtcactgccctgctcgcttgacgcggttgatgtccatcatgagatctgcagggcctggtggttgcccggggcgtgcgaaccgtcgatagggctgagcgccaacgccaggactggctgcgagcgccgatcagtgagcgaaccggtagtcgcgtctcggcaccaatggcaccgaaagacacgggtgcctccccactggagcaagcagcgaggaggctgacatgaagtctgccagcaacacccccatcatcacgaccctgcctgaggagccgcgcaacgacgtgaccgcgggcctggactgggcccgcgacgatcacgcggtcagtgtcgtcaatggacgcggccgtgaggtcgcccgatgcactgttgcccacaccgctaccggcctgcgggagctggtgggcttccttgaccgccacggggtgggtgaggtcgccatcgaacgtcctgacggtcccgtcgtcgacaccctgctgggtgcgggggtgaccgtggtggtgatctccccgaaccaggttaagaacctgcgtggccgctatggctcggccggtaacaaagacgaccggttcgacgccttcgtgctggccgacaccttgcgcaccgaccgcgcccgcctgaggccgctggtgcccgacaccgacgccaccgtcgcgctgcgccgcgcttgccgcgcccgcaaagacttggtcaatcaccgtgtggcagttgccaatcagctccgcgcgcacctgcgcaacgtattgcccgccgccgtgggcctgttcaaagacctcgagtccgcgatcagcctggccttcctgacccggttcgacacccaagacaagatcaactggctgacccccaaacggctgggtgactggctggccaagcaaggctactccggcaaggtcgaccccgcggtgctgcaccaacgcatcctcgatgcagcacccggcgcgaccggcacccatggcgtcacccaggcccacatcaccgccagctacgtcgcactgctgcacaccttggtcgcacagatcaaagtgctctccacccagatcgaccggcaactcgacgcccacgccgacgcccacatcttcacgtccctgccccgctccggccgcgtccgcgccgcccggctcctggccgagatcggcgactgccgcgcccgattccccagccccgaatcgctgacctgcctggccggcgccgcaccctcgacccgccaatccggcaaatcccgcatcgtcggattccgatggtcctgcgataaacaactccgcgacgctgtcaccgacttcgccggtgacagcagacacgccaacccctgggctgccgacctctacaaccgcgcgatcgcccgaggacatgaccacccccacgccgtgcgcatcctcgcccgggcctggctgcacatcatctggcactgctggcacgacaacctcgcctacgaccccaacaaacaccgcgcgctccaactcctcctcacccaacaaaaggcggcggcttgacatagggctt

SEQ ID NO: 7258 - DNA, 1507 bp, unidentified
  source 1..1507: mol_type = unassigned DNA; note = element_b3f434f
  misc_feature 1..3: note = core
  misc_feature 4..259: note = LE
  misc_feature 260..1486: note = CDS
  misc_feature 1487..1507: note = RE
  misc_feature 22..259: note = bridgeRNA
ctaatgggaattgatcagcgagccttcgatcggtgatggtcggttcgggtgatgctgatttccgagctgctggtcggtgagcactactgccacttggaatgctggtcgattcctaggcctagatcgtgccccggccggttggtgaggtcgcctctagcgctgatggggtgtcgtgcttcgagcactgatccattaggttgccgccgggtgtccttcggctcgaacaggttccgttacatcgagcgagcagggaggcgagttgacgctattcattggagacgactgggctgaagaccaccacgatattcatctgatggacgccgatggcaccaaactggcgtcgcgtcgattacccgaaggactggccggcattcgcgggttccacgaactggtcgccgcccacgccgaggcacccaaccaggtggtgatcggtatcgaaaccgaccgcggcctgtgggtcgaagcgctcgccgcggccggctacgaagtgttcgcggtcaatccgctcgccgtggcccgctaccgcgatcgccaccaagtctcgggcgcaaagtctgatgctggcgacgccaaactgctcgccgatctggtgcgcaccgaccggcacaatcaccgcccgatcgctggggacacgccgaatgtcgaggccatcaaggtgctggcgcgggcgcaccagaacctggtctggagccgcaaccgcaacaccaatgcgctgcgtagtgcgttgcgggagtactaccccgctgcgttggaggccttcgactcgctggccgaccgcgacgccctggccatcttgggtcgcgctcccaccccgaacgacgccgcacgactgagcgtggcaaagatccgatcggcactcaaaggcgctgggcgacaacgcaacctcgatgtcagggcactcgagattcagaccgctttgcgcaccgaccagctcgccggcccgcccgaggtcgccgccgcgttcggggccaccacccgcgccgcggttgggatcatcgccgagctgaaccatcagatcgccgaactcgaagccgagttggcgacacattttgaggcacacccggacgccgacatctaccgctccctgccaggacttggtgtcatcctcggcgcccgggtgctcggtgagttcggggacgacccgaaccgctacaccaccgtcaagtctcgcaagaattacgccggaacctcaccattgaccgtcgcgtcgggcaagaagcgtgccgtgctggcccgtcacgtccgcaaccggcgtctctatgacgccatcgaccagtgggctttctgcgccctgaccaacagtccgggagcccgcgccttctacgacaagcaccgcgccgccggagacctgcaccaccaagcgctacgagccctgggcaaccgcctcgtcggcatcctgcacggctgcctacgccaccacaccacctacagcgaacacaaagcctggtcccaccgccaaaccgactccgacaacaaggctgcttgacaacttacgcacctgggatgt

SEQ ID NO: 7259 - DNA, 1381 bp, unidentified
  source 1..1381: mol_type = unassigned DNA; note = element_b3fb068
  misc_feature 1..2: note = core
  misc_feature 3..81: note = LE
  misc_feature 82..1104: note = CDS
  misc_feature 1105..1381: note = RE
  misc_feature 1116..1369: note = bridgeRNA
tgatggtgtggacggccccacctcgacggcatcaaagtgccaaagcgtggccgccggagcgccacaagagggagaccgtccatgaaagagtatatccgcattggcgtcgatctggccaagaactgttttcaaatccacgccctggagagcgagggcgggcgcgtgacgacgcgcaagctgagccgttcggcgatgcggacgtttttcgcggggatcaagccgtgcctcgtcggcatggaggcctgcggttcggcccattattgggcgcgcgagctacgcgccatgggtcacgacgtgcgcctgatgccgccggcctatgtcaagccctatgtccagcgcggcaagaacgatccggtggatgcggcggcctgttgcgaggcggtgtcgcgcccgatgatgcgtttcgtgccggtcaagagcgaggaacagcaggcgatgctgatggcgcataagaccagagatctgttgatcaagcagcgcacgatgggcgtcaacgccttgcgcggccacttggccgagtttggaatcatcgccgccaaggggatcggccatgtcgaggagctgatcgaaaaggccgccgatgcgggcctccccgagatggcccgggcggcgctgagcgttcttgtcgggcagctggcggcgctcgatggcgcgatcgccgatgtgacgcgccagatcgcccgcgtccatgcgcgcgatccgatcagccggttggtggccagcgtgcccggcgttggggcgctcgccgcctcggcgatcaccgccagcgcgcccgatccaagcgcgttccgctcggggcgcgactttgccgcctggctcggcctgacgcccaagcaacattccaccggcggcaaggaaaagctcggcgccatcaccaaacagggcaatcgttcgctcagacggctgctcgttctgggcgcggtctcgctgttgcgcgtggcggccaagcgcaagggctcggtgcgcgattggctcgtggccctgcgcgcgcgcaaacccggcaaagtcgccgccgtggctctggccaacaagctcgcccgcatcgtctgggcggtcatgtcgaccggcgaggcgttccgcacccatacctttgggcgcgcctgagcgccctagctggacataacagataaagactctaccgctatttagtttggcaagcacgatgacgacgtgatgaacgacacggcaacaccgaagaccaggacacccgctcgccgtcaggagccatttgagctcgaggccttgatcagggaccatggtcgtcggacttcatcagggccagcggacatcattgccgcaccgaaaggcaggacatatgaccgaaggccgccaagtcgctcgtcagtcaaaaaaatgcttgccaataggggccgtccacata

SEQ ID NO: 7260 - DNA, 1223 bp, unidentified
  source 1..1223: mol_type = unassigned DNA; note = element_b3fee31
  misc_feature 1..2: note = core
  misc_feature 3..236: note = LE
  misc_feature 237..1208: note = CDS
  misc_feature 1209..1223: note = RE
  misc_feature 6..212: note = bridgeRNA
cttgtatctcgactaccacgctatgttggggtgatagttcccgactgatcatcgggggaaggccaggaagccgtatccacccttaggctttgagcctgcgacgtagatagcgctgcggccttccatactcactcttacagctcgaacggtatccagagcccgcctccggcgagagctcgcatcagcaaggtagagctgagtgaagcgttgatctttctgaaccagcaggaggacttatgcccagcgtcatcggcatcgatatcgccaaacgcacgttcgacatcgccacccagcagcccaatggcaagtaccgcaccaaggccaaattgccaaacgaggtggccggtttcgaagcgctccagcagtggctgctcaagcacgccaatgcccaagcctggatcgtgatggaagcgaccggcgcttaccatgaagcgctcgcgatctggtttcacgataaaggctatcaggtctgcgtgctcaatcctgcacaggtcgcctattacgctcgaagccagctccagcgcgtaaagtccgacaaagtcgacgccaaactcatcgctgagtatggcgagcggcaccagggtgatctgcgggcctggcagcctgagcctcgcgccgtccggcgcttgaaagcattagtgcggcgcctggaagatctgcaggagatccaacaaatggaacgcaaccgcctggatctggccgacgctagtgtgcaggcttcaatctactcagtgctgcaccatgtcgagcggcagatcggagagacgctacgtgcgatccgagaccacatcgatgatgacccggacctgcgcaacaaacgcgacctgctgaccagcattgatagcatcggcgagcgttccgcagccctgttgctggctgagctgggcgatccgctacgcttcgccagctcacgcgcgatcaccgcttatgccgggctgaacccccgccttcaggagtctggctcctacaagggccagacgcgcatatcccgcacaggatcgtctcgcttgagggctggactctacatgccggcggtctgctcgctcacacacaacccggccattagtgctctacgcgagcgtctgagtgcaaaaggaaaatccggaaaacaaatcgtctgtgcagcgatgcgcaagctgctgcacatcgcctatggggtacttaaatcgggccagcgtttcgaccctcaactggcccttgctcggtaatggggaagacggtat

SEQ ID NO: 7261 - DNA, 1342 bp, unidentified
  source 1..1342: mol_type = unassigned DNA; note = element_b405d33
  misc_feature 1..2: note = core
  misc_feature 3..65: note = LE
  misc_feature 66..1094: note = CDS
  misc_feature 1095..1342: note = RE
  misc_feature 1109..1330: note = bridgeRNA
tgatgccgtggacggctctccacccacccgccagcctttaggggttggcaaaatggaggaaagccatggaatcagcggtaacaatgggattggacctcgggaagtctgtttttcaggtgcacggcgttgatgcggccggggcggttgtcgtccagcgccggctaacgcggagcaagctgctggcgttcttcgagaagcaaccagcctgcctggttgggatggaggcctgtgcggcggcccaccattggggaagagagctcaggaagctgggccatagggtgcgattgatcccgccccgctatgtcaagccgtacgtcaaacggcagaagaacgatgccgcggatgcggaggcgatctgcgaggcggtcacacggccgaacatgcgctttgtcgagatcaagagctgcgaacagcaagggaccctggttcttcatcgtgtccggctgatgctgacgcgtcagcgcgtgcagctgtcgaatgcgatccggggccacatggcagaatacggcctagttgctccggtgggccgcaatggccttcagcgattgatagccatcctgggcaacccggatgatgagcgtgtaccagcagtggcacgcgcctctctggcaccgctagtctgccagttcgatctgatcaatggccaggtcctggagaatgaccggcgggtcagggcgagcgccagatccacggaattgggctgccggctgatggaagtgcccggcgtcggcccggtgctggccagcgcaatggtcgctgcggtgccgaacccaacaatgttcaagtcgggcagagatctggctgcctggatcggccttgtaccgcggcaaaactccagcggcggcaaggagaagctgggcggcatcaccaagcagggcgaccgttatcttagacagttgctggtggccggggcgctggctgtgatccgatatgctcagaggcacggaaccaagcggccgtggttggtccaactactcgcccgccgtacgcccaagatcgcggcggtcgcactcgccaacaagatggccaggatgatctgggcgatgatggtgaccggggaacgatatagagagcccaaggtggctgcggcgtaagtcgcagcaccgggcagagtttgggaagggcaatcgcgatgtaatgcaccagcagtcgaaactgagagcgggaaaacccatttgcgccaaagcgcctcgagcgcgtgctattgatcgggacccgtcttcgcggaaggcattatggccagcggcctatgtgtgccgcatcaacaggccgcacacatggccgcaccgaccgaagggcagaatatcaagaaaacccttgccaacggagagccgtccacaca

SEQ ID NO: 7262 - DNA, 1372 bp, unidentified
  source 1..1372: mol_type = unassigned DNA; note = element_b40a76d
  misc_feature 1: note = core
  misc_feature 2..87: note = LE
  misc_feature 88..1110: note = CDS
  misc_feature 1111..1372: note = RE
  misc_feature 1141..1364: note = bridgeRNA
taatggaatggtcgccccttcccgaaacggcattgacgtgccacagtggaaattgcgatgttccattaaccgagagaggcgaccaaaatgaagattacaacaatcggacttgatttggcaaaatccgttattcaggttcatggcgtgaatgaacatggaaaggtcggattaaaaaagacactaaaacgtgatcaagtattgccatactttgcgaatatggcaccgtgtttaattggaatggaggcttgtggcagtgcgcattattgggctaggaaattacaaacgctaggccacaccgtcaagttgatggcaccacagtttgtcaaaccgtacgtcaagacgaacaagaacgacgcggccgatgccgaagcaatctgcgaagcagtaacacgaccgaccatgcgatttgttgcgctcaagaacggcgagcaacaggccatactgtccttgcaccgagcgcggcaagggttcgtcaaggcgcgcactgcgcaggccaatcagattcgcggccttctgtcggaatacggcatcgtcatggcgcaagggatgagccacattgcgaaacgcttgcctgacattctcgaaaatagcgagagtgatctgcctggcatcttccgtcaattgctgcagcgacttggcgagcatttgaaggagctcgatcgtcaggtgggtgaactggaagtacaaatccgaacttggcatcagcagaacgaaatgagcaagaaattggaaaaaattcccggtattggtccaattacggcaagcgcactagtggcctccattggcgatgcgaaaagttttaaaaacggccgacagttagccgcctggctgggactggtacccaggcaacactccagcggcggcaaaccaacgctgctagggatcagcaagcgtggtgattcctatctgagaacgttgctgattcttggtgcccaatccgccctccgcgtggccgcacgcaaactcgatcatgcatgcagctggctagccaagttaatggcacgacgtcatcagaacgtggctgcggtagcacttgcgaacaagaatgctcgtattgtttgggcgctgctggcgcacaaccgtgagtaccggacagatttggcggtatagctacagcgtagttaacttggaaggaatactccaccgattgctcaggcgatgatgaagtgatggcaagacaggtcagaccgtggcaggcaaaatctagtttacacagggagcgcgaagctcgagaggctgattagaaacctgccagcatattccatcagggacagaggctgtagcctcaatcgaaagtccggatctatggctgcaatctacacctgcttaacatcattgatttaatgcttggcaaaatgggggcgaccatcta

SEQ ID NO: 7263 - DNA, 1340 bp, unidentified
  source 1..1340: mol_type = unassigned DNA; note = element_b40cec8
  misc_feature 1..3: note = core
  misc_feature 4..77: note = LE
  misc_feature 78..1097: note = CDS
  misc_feature 1098..1340: note = RE
  misc_feature 1114..1329: note = bridgeRNA
tgatgatgtggacgccgccgaccccgcaactgcgtgtattgtgcttagaaagagtggaactgggaaggagcatcgaaatgcacatacaaacaataggcctcgatcttgcgaagagcgtcttccaggcccacggcgtggatgacgcctgcaatactgttctggcgaagaagctgcatcgcaagcagatgatacccttcttctccaaactcgcaccgtgtctgatcggagtggaggcgtgtggagcggcgcattattgggcacggacgctcatcgccatggggcatgagattctaataatgccgccttcttatgtcaagggatatgtgaagcggggtaagagtgacgccctggatgccgaggctatctgcgaggccgtgcaacgtccgacgatgcggttcgtgccggtcaagaccgtcgaacagcagggcattttgatggcgcatcgcaccagagcgttgcttgtgcgccagcgtacgatggcagcaaacgcattgcgtgcgcacttggccgagttcggattcgtcgccaacccgggtgtcgccaatctggtgaaactggcggatcaagccttcaccgatgaggttctgcctgcctacgcccaccgggccctcgaaatcctgatccggcgaatggcggagctgactgaagagatcggagagctcgatcaggaattgcgtacatggcatgaaggaagtgacgtcagccgaaggctcgccaccatccctggcatcggcgtcatcacagcaagcgccatcgccgcgacggtgacagaccccgatcagtttcaatcaggtcggcaattcgcggcatggctcggtctcacgccgcagcagcaatccacgggcgggaaaacccggctcggtggcatatcaaaacagggcgaccgatactcgcgacggttgctggttgtcggtgcgacagcggtcatgagacatgcgaaacgaaaaccgacacctctgacggactgggtgagcaggttgttggagaaaaagccgttcaggctcgtttccgtcgcccttgcgaacaaacttgcccgtatcgcatggacgcttctcaaacgaggacagatttacagaccttacggattgtccgcctgacagcgaacaaccaaaccgaattggcaatggcagtcaatgatgcgtaacgatcgagccaatcgcgaggcaaacccgtctgattcaatgcacttcaaaagtgcgccaacttgatcagggacctcgccggcggatttccatcagggccagcggcaaaatcaactccgcacaaacaggccggacatatgaaagcaaccgatctacgcaaaacgacaaaaagtccttgccataggcggcgtccacata

SEQ ID NO: 7264 - DNA, 1372 bp, unidentified
  source 1..1372: mol_type = unassigned DNA; note = element_b4320af
  misc_feature 1: note = core
  misc_feature 2..226: note = LE
  misc_feature 227..1102: note = CDS
  misc_feature 1103..1372: note = RE
  misc_feature 1132..1364: note = bridgeRNA
taatggaatggtcgcctcccttctcttgtgccacagtgagacgatgaatccccactacctgagcggagcggccatcatgaacgttaagactatcggtattgatttggcgaaagaggttttctaggtccacggaattgatgaacacggtaaacggttgttcaataagcaactcaaacgcgcaaaaatgctttccttttttgccaacatacctccatgtttaatcggcatggaagcctgtgcttctgctcacttttgggccagcaaactgatgtcgatgggccataacgtcaaactaatggctcctcagttcgtcaagccctatgtcaaaaccaataagcatgatgctgcggatgcagaggctatttgcgaagccgtcacgcgacccaacgtgaggttcgtgccggtcaagacccctgagcaacaggccgtactggcacttcaccggagccgtcagagctttatcaaacaacggaccgctcaggcgaatcaaattcggggattattggctgaatttggcatcgtcgttccccgagggatccagcagctacagcttttgttaccagagatcctggaagatgctgataacgcgttgccctctctgtttcgtgtacagctgagtctgttacgacaccatctggcatatttgtttgatgtcgtcgctacgctcgacaagcaaattgagcagtgctaccgccagaatgcactatgtcagcgtatcagcaagatcccaggcattggtccgattaccgctagtgcactcattgcgactatcggcaatgccagtaatttcgaaactagtcgacagctggctgcctggcttggactggttccacgtcaacattcaagtggtggcaaacaagttctgctcgggataagcaaacgaggcgatatttatttgcgaaccttacttattcacggtgccagagcggtgttgcagtcggtaaaacgtaaacaggatgtcgtatcgggatgggccagtcggctactggaacgtcggaataataacattgcctcggtagcactggctaacaagaatgcgcggatcgtgtgggcactattggcaaaagaccaggagtactgtgctccagtgatgaacgcttaaatatcagcgccagaaagacagaaacaacaccaccggttgttcaggcaggcatgaagtgacggcaaaacaggtcagaccgtgatggggaaaacccgatttattcagggctcttaaaagagcgctttgttgatagaggcctccatcagcctattccatcagggacagaggtgcttcacgtaacctcaataaagtccggatctatggctgcaatcaatgacccgtaaagccaccgctgcatatttagcctgacaaacagggggcgaccatcta

SEQ ID NO: 7265 - DNA, 1493 bp, unidentified
  source 1..1493: mol_type = unassigned DNA; note = element_b43390e
  misc_feature 1..2: note = core
  misc_feature 3..245: note = LE
  misc_feature 246..1472: note = CDS
  misc_feature 1473..1493: note = RE
  misc_feature 47..242: note = bridgeRNA
ctaatcactgtcaacgggtccgccgtccggcagactcgggcctggtagccgctggcaggtgagcactgtccccctgggacccttcgggagtcctgcgaaaagatcgtgcccctgtcagtcggccgggagggttgatcgctgctgggatgtcgtgcccgccgtgcgcggtgtgagcactgcttgattaggtcgccgatggttctcccgcaggctgccgaataccgatgccgagggcaggagaagcgttgcggctgtttgtcggggacgactgggcagagacctatcacgacgtcgagttgatggacggctcgggacatacgctggccaaggcccgccttccggagggcatggccgggatggtcaggctgcacgcgatgatcggcgagcagttgggtgatgatgccgacgacgctgaggtggtcgtcgggatcgagatcgaccggggtccctgggtgcgggcgctgctgtccgccggctgccgggtgttcggggtgaaccccctgcaggcgtcccggtatcgagagcggccgagcgtgtcgggcgccaagagcgacgccgcggacgcgcacatgctggccgacatggtccgcaccgactcccaccagctgcgtccggtcgtcggcgacagcgccgacgctgaggcgatcaaggtggtgacgcgggcccacaagactctgatctgggaacgcacccgccactgtcagcggctccgacacgccctgcgtgactacttccctgccgccctggtcgccttcgaggacctggacgccgccgacaccttggaattgctggccaaggcccctacccccgccgaggcggccgaactgaccatcacccagatcagcgccaccctcaaacgcggccgccgccggggtgacctgcggcagaaggccgctgttatccaggccgcgctgcgcgccgagcatctgagccagcccgacgtcctgacggccgcctacgccgccacggtccgctcggcggtcgccgtcctgaccgtgctcaacgagcagatcaaaaccctgcaagggcaggtcgaggcccattttggggttcacccggccgctgagatcatcctgtcccagcccggactcggcatgatcctcggcgcccgggtgctcgcagagttcggcgacgaccccgaccgctacgccaccgccaaggcccgcaagaactacgccgggaccagccccatcacccgggcctcgggcaagaagaaagtcgtcctggcccgctacgtccacaacgaccgcctcatcgacgccctcgacatccaggccttcaccgcgctcaaggcctcgccgggcgcccgcgcctactacgaccgccagcgcgcccgcgacgtcggccaccacgccgccctgcgccaactcgccaaccgccttgtcgggatcctgcacggatggctcaagaccggcaccctctacaacgaggcgacagcctggcaacagcacaccgaccacctcgcggcttgacacccatagctcctgggatgt

SEQ ID NO: 7266 - DNA, 1340 bp, unidentified
  source 1..1340: mol_type = unassigned DNA; note = element_b4504e4
  misc_feature 1: note = core
  misc_feature 2..61: note = LE
  misc_feature 62..1093: note = CDS
  misc_feature 1094..1340: note = RE
  misc_feature 1115..1331: note = bridgeRNA
taatgggatggtccgccgccgagactctttgagtgtagagtccggggccaggaggcattccatgaaacttcacgtactcgggatcgatctgggtaagacggttttccatctggtgggtttagattcgacggggaaggtggtaattcgcaagagatgttcccgccggcagttgctggccttcaccgcgaatttgcaagtgcagttgattggcatggagtcttgtagtggcgcgcactttctgggccgcgctctgcgcgatcaggggcacgaggtgcgcttgatgcccgcgcagtacgtgaagccatacgtgcagaccaacaagagcgattacatcgatgcggaagctatagccgaagcagtgcaacggccgcggatgcgttttgtgccaattaagagcgaggagcagctggatttgcaagcgcttcatcgcgtgcgggaacgctgggtcatgcgacgcacggcggtggtcaatcagatccgcagtcttcttctagaacgtggattgacactacccaaaggccgacgttatgtggaggaagctctgccgcggatcttggaagatgccgagttgccgttatcgggttcgtttcggctgttgttggcacagctgaagctggaactcgagcaactctccgcacgcattgatcagctggatatggctatcctggaaagagccagagaggatgaggcctgccagcgactcaccaccattccaggagtgggcccagtcacggccaccgccgtgatcgctgccgtgggtaacgggagtgcgtttggcagaggtcgagacctagcggcctggatcggcatggtgcccggcgagcattccagcggaggaaagcaaaccttactgggcatcagcaaacgcggcaactcctacctacgacgactcttcgtgcagggcgcacgcagcgtcctgcagcagcgacaccggcaggctccgggtctcagttcctggttggctcaattgttggctcgcaaacaccagaacgtggttatcgtagcgttggccaataagctagtccgaatggcctgggccgtgttgtgcaagggggaacgctatcgcgctcccgtccttgctgtgtccacctaaaatcccggtttagaaaaacagttccttcgcggtttgcttgcggagagagatggcaatgggtcgatcccacgctttcggaacctgatatcggaaaaggtcctaaccagaccgtccagtttataggggcgaaggcgagcggatgtccatcaaggccaggagtcattgactccaccaaaggccgaatacattggcgcagaccaactgccaagctcatctttccgcttgcaactcggcggcggaccataca

SEQ ID NO: 7267 - DNA, 1483 bp, unidentified
  source 1..1483: mol_type = unassigned DNA; note = element_b45b316
  misc_feature 1..2: note = core
  misc_feature 3..211: note = LE
  misc_feature 212..1222: note = CDS
  misc_feature 1223..1483: note = RE
  misc_feature 13..193: note = bridgeRNA
cttgtatgtaatagacatgtgatggttagctaccatcacatgaagcggagtgagcttgtctccgccctgaatggcgagaaccttgatttgcagcaaaagccctccgcttcacctttcacgccagcattaacattgaacggttgccaagagcgatgactctgcatgtacaagggtaataggcgtgatggttcagtgaaaggagaatacacttatgttcctgttaggtattgatgtcagtaagaaaactttggatttgagcctgctgcgtgagggcgttaaaggcaaggtaaaaacccgcaagcttaaaaacgatttcaatgcggccagtgttgtaatcaattggctccataagcagcactgcaccccagaggatgttcatatcatcatggaagccaccggggtttatcacgaatcgctggcttacggcctgcacaatgccggagcaaaggtatcgctcgccaacccacaccgcagcagagaatttgcacgtggcatggatattctgacaaaaaatgacaaagtggacgcttatatgctggcctgttatggtgcacttaaagagccggagccgtgggaaccaccaccggaaaatgtccgctatctcagcgcacttctgcgtcgccgcgatgcacttgtcacagacagtagccgcgaaaaaaacagactggaaaaatgctgggcaacggacacccctcctgttgttgctgagtccatcgaaaatgtacttcgtaatctgagtgcagagctgaagcatctggacgctcttatcctgacccacctcgaccagtatcctgaattaaaaaaggattttgacctgctgacatcgataaaatccgtgggttttcagttaggtctgaatatgctggttatcctgcggagtcatcatttcgacacagcagaacaggttgctgcctttctgggtgtggttcctgttgaaaaatactcaggcacatcggtcagagggaaaccaagattgtccaaaatcggaccgccgaaaatcagggcgaaactgtatctggcctcattgtgcggcctgagatttaacccggcgatgaaagcaatgtatgagcgattatgcctgcgtggcaaggcaaagatgtgtgccatcggtgcactgatgagaaaacttgtgcactggtgctacggtgtcctgaaaacacaaaagccgttcgatgctgaatatctgtcttcagatgcgcgtagcgcatgtaaggcggcataacgctgttttatatgactctgtagttaaaccgccgaggcccggcgtaagacggtgtaggatcattaaagatcctaatacccctcccgtcctgaacagccatgcgggtttatagcgatgattttgttgatttaagcccttttaaccccgttagcgcggcgtagccgcgatgtatcggggacttagtgctggcagcttgctgacagtgcttagggggctgtattccaaaaattaaagcgatcttttcttgacgaaacacggtag

SEQ ID NO: 7268 - DNA, 1502 bp, unidentified
  source 1..1502: mol_type = unassigned DNA; note = element_b4612e1
  misc_feature 1..4: note = core
  misc_feature 5..238: note = LE
  misc_feature 239..1486: note = CDS
  misc_feature 1487..1502: note = RE
gtcactggtgcaccctctttctgacgggcatcgagatgatgcctgttgttcggactcggtgagggtcggggtgacggcctgtggtggtcgctcgcgaagggccagcatgacaccgccgcccccggctctcccgaggctgtagaccggcatcagaaggacgcgccgcagagcgccagtcagtgaccgcccggcatatggcctcctcaccgagtcgtcgctgccaactcaaggagaaccgttgcctgatttcttgtccgcctcggtcgcgttgttccacgtagggatcgactgggccgccgaaacccacgccgtgtgcgtcctcgacgacgctggcaaggtgaagtccacgttcgccatcacccacaccgccgacgggttcgccgacctgatcggccggctcggcaagctcggtgaccgcgctgatgtatcggtgggcatcgagcggcccgatggccgactcgtcgacgcgctgctcgaggccggccacccggtggtcccggtcagcccgaacgcgatcaaggcatggcgcgacggcgaggtcgtctctggcgccaagtccgacgccggcgacgctctggtgatcgccgagtacctgcggctgcgccagcacaagctgcgggtcgcggtcccgttcagcgaccagaccaaggcgctgcgcaccacggtccgcacccgcacagacctggtcgagatgcgcgtcgccgcgaccaaccagctcgccgccctgttggacatgcactggcccggcgccaaggccatcttcgccgacgtcgagtcgccgatcgccttgaagttcctgacccgttacccgaccccagcctcggcggcccggctcggggagaagcgcatcgccgcgttctgtgccgccaacggctactccggacgccgacccgccggcgagctgctcgcccggctccgcggcgcaccggccggcaccaccagccccgcactgaccgacgcgctcaagcacgcaatcctggccatggtcaccgtgctcaccgccctcaacaccgcgatcaaagacctcgacaagaccgtggtcacccacctcggggagcacccggacagtgagatcttcacgtcgctgccaaggtcgggtcagatcaacgccgcccagatgctcgccgaatggggcgactgtcgaggagcctacgagggcgccgacgcagtcgccgccctcgctgggctcaccccggtcaccaaggagtccggcaaacaccgcgccgtgagcttccgctgggcatgcaacacccgattccgcgtcgccatgaccaccttcgccgacaacagccgacacgccagcccctgggccgccgacatctacgaccgagcccgcgcgaacggcaaggaccacccccacgccatccgcatcctcgcgcgctcctggacccgcgtgatctaccgctgctggcacgaccacaagccctacgacgtcgccaaccacggcgccgtccaacgcctcggtcagccgccccaaacggcctgaggttgactcagagggt

SEQ ID NO: 7269 - DNA, 1623 bp, unidentified
  source 1..1623: mol_type = unassigned DNA; note = element_b46f866
  misc_feature 1..3: note = core
  misc_feature 4..255: note = LE
  misc_feature 256..1491: note = CDS
  misc_feature 1492..1623: note = RE
  misc_feature 8..233: note = bridgeRNA
gttcgtattataaggtcaatcagaaaagaaaatatttctggttgaccattttttatatcgatatatgataaccgtagccggggtagaacgtacctgcccgtggggctcagatcccgtcaactaaacagttcgccccctacttgtagaaacatgattgaggctggttgggactatgatctcgtataacaagcgaagctatgacactacaagaaggaattaggggtaccggtgattttatattaggaggggtaatgtatgaatccagtcattggtctggatgtggctaaaggtgaaagtcaggttcaagcattcttggataaaaagaagccatataaaaagagttttaaagtagcacatacacttgaagggctagctagtcttctagattttattagagaagtagaagatgtatcagggggacgacctcccattgtattggaatccactggacattatcacacaccaattgttcagtatttcgaagacagaggatacttattgattatcgtaaatcctctcatctcatatcgggctaagagttctagtttacgcaaggtaaagacagatgtcatagacgctcatcacctctgcgagctgtattataaagaggacttagagccttataaacagcgaggaatccagctcttaaacctacgaaatcttacaagacaacatgaaaatattacaggtatgttcgtacaaactaaattgcaatttcaagcagttctggatcaagtgtttcctgaatattgtggagtttttggggcattatactctgatgtttctttactcacgttacaagcatttcctacttcggaggtagtcttggaaacaagcaaagaaacaatcgctaccaaaataaaagagttatgtaaaagtcgttcacaacaatgggcaaacagtcagacagaaaaactagtggctgccgcagctcaaaatccgtttcagaaaaccttatatcatagcctttctttaagcttggatatgtatattcatatgcttcttgaatacaaaaaacatctatccaaacttgaagatgagatagatgctttagcgaaaagtattgaagaatacaaaattatccaatccatccccggaattggtgaaaaaatcgctgccacgattatttctgaaattggggaaattgatcggtttaatcaccctaaaaaactagttgcatttgccggaattgacccaagtgtcttcgaatctggtacattcaaaggtactctaaatcgaattaccaaaagaggctctagtaggctacgacatgccttgtatatggccgttaaatgtgccattcgtgattgtcgcaagaagaaaacaacagatgaaatcattcctcgtaacaaacgattacgagagttttacgataagaaacgtgaagaaggaaaaccctttaaagtagctgtgatagcatgcgccaataaacttttacattggatttatgcacttttaaaaagcaacacggctttccaagatctagcctagtttaaaagtataactaaacagtccaaaactttccaaactcagaacgttggaaggttatttggtatggctaaatttagtatagcatgagatattttaaatttttattgaaaaatattgacaaactattagctg

SEQ ID NO: 7270 - DNA, 1496 bp, unidentified
  source 1..1496: mol_type = unassigned DNA; note = element_b474fd8
  misc_feature 1: note = core
  misc_feature 2..254: note = LE
  misc_feature 255..1481: note = CDS
  misc_feature 1482..1496: note = RE
  misc_feature 43..221: note = bridgeRNA
cgttaccttcttcccagctcgtccgtccatcaggatgggagggtgctgaccggccggtcctcggcatgatcgtttgcccccagtcacccatgatccggggggtgttgtcaccgaggaccggtccggtggtcacggatcgctgatagaggcgcgaccttcttcttgagggaccttcgtaacgtggatgccgagcgtgaccacctcccggccggccagcatgtgcagatgccggtgcagtagaagggaatgagtccatggcggagcaaccactgccggcggtgttcgtcggcctcgacgtcggcaagtccgagcaccacgccgtggccgtgaccactgctgggaacacggtctacgacaagtccctgcccaacgacgaggctcggctgcgggccatccttgaggagctggccaccgtgcacgggccggtgctgatggtcgtggaccagccggccaccatcggggcgctgccggtggccctcgcccaagccaccgacggcgtacacgtggcgtacctgcccgggctggcgatgcgccggatcgcggacctgcacccgggcgcggccaagaccgatgcccgcgacgcggcgatcatcgccgaggcggcccgcacgatgccgcacaccctgcgcgacatccgggtggacgaggaacagatcgccgagctgggagtgctggccggcttcgatgatgacctcgccgcccagatcaccgcgacctcgaaccggttgcgaggcatactcacccagatccatccggcactggagcgggtcctggggccgcgggtgacgcacccggcggtgaccgacctgctcagtcgctatccgaccccggggaagctgcaggtcgccgggcgcgggcatgtgcgggcgaggctgaagaaacacgcaccgcggttggccgaggccctcaccgaggaaattttcaccgccctggggcagcagaccgtggtggtcgccggaaccgaggccgctgccaccgtgatcccgatcctggccgggcagctggctgccctcaccgctcagcggacgcaggtggcgacccagatcgaggccctcgtggaggcccaccctctttccccggtcctgacctcgatgcccggcgtcggcgtcaggaccgccgcaaggatcctcaccgaggtcgtcggcaaggactttcaagatgccgggcacctggcctcctacgccggaatcgcccccgtcacgagacggtcgggaacctcgatccgcggcgaacacgccccgagaggcgggaacaagagactgaagcgggcgctgttcctctcggccttcgcctcactcagccacggtccctcgagggcctactacgaccggaaacgggcccagggcaaacgccacaaccaggcaatcatcgccctggcccgccgccggaccgacgtcctctacgcgatgcttcgcgacggcaccctctaccaagaccccaccgagtctcagaccccgtcaccggtggccctggccgcttgacggaaaccatagagg

SEQ ID NO: 7271 - DNA, 1647 bp, unidentified
  source 1..1647: mol_type = unassigned DNA; note = element_b4786de
  misc_feature 1: note = core
  misc_feature 2..265: note = LE
  misc_feature 266..1516: note = CDS
  misc_feature 1517..1647: note = RE
  misc_feature 13..285: note = bridgeRNA
cctgttacaatatatttgcctcggaaaagtggcagccagctacgagccgaggcatctcgttgcttaagctgttagaatgggaaggtaatggtctgaccttgttctccaagggcttcgtgcccgtaattaagtcagtcagccatcttcctattcgcagcgttcgatttgtgcaggtagagccgcgtgttcgtgtcaccaaacagatagaatcggcaatgggtaaagatggctcagtccattgcaaattatttcaggagtgatgaacatgaacgcagcaggtattgatgtttccagcagaaagagcaccgtgaccgtgcttcgtccttttggcgaggttgtgaagctgcccttcgacgtgcgccacaatgccgaggatctggcggcactggcagcgcaactcaagtccattgagggtgaaacgcgggtggttatggagcacaccggacgctactatgagagcgtcgccaaggttctccacgaagccgggctttatgtctcggcggtcaaccctctgctcatcaaggagtacggcaacaactctctccgcaaggtcaagaccgataaggcggatgcaatgaagatcgccaaatacgcgcttgacaattgggccgaattgcgggactatactcctatggatacgattcgatatgatctgaaaacgctgaaccgtcagttccagttggcctccaggcagaaaaccgcaaccgcaaacaacctcattgcacttcaggagcagtcttttcccggcattcgcaagctctttgacagccctgtgcgcagcgacggcacacagaaatgggtagatttcacccatgacttttggcatgtcgattgcgtccgcggcggcagtcagaacgcttttaccgagcgctaccgcaagtggtgcaagcgaaaccgctaccagttcagcacggaaaaagccaccgaggtgtatgctctggcaaaatctgcagttgtattggtacagaaaacttccgttaccaaaacactcgttcaggaagcggccaaccagcttacggcgatctcacgcagcgtggaaacctaccgcagcgagatgaacaagctggcttcccagctcccggaataccctgtcgtcatggagatgtacggcgtcggggaatccctcggcccgcagctcatggcggagattggggatgtgcgccgttttgagcgcaaacagtcgcttgttgcctttgcaggcgttgacccggcaccgagcgaatcaggcgactattgctctcgcagcaataagaccacgaaacgtggctctccatatctgcgaaaaacgctgttcaacatcatgaccgtacatctgcaactggctccggcagacgagccggtgttccaattcctgaacaagaagcgtgccgagggcaagccgtactatgtgtacatgacggctgcgggaaacaagtttctgcgccgctactatggcaaggtgatggcctatttttccactctggaggggctgccgcccgtagacatggattcaacaggtctgcaccacgcggagtaaccgactacaacctgacctctcaggtcggcgcatttgcggcggcctttttgtgttgcactttttctctacctgctacctacaacattttctttcgtcaagtccgctttggggcttgactttttatttgcagg

SEQ ID NO: 7272 - DNA, 1535 bp, unidentified
  source 1..1535: mol_type = unassigned DNA; note = element_b484606
  misc_feature 1..2: note = core
  misc_feature 3..267: note = LE
  misc_feature 268..1437: note = CDS
  misc_feature 1438..1535: note = RE
  misc_feature 6..258: note = bridgeRNA
ccattacagtttgagccgtccataagggcggctctttcgtttcctccgaggcattacgattgggccgtatcgatggtcgccgaccgaccgccccggatggccgtctgcccctgccccacagagggcccggggggggtgttgccaccggggcgggacggcgcgcgggaaacgactgatagagatgtgccgggcccggctcgggccacggccgggtaatgtgggtgtcgcctccgcgggctccggccggctcaagggagaggatacaccatggccgaagcgatcagggccaccgtcgcctacctggggatcgacgtcgggaagcggtcgcacagcgcgtgcgccctcgacgaggacggcggcgtcgtcttcagggccggcctcgagaacaggcccggcgacatcgaccggctgctcgagcgcgccggcgccggcgcgctggtcgtcgtggaccagaagcgcaacatcggggcgctcgtgctcgcccgggcgctcgcacacggcaacccctgcgcctacctgcccggatacgccgagaagcaggcgcgcggcatgttccccggcgtcgccaagaccgacgccatcgacgccgaggtgatcgcgcggaccgcgcgcggcatgcccggcgcgctcaggccggtcgccgaggagcccgagggcgccgcgtcgctgcgcatcctgtcgtcgcagcgcgagttcgcggcctccgcgcgcaccagggcgaagaaccgcctgcgcgcgacgctgctggaggccgaccccgcgctcgagcgggcggtcgacccctcgcgcggctggcaggtggcgctgctcgccgagttcggctcggccgcggggtgctccgccgccggctggcgcaggttctcggcggcggccaggcgcgcgggcgcgccggcggccggcgccagggcgctctgggaggcgctgctcacctccgcgaggtccggcagggccctccccgccggagaggacgtcgcggtgcgcatgctcgcgcgcgagatcgccgccctcgacgccgacgtcgccgagctcgaggcgctcgtcgccgactcgctcgccggcaacgaggtctacgagtgcctgctcacggtccccgggatcggcccgaagaccgcggccgcgctcgtcacgtcgatcgacgtggcgatgttccggggccacgacgagctggcgagctactgcgggctggcgcccgcggacagcaggtccgggaccagcgtcaggtcggcctccccgcagcgcggcgggaacaagcagctcaagaacctgctgatattcagctgcaactccctcatcggcacggacaacaggttcggaaggtactacgacgggtgcagggcgagggggatgaggcacaacaaggcgctgaaggccgtggcaaggaagaggctcaaggtcatctacgcgataatgcgggacgcggccccgtactcggcctaggcagcggtcggacaacctagcggacgaggggcgcccggcgccctgatagactatgctgaaaaacgagggcggctatggttgacaaaaccatagagaca

SEQ ID NO: 7273 - DNA, 1411 bp, unidentified
  source 1..1411: mol_type = unassigned DNA; note = element_b48a397
  misc_feature 1..2: note = core
  misc_feature 3..102: note = LE
  misc_feature 103..1128: note = CDS
  misc_feature 1129..1411: note = RE
  misc_feature 1149..1346: note = bridgeRNA
agttggtatgaagcggctggacctccacggcaacgtggtggcagtgtgtgccccacaagcatacacgcggtcaacgccgcaaaaccaaccgggaggccagccatggatagcataggaattgatctccacaaacgcgagagccaactctgcatcatcacggaggacggggagctgatcgagcgccggattgttacgagccgcgagcggttcaccgccgtcctcggcgaacggccccgcgcgcgcattctgctcgaggcgtcgacagaaagtgagtgggttgcccggcatctggagtcgttgggccacacggtggtcgtcgccgatcccggcttcgccgcgatgtacgccacgcgctcaaagcgggtgaagacggacaagcgggacgcgcgtacgctctgtgaggcgctgcagctcggtgcctatcgcgagatccatcgcgcgtccgatgcgcagcggcacctgcgagcgcaactcgtcgtgcgcgacgcgctcgtcaggacccgcacgcggtacgtcgcgatcttcaaggcgttcgtccgccgcgaagggcttcgtattctcagtggcgatgcagagcacacggtcgcgaaggtcctcgcgctgcccatgccgccgcacgtgttcgaggagttggcgccactcgtcgcgatgtgggcgcccctcgatgccgagatcgcggccgcggatgcgcgcctgctcgccgtggccaaagaccatcctgtggtcactcgactacggaccatgccgagtattggtccggtgaccgccattgccttcgtcgcgtcgctcgacgatgtcacgcgctttcacagcgcgcatcaggtgcaagcgtatcttgggctcgtaccgagcgagtacagttccggcgaccgtcgcctccagggtcggattacgaaacacggtgatgcccgcatgcgctggctcttagtcgagaccgcgtggcgcattttgcgctcacccaaccccgaactcgccggcctgaaaggttgggccgagcaaatcgcccaacggcgaggcaagcgcatcgcggtcgttgcactggcgcgcagagtggccggcatcctgtacgcgatgtggcgggacgacgcgaactacgcagcgacaaccgggcgcgcggtcgctgcctagcgactgagtcccaagaaaaacaccagaccgtcaaccgatcatcggggtgactgacctggggcgtggtgagcgcgacgcagctgatggccgcacgtgagaccgaagctcagttttggcgccgcccgtccctttccgcatcccaacctgcgccggcgagtcatcctcgccatgccatgagcgcgaacagaagcctgagcagcatctcgagatcgcgacactattgacatcattctcatggccagggcgcgcccctggtccttgacaccggacgccgcttcacaga

SEQ ID NO: 7274 - DNA, 1312 bp, unidentified
  source 1..1312: mol_type = unassigned DNA; note = element_b48ca7a
  misc_feature 1..2: note = core
  misc_feature 3..191: note = LE
  misc_feature 192..1154: note = CDS
  misc_feature 1155..1312: note = RE
  misc_feature 32..204: note = bridgeRNA
cttgtgtccgcaaattctgccagaatgtgcgaacgggcggctctcgtaaaaccgcccgtcgctggatctgagcccgtttcgtgcgtaaggccacgagagcctgacggggagcgagggacagatccgatgtcttcctcaacccgaacagttgcatgggcttagagcccggaccgagcaaggaagggaattggatgatggcacaaaacgatctcattgtcgtcggtatcgatgttgccaaggacaaggtggatgcgtgcattcgctcgctgtctttgaaagggacctggccgagcaccgtgcaggatcggcgcaagctgatcgcgtggcttggcaagcacaaggtcggcaaggccgtcatggaggccagcggcggttacgagcgggactgggccaaggcgctgcgcgaggccgacatcgaggtccggatcgtcgaccccaaacgggtgcgcagcttcgcccgctcggccgggcggctggccaagaacgatgcgatcgatgccgagatgatcgcctggtttgccgaaacattcggcgaggccccggggcaggcctacgacgcggcgcgcgagaagctctcgcagatcgtgaatgcgcgtcagggtctgctcgacctgcagaccaacctgcaaaacaggggcgagcacgccgggccggaaccggtacaaaaaatgcgagcgcgactcttgaaacagctcgcgctcgaaattgataagctcgaggctgcgatcgcagccatgatcagggccacgccgtattttgccgagcgcgccgagatcatcgagagcgtgccgggcgttggcgggatcacctccgccggcctgatcgcggcgatgccggaactgggccaggtgagcaacaaggtcgccgccgccttgctgggggctgcgccttacgatgacgacagcggccgccgtcgcggcgagcgccagatcaagggaggacgccgcaaggtccgcaatctgttctacatggcatgcctaggagcggcgacccggcacaacccggcgctcaaggccttctatcgtcgcttgatcgccaagggcaaaaaggcaaaggtcgccctggtcgcgtgcatgcgcaagctgatcgtcatcctcaacatcatgatcgcccgcggcgagaaatgggatgccaatcgctacgcggtgggttaacgagcgcgccacgcccgcgctcggcattcggccgagcgcttgcgaggccaagcagaccagtgagcggatggggtcaaggccgtcagccgccggaggcggtggcgcctagcgccagccttgaggccagccgatcacaggtctacttcaaaatacagttg

SEQ ID NO: 7275 - DNA, 1359 bp, unidentified
  source 1..1359: mol_type = unassigned DNA; note = element_b48f764
  misc_feature 1: note = core
  misc_feature 2..71: note = LE
  misc_feature 72..1106: note = CDS
  misc_feature 1107..1359: note = RE
  misc_feature 1109..1349: note = bridgeRNA
tatgggatggcccgcccctttccccgcatcgagtatgatgctggtgaccggaaagggaaaggaacgagccaatgtctattgtgatcctcggggttgatctgggcaagaactcttgcagcgtggttggtgtcgacgcggccggtgcagtcgtcgtccgtcgaacgatgcgccggcaggcgctgatcgattatgtggcgaagcttccggtctgcatggtcgcgatggaagcatgctgcggcgcccatcatctgggccgcctgtttgcggcgcagggtcacgagatccggttgatgtcgccggaatacgttcgcccatacatcaaagcccagaagaatgacgaccgtgatgccgaaggaatcgcggaggccgcctcgcgaccgaccatgcgcttcattgaactcaagggccaggaggaactggacatccagacgctgcatcgggtgcggtcacgtctcgtggccgaacgaactggtctcatcaatcagctgcgtgcgatcctgctggaacgcggggtgatattcccggccgggcggcgaaagctcgagcatggcgtggatggaatgcttgccgatggcgacgagatgttgtcaccgcgcataggtcggctggttgtcgagttgcgtgccgaatggaaggaactcgatgcaaagatcggaacgctgaacggcgagtttgtcaaactggcgcgcaatgatgccgccatgcgaaggttgacctcgatccccggcattggcgtgctcaacgcgacggctttggttgccgcggtcgggaatgggagcagcttcgccaaggcccgtgatcttggcgcctggctcgggctggttcccaggcagcacagcacaggcggcaagactcggctgctcgggatatccaagcgcggcaacacctatttgcgcactctgctcatccacggtgctcgcgcggcattgccatcgctgtcacagagcgacacgcctctgggccgatggctgaaggcaatgatcgagcgaggtgtgcaccgtaacgccgtggtggtggctttggccaacaagctggcgcggatcgcctggtctgtcttgcgcaaggagacaggctttgaacgctgctatccggcagctgcggcataatcgaatccgccacgtgctatcacgcgcgtagcccaaagaggtttgcaggaaggatcgtgaagatggcctgacagtcgaccggcgtttggaaagcccgatcaaaaaaatggcacgttcgatgccgaggtgttttatggggctctgagcgcgcggatgtccatcttggccatgggcttgctcatgagaccgcatacgttgacgcagactgaatcagaccgccgaaaatcttcttgcaaacggggcgggccatacg

SEQ ID NO: 7276 - DNA, 1226 bp, unidentified
  source 1..1226: mol_type = unassigned DNA; note = element_b493529
  misc_feature 1..2: note = core
  misc_feature 3..125: note = LE
  misc_feature 126..1121: note = CDS
  misc_feature 1122..1226: note = RE
cctatataggttttattagccggggagaataatactcctcggctggggaaacatggtcgaccccttaactgaagcaaagtcttcgtatgggggcgtgacaaacccctaccatcggactgaacattgtggaaaaatccacgcatataggtaaagaggtaggggtattaggaatagatgtatcaaaagattatctaattacaagtagggggagggaaagaaaatacaagaacaacttgaagggttacgaggaaatcctcgaaatgaagccttgcctaatagttctagaacctacgggagtatacgcaataaggcctagccagtacttcaaggagaagggtgtaaaagtactacaagtgagcccaaacgtgttatcaagagaaaaggagtttagggggaagaaaacagatttttatgatgctgaaaaattagaaaacatggttgacaaggcaaaggagtatgaatacaaccccttgagggaactggtaacactttacctcttcctcaaggatatagaagtaaagtacaagaacaggctgaagaggacattattcttagtaagtgataatgacaagataagtaaggaaaggttggaaaaactcgcaaatggagattttgcgcaagaagaactataccaactagaatacacaccaatagtacttgaggaaattagagtattggcaaaaacactcttggaaacagaagagaggttgaaagaagttaagaaaatgattgaggagcaagttcccgagaaccacgttttgttaacgatcccggggattgggaggcttgcagctggtataattattggtgttgttggtgatgttaagcgttttcctaagccagaatcttttgtggcttattgtggtttagatcccgttgtggagaggagtggtaaggctgtaataagtagggggatttcgaagaggggtaataagtacttgcgtagcttattctactttttggctgagatgaattattctaggaatccaacattgttgaagttttatgagtctcataaggataggttgcaaggtaagaagttgtatactgctttggcaaggaaattagctaggattgtatggagtgtttggtataataataagccttatgagccaaagtgattaaaggtcccttccccttaatcgccacgtgggtctagagggcccacgtggcaatcttagctagtactatgcttgaagtatgaccgaaagatttattactgaacg

SEQ ID NO: 7277 - DNA, 1587 bp, unidentified
  source 1..1587: mol_type = unassigned DNA; note = element_b49f581
  misc_feature 1..5: note = core
  misc_feature 6..265: note = LE
  misc_feature 266..1468: note = CDS
  misc_feature 1469..1587: note = RE
  misc_feature 17..285: note = bridgeRNA
tttttagtaccatataagtgtaagagataaagcatatcattagtgctttaccctctgcacttatttttttatgataagggagtaattggtctggcgaggctctttttggattaaccacatccgtcacaaaaaccgtcaaccaccccttattataaacagtcgtttaagcaggttgaaacccgtaaggtgctttcgtgtaacgaactaaaatgagttgtaataagtgtggatgggaacaattacaaatccaatgtggaggttacagatgataagcgtaggaattgatgtatcaaaggagaaaagtaccgtatgtattctgaaaccgtatggtgaaattgtaagcagaccttttgaagtctgccatgtggaaaaggaactgtctgaacttgcgaccatgctgctgcgtctggatgatgagatacgtgtaattatggaagcgacagggatttaccatctgccagtattgagttacctgaaagaaaagggcttctttgtggcagtgatcaacccgtttgaaatgaaagaataccgttgccaggggcttaggcgtgtgaaaacagacaaacaggatgccattacgatatccaactatgggattgaccattggtatcgtctgaaggactatgaagcggaagaaagcgtttatgcggaactgaagctgttaggtcggcagtaccgtcactatatgaggatgcgggtagaaagcgtattggaactgacgcatctgctggattatacgatgcctgggatcaagaagctcctgaaaggctggaacgaaacgaacgggaaagataagctgtcagactttgcagaagaatattggcattacgacaatataaccagacagtcagaggaggagtttgtggagagttatgttgaatgggcagaaaggaagggataccatcgccgccaggacaaagccgaaaaaatctatgcactggcgaaagagggtatccctacagtttcttccagtaccccatcgaccaaaatgctggtacaggaagcggtcagggtgttaagagaagtcgataacactctgatgacgattttaacacaaatgcagacattagccaagagtctgccggaatatccggtagtgcgggcaatgggaggagtggggaacgtgctggcaccgaaactgatagcggaaatcggagacgtaaggcgtttccatagtggaaaggcactgatagcccatgcagggatagatgccccgccatatcagtcaggtcaattcaccggaacagagcgaaagatatcaaagcgtggttcatcaagtctgcggaaaataggctatgaggttatgcgttgtttaaagacacataaagcgccgaaggatgcgttggtttatgaatttatattgaagaaggagaaagaggggaagtcaaaacgtgcggctaaaatagcaggattaaacaagtttcttagaatttactatgcacgagtaatggaggtgtaccaggagtaaaaagatggaaatacaaaagtgattgaccggattcaccgccggtctaattgtcgtgggaaaatatagaaataaaaataattttaaaaacctgctaaaaagtattgacttttgttagcagg

SEQ ID NO: 7278 - DNA, 1393 bp, unidentified
  source 1..1393: mol_type = unassigned DNA; note = element_b4a1af9
  misc_feature 1..2: note = core
  misc_feature 3..87: note = LE
  misc_feature 88..1116: note = CDS
  misc_feature 1117..1393: note = RE
  misc_feature 1087..1380: note = bridgeRNA
agatggggtggttgccgtcctccccaaacggcatcgcaatgtgccaaggtcgtggtgttcgacatcatgaaacggaaaggacggcaaatgaaagatacaatgatcggagtggacctggcaaagaacgttttccagcttcacggggcaagcatgactgggcagttgaagtttcgtaagaagttgtcccgctcacagtttcgggaggttctttcggcgcaaccacccgcggtcatcgtcatggaggcgtgtggcagtgccagctactgggcgcgcgagctggcccgacttggtcacgaggtgaaactgatcgcgccgcaatatgtgaaaccatttgtgaagcgccagaaaaacgatgccgcggacgcagaagctatcgtcgtcgcggcgcagcgtccggagatgaggtttgttcctgccaagtctgagagccaacaggcccgtgcgatcctgttccggaaccgggagcgtttggtgaaccaacggactgagttggtaaatggtctgcgatcaatcctctatgagttcgggcatacaatcccgcagggcatagggaatttgagccgcgggaatgagatccttgaggacccgaattgcgatcttccagacctggtccgccaggagtgtcgagaccttttcgaactgattgaagagaccactgtccggatcgacgccaagttgaaacggatcaaagccttgtccactgagacggacacggccaaacgacttcagacgatgccgggcgttggccctttaagcgcccttgccatcgaggcatttgctccaccactggagacattcacccggggccgcgactttgcggcctggctgggcctcgtgccacgacagcattcatcaggcggcaaaccccgtctggggcgaatgtcaaaggcgggccaatctgacatcagaaggcttctgattatcggagcgatgtcacgcttgagccagttaggtcgcaaatccatacccaaaggatcttggctggaacgtatgctcgcgcgcaagccgaagatgctggtcgcaattgcgctggccaacaagatggcccgggccctatgggccatgcaaacgaagaaggaaaattatcgggatccgacgcaggcggtcgctacatgaccacggtgtagcgcagggccgattgacgtcggtaaaggaggtgtaaggagtcaaagacctgaatgggcagaatgatcgaacagatctggatcgggaaaaccaggataagggaatgagcgtcgaagctcgttgttgagatatggacctgatccgcagatcaccatcccggccagcggcttctggaaatgccgcactcgaaggcctgacagaagcacgcactcgatcaccaactcaagaggtctgaaaaacatcttgcatcaaggacggcaaccacaga

SEQ ID NO: 7279 - DNA, 1450 bp, unidentified
  source 1..1450: mol_type = unassigned DNA; note = element_b4a79fb
  misc_feature 1: note = core
  misc_feature 2..123: note = LE
  misc_feature 124..1149: note = CDS
  misc_feature 1150..1450: note = RE
  misc_feature 1199..1446: note = bridgeRNA
atggtatggacgcctcccaccttcgccgcgctcccaagctgcttgatcggggggcctcgcgtgcaacggcatcaagtgccaaagtggaggttctcgcaaccactcgatgacggaggccccacgatggatgctacaacctatgcagtggatcttgccaagcatgtattccaggttcattgggttgatcccgccagcggggagatccaccgtaagaagctcagccgcgccaagctctcggagttcttcgcacagcttcagccggccaggatcgtgatggaggcttgtgggggtgcccaccattgggcccgccgtcttgtcgcgatgggtcatgagcccgagttgctgcccgccaagcaggtgcgtgcgttcgtgcgcggcaacaaggatgatgccgccgatgcgcgagcaatctgggtcgcggcctcgcacgaggatatccggcgcgttccgatcaagagctgtgaccagcaagccatccagtcgctgcaccggatcaggtcgcattggatcaccacgcagacagcgaccgtcaacatgctccggggactgatgtatgagttcggggtggtgctgccgcaagggcgccatgcgggcttgcgtgtgctggccgagcgccgcgcccaatttaacgagagcttgccggagctgatggtgcgtctggtcgatgagttgcagcgaacgctcaaggagatcgcgcacaacatcgaggtggccgaaggcgagattgccgccgtacaaaagagctcagagacggccaaggcgctgcgccagatcccgggcgtgggtgtcttgggggcgaccgccctggcggccgttctgggcgatggcaaggcctggcgcaacgggcgggagtttgccgccagcctggggctgagcccgggtcatcaggggaccggcggcaaggttcgcatgggcggcatcaccaagcgcggcgacccgtatctgcgcacgctgctcatcagcggtgcgcacgcggtggcaatatcgaagagtcgcaccgaatggttcaccaagatcctggagcgccgaccgacgaacgtcgctgcggttgcatgggccaacaagactgcaagaacagcctgggcattaatccggcacgggcgcgcttatgacgcgagctggaaggcgagcgcacccgtggcggcctgaatacggcttccccgaagggtaaataaccaacaaacaatggcagatgccaaaacgagtgtgcgagagaagttgacgaggtgatggcaagcggccagaccgtgggtcggaaaatccgatgcgctgctcgggcaagcttcacgcaaagccctgtggtgagatgggatccgacctcgcgaatgaccatcaaggccagcggcggaattacatccgaaccgcacgaacaggccggatataagaccgcagttgaaccgccataccagaacttcaagacttcgcttgacacaagggaggcgtccatata

SEQ ID NO: 7280 - DNA, 1749 bp, unidentified
  source 1..1749: mol_type = unassigned DNA; note = element_b4a9eba
  misc_feature 1..2: note = core
  misc_feature 3..72: note = LE
  misc_feature 73..1257: note = CDS
  misc_feature 1258..1749: note = RE
  misc_feature 1282..1510: note = bridgeRNA
agatcctatggggcgagcggcgaggagattatatccatcggcgcggatgtgaaccgagcgacggaggcccccatgccacagcagcgcaagccgaatgaccttagccgatccttgatagccctcgacatggatacgacgttgattgccgtagtcgagttgagcctatcgagctggttggttgccggtatcgtacccggcatcgagcgccagccacttaagaagttgaagacagatgagaatgctctccttgcactgttcaatcgctggcgcgatgaagctgtgaggtcgggacacaagatctcgcgcatcgccgtggccttcgaggccggccgcgacggcttctggctggcgcgctggctcaaagcacgcggcattgaggcgcatgtgatccacgcgtcgagcgtggcggtgtcgcgcgagcatcggcgggccaagacggatcggctcgacaccgagctgttgaagcgtgcctttgtgggctggctgcggggcgagcgtgatcactgcaagacggctgcgattccgagcctctgcgaggaggacgctaagcgacctagccgcgagcgcgagagcctggttggcgagcagagccggctcgtcaatcgtatgaaagcaacattgatccggctcgggatccgggccttcaatccaaagctgagatatgcggagcagcggctcgagacactgcgcacacccgagggcgaaccaatcccggccaatactctggccgagctcaagcgggacatgcagcgacggcggttcatctgtggccagatccgcagcatcgagcaggagcgtcttgaacgtttggagcggacacccgacactgagccacatgccatggtgcgcctgctggcacgcgtcaccggtatcggcatcgagaccgccgacttgcttgtgcacgaggtgctgctgcggaacatgcgcgatcggcgggcggtcgcgcgctacggagggctgacaggctcacctgaccggagcggtggcacgaaccgcgagaaagggatggcacgatcgggcaacgcccgtgtgcgccgtggcatgatccaattggcgtggcggttcctgctgttccagaaggacagcgctctggtgcaatggtatcggcggcgaacggagcattcgccaaaagcccgcaagaccatgattgtggcactggcccgcaagctactgatcgcgttgtggcggctggcgcgggagggcgtggtcccggagggtgtcgccatgcgccccggcgtaatgaacacgagctattgaatataggtcgccaatagcttgaaggtttcggctcgatccgcaccacgatgaggatcgccgatgacggttcgaggtggcggggtccgtaaaaaccatggctttcatgccgttgtgcagaatgggtccgccgcctcggagctttcgctgccgatgcgcaagactgcatcatggtccggggtcattgcggccccaccgaatacaaggttgcggcacgaatgttcgtgcgcgacaagcgagctcccctcgacccgtccatcccgaccacaacgagcgagctgccgtgctcgggtttgtcaaggtatggcctggcatcgccgagagcatgaggagatatctgagcgacggccaaccttgacaaaccctgcgcgcgacagcgtttggacactgtgggtcggggcgaagaaatggggattcaagtcgaacaaagaaattgagttgaaggaaaaaatcgcatgctgtgaattctctgcttgacttccaaggccccataca

SEQ ID NO: 7281 - DNA, 1439 bp, unidentified
  source 1..1439: mol_type = unassigned DNA; note = element_b4b544c
  misc_feature 1..2: note = core
  misc_feature 3..569: note = LE
  misc_feature 570..1424: note = CDS
  misc_feature 1425..1439: note = RE
  misc_feature 11..224: note = bridgeRNA
gtcctaccttccaagcgtgggtctgagctggtcattcgtaagatcggcggacccaggggtttcgggtatggctgtgagcttgtcgccgttggatggctcaaagaacttggccgcccggagccccgcgacgactcgaccgctaatggggatacgcgactcgatcgctgtgtaggacaacgtcggcgaggtcgtttgcgggatcagtgtgtgacgacgagctggcggaggtgacctgccccagatctgggccggagtggacatcggcaaggaacaccaccactgcgtggtggtcgacgagcggggcgaacgcctcctttcccgccgggtcttcaacgacgagtcggtcctgctggagctgatcgcggacgtcctcgcgctctccgaggacacgttgtgggcggtggacatcaatcacggcggtgccgccctgctcatcagcctcctgctcagccacgaacagccgatggtctacatcaccggcctcgccgtacaccaggcttcggccgcctaccgaggccagggcaagacggacgagaaggacgcgttcgtcaatcgccgaccaggcacgcatgcgcaaggacctcggtcttctgcgacccggcgacgagatagccgtcgacctgcggaccctgaccgcccgccgcctcgacctggtcaacgaccggacccgccagaccaaccgtcagtgggctcaactgctggagttcttccccgcgttggagcgtgcgctgaatctgagaagaagggcccggttgttctcctcaccagctaccaggtgccggcccgccatccgtcgcagcggggccacgcggatcggaacctggctgaggaaccgcaaggtgaagaacgcggccgcgctcgctgagacagctgtcgaggcagccagggcccagcacactgttctgcctggagaaaccctcgcggccgccatggtcgctcgcattgccaagggggtgctggccctcgacgaggagatcgccgaactcgacgcgctcatccaagcccggttcaacgagcaccgacacgcaacggtgatccggagcctgcccggcatgggcaccctcctcagcgtcgagttcatcgccgccaccggtggcgacctggatgccttcggcacggccgaccgcctcgcgtccttcgccggcctttcacccgtgccgcgggactccggtcgcgtcagtggcaacatgcgccgcccgcgccgctaccaccgcggcctgctccgtgccttctacctctccgcgatggccagcctgagaacctgctccgcctcccaggcttactacgggcgcaagcggaacgaggggaaggggcacaagcaggccctgctcgctctggcccgccgacgagccaacgtcttgtgggccatgctccgcgacggagagtgccatgaggccctaccaaccgtcacggcaccggcttgacatcgtcattgggaa

SEQ ID NO: 7282 - DNA, 1650 bp, unidentified
  source 1..1650: mol_type = unassigned DNA; note = element_b4bb2e0
  misc_feature 1..2: note = core
  misc_feature 3..295: note = LE
  misc_feature 296..1558: note = CDS
  misc_feature 1559..1650: note = RE
taatctccattccgcgcgccttcgggcgcggcacaaatagtaatgaaagtttttgaatcccctccagtttttgatacaatagattcaagaagctatactacaaagcacgggaggaggagtcgtaaaaactctcttcgttttagaccgcattttaatcagtgtaagcatcatcttttcaagcacaaataagtggctctataagaccgaacactaagaattgttttaactctttgttaaattgtgtgatggtgcagtcaatggcttcttcatcctatttagaaaggagtttttgaccatgaaagttgtttatcaaacctgttgtggcgtcgatgtccataaatcgtttctcgttgccacgattatcaaaactacctctggagttcaaccttcttatcataagaagcgtttctccaccttcaacaattcaatcttagaattcaagcaatggctgcttgataatcagtgtttcgatctttgcatggaatctaccggtaaatactgggtccctgtttttaacctcttggaagacgatattaacgtcaccatcgccaatcccaaatgggtgaaggctgtcaaaggtaataaggatgacaccaaagattccaaatggattggggatttatttcgattaggtttagttccgggtagttatatccctttccgggatattcgcattttgcgtgaattcactagatatcgctacaagctcgtttcctgccgctccagcgaaaagaatcggtatcagaatgctcttactgtttgtaatatcgcattagattctgttgtttccgatgtctttgggaagtcagctacctctgttcttgactacctaatcgagcaatccgacaattccatcaaccatgaagaaatttcttccagactcctccgttcacttaagaagaagtctgacagtgtctttgaatccatcgaagggtatcagatgactgactcccaaaaagatcggatgcgcctcgtccgcgcacacatagattatatcacatctactgtaattgatatagacactaagcttgatgaattagttgctccctatgaaaatgcaatccagttactgagtaccattccggggattaaacgtaatagtgcaatcactatcatttccgaaattggtactgatatgactcagttttcctcttccaaacgaatatgtgcctgggccggactaactccgggcagcaatgactctgctggtaagaaaaaatccgtcagaattacacgtgccggcgtctacctcaaacctgcattagtacaatgtgctcatgcagccgtgaaatctgataaatctccttactacaagcaaaagtacgaacgcattatgaagcgaagaggtaagaaacgagccatcattgcaattgccagaatgattcttactgcgatttaccaaatgctaaaaactggtgaagtctggaatcctactgacttatacaaaatcgatatgcctgaacctttgaaagaaaaacaaaaagcaaaggcaatcaagcaagcattgaaacttcttataagtgagggaatcattcccgaatcgttagaagcttcttaaaatgaacataattctttgaatattttttcgctattcttggatagcttgtttaagtgcgccattttctggctgtccacgactttctttcacac

SEQ ID NO: 7283 - DNA, 1321 bp, unidentified
  source 1..1321: mol_type = unassigned DNA; note = element_b4bfad0
  misc_feature 1: note = core
  misc_feature 2..250: note = LE
  misc_feature 251..1315: note = CDS
  misc_feature 1316..1321: note = RE
  misc_feature 15..247: note = bridgeRNA
ctgtgagactggccgggtcggcgcatcggtgatgggctgatggtcggcagcagtgggcgtgactcttcgcctgactggcttcgtgccttggacctgacttgtccgtctgctgtctgccggcaccggcccggccggagacgttggcctgatcaggagcttgaccgccagtagcagctggcgtgtctcatcacagtcctgccatctccgcactggaccgggccgtcacgtcccaccggtcaagggagaacgcatgtccatgctggcagatctggtcgaggtcgtcatcggcgtcgacacccacagccaaacccataccgcggcggtcgtcgaggccggcactggcggggtgttggcccgtgtgaccgtcaccgccgatccggacggatacgccgaactggtcgccctggctgagcagtactccgggctgcgggcctgggcgatggagggcaccggcggctacggcgctggcctggctcggcacctggcggccaggcaggagatggtcgtcgaactcgaccggcccaagcggccggcccggcgggccggagccaagtccgatccgatcgacgccgagcgcgctgcccgcgacgcactggcccgcacccggctggcccagcccaagtccggcgccgagcgcgccgccctgcagatgcgtctgacggcccgacgggcggcggtggaggcggccggcactgcccagcggcagctgctagcgatggtcatcaccgctccggagccagtgcgcgcccgattccgcggccagagcacccgcggcatgatcgctaccgcggccacactgcgcccacgcgcgagtagcgccgacgtcgaggccctcaccgcgctgagcgtccttcgcgacctggcccgccgcgtccgcttcctgcaagccgaggcactcgagcacgagaaggccatccgcaccatcgtgcggacctggcgtccagacctgctcgaactgactggagtcggcccgatcgtggccgcgaccgtcctggccgcctggtcccaccccagccgctgccgcaatgaggcagccttcgccatgctcgccggcgtcgcccccatcccggcatcctcgggcaagaccgtgcgccaccgactcaaccgctccggcgaccgccaactgaaccgagccctgcacaccgtcgtactcacccgactgcaacgagacgaacgcacccgcgcctacgccgaacgccgccgcagccacggcaagaccgaccgcgaaatcaaacgctgcctcaagcgctacatcgcccgagagctctaccgacacctcgaatcaccaccccaacgacggcttgacgcgtcataggagcgt

SEQ ID NO: 7284 - DNA, 1385 bp, unidentified
  source 1..1385: mol_type = unassigned DNA; note = element_b4ce6b2
  misc_feature 1..2: note = core
  misc_feature 3..87: note = LE
  misc_feature 88..1023: note = CDS
  misc_feature 1024..1385: note = RE
  misc_feature 1161..1380: note = bridgeRNA
ataatgagatggacgctccagattttacggtatcaaagtaccagactggatcgttgcaatacgtcctgaaaaattaggagcgtccacatgaaagtatcaactcttggtatcgacctggcaaagaacgtttttcagcttcatggtgtcgatcatgaaggccatactattttgcgtaaaaagctcacccgggctaagtttgttcagtttgtgattcaactggaaccttgtctgattggcatggaagcctgctcatccagtcattattttgcgcgattattcacccgctatggtcatgaggtaaaactcatacctccgcagtatgtgaagccttatgtgaaaacgaacaagacggatgcagcagatgctgaagcaatctgcgaagcggtaacccgtccgaatatgcgttttgttcagataaaaaccgaagagcagcaggccgttttagcgttacacactgaacggggaatacttatccgtgagcggattgcctgtgccaatagtttaagagccacacttgctgagtttggtattacgattgcggccggacaaaaccatttaacccgtgagctgccagccattctggaggatggcgaaaatggtttatctccctttgtcagaaccagcatctacagacagtctaaacatatccgggaacttgaagaacaagttaaacaggtagaagaagctctggcctcctggtatagaacgcaggaagcctgccagagaatggccaagatcccgggggttggcatgctaacggccacttatgtggtagcagcagtgggtaatgcccgacaattcagtaccgcaaagcagttcgcttcatggctggggctgacaccaaaggaacattccagcggcgggaaacacaactgggagggatcagcaaacgtggagatggatatttccgatacctgctggttcacggcgcacgcgcacttaccgcctgggtcaaccgaaacggcgcggttgaggagaattcctggcttcagggactccttgagcggaagcactacaatgtagctgttgtcgccatggcggcaaaaacagcgaggatcatgtggtcaatattgtcacacaatactgaatatcaacctcggcagctcgcctgacacaaggtcagtcaatctgacgaggtgctgaaaaaaagttaacgtcctggtaggtgcaggtgacttcagaagatggcaaaacaggtaagaccgcaggcaggatacaccgagaggtaacaagggcaagttagcccgcagaggatgattggtacctgcctggcggatttcatcatggttcgggataaaaatcccatcagaaaccggatatatggctgcacctacccgttttattacataactgaagaaagcattgcattccgggagcgtccatat

SEQ ID NO: 7285 - DNA, 1324 bp, unidentified
  source 1..1324: mol_type = unassigned DNA; note = element_b4cf279
  misc_feature 1..3: note = core
  misc_feature 4..73: note = LE
  misc_feature 74..1114: note = CDS
  misc_feature 1115..1324: note = RE
  misc_feature 1123..1309: note = bridgeRNA
agatgtatggactccctcccagcaatgggattaaggttataagcgcctaaaccaaaacccaggagcccatacaatgaagaagcttaacgtgattgccatagatttagcaaaaaatgtttttcaggtttgtaaaaccgattatttaggtacggtgttttttaacaaaacaatgagccgcaatgcgttaaaagagcttttagtgaaagaaaaagtgtcggttgtagccatggagtcttgttctggtgctcattactttgcgcggcatgctaaagaaaacggacatacagtgaaatctatttcagcccgcagtgtgaaggcctttcgccaagggcagaaaaccgatgccaatgatgcactggcaatcgcagtggcagcaaggcagcctcacataaagttaagccgtgtagttacattagaagagcaatgtctccaaagcatggaatgcatgagagacttgttggtcaaacaaaaggttagtctgagcaaccagctccgcagcattctgcttgaccttggttatgctatccctcaaggagatagtcagttaaagcagtcaatacccggaatcctggaagatgcagaaaatgatttatcaataccatttcgttctgttttatcctgtttgtggcagcgtttcttgaaaacgattgaagagattgcggacgtggaaaaaaccctgtttcgtgaagttaggcaagacgagacttgtcaacgcttacaagccttggaaggtgtggggccggtaggagctatcgctttgaggatagttttgagtaatccggagcattttaaaaatggacgagaggcatcagcttgtgttggcgtcacgcctgttcagcatagtagcggcggcaaagaaaagattgggtcgatatcgagattatctgggcataacaaattacgtagtcacttatttaaaggggcactggcggtgataagaagtcttgagaaacgtccctgtagaacaccaaaagaggtatggctaaaagacttggtcgcgagacgaggtaaaaaagttgcagcgattgctttggcgaacaaaaacgtacggacagcttatgcgttaataaagcaaaacaaagagtataagccgcaattattaatagcggcataagtcttgtcaaagagagcgaaaatataaacaggtaagaccgaccttccagagactgatagggtctgaagtgttcaacactgcgcaacagaatagtcaggaaggtgcgaaaacatcagtggccagaggtagctcctcaattagagcccgtatataagagcgcatcctgcatgtttatagagttctcattgacaataaacgggagtccatata

SEQ ID NO: 7286 - DNA, 1416 bp, unidentified
  source 1..1416: mol_type = unassigned DNA; note = element_b4d00ee
  misc_feature 1: note = core
  misc_feature 2..275: note = LE
  misc_feature 276..1100: note = CDS
  misc_feature 1101..1416: note = RE
  misc_feature 1183..1407: note = bridgeRNA
taatgagatggtccgccgccgagtaggatttggctcggcagtattacatcaggaggatcatcacatgcaaatcgcatccattggcatcgatctgggcaagaccacctttcacctggttgcattaggagagcggaacaaggttctggttcgcaaaaagttctcccgtgcgccgctgctaacgtataccgcgaaacctgcccgcatcgctgatcgggcttgaagcctgtgccggagcgcacttcctgggcagcgccttgcgagcacaggggcatcaagtgcgcctcatccctgcgcagttcgtcaaaccctaccgcaagtcgaacaagaacgacttcattgatgccgaagcgatcgccgaagccgtgaccaagcagaacatgcgctttgtgcagatcaaaacgcaggagcaactcgattggcaggccatgcaccgtgtgcgcgaccgactgatgcagcgtcgcacggcgctgatcaacgagatccgcggattcctgctggaacgcggcctcaccttcgcggcgcggcccatctacctgcgcaagaacctaccaacagtgattgaagatgccgagcagaatctgagcccgcgcctgcgctggctgctggatcggctgtggcaggagtggaagcaaacggagatagacattaaggcgatcacagacgagatcgagcgcattagtaacgacgatgcgcgttgccggcgactgcgccaaattcccggctttggcccgctggtctccaccgcaaccgtggccgccatcggcaacggagctgcttttcgccggggacgtgacttcgcggcctgggttggcgtggtgccacggcagtactccaccgggggcaagcagaagctgttcggcatcagcaagcgcggcaacatctatctacgtcgcatgctgatccacggtgcccgcgcggtactgcttcgcgtcaagtacgacacaggaggattcgggcagtgggtgcatcggctggctcagcgtgctccgcgcaacaaagtcgtggtcgcgatcgccaacaagctggcgcgcatggcctgggctgtgttgtccagcggccaagagtatcgacatcagccgctgcagccggcggccgcttgatggccgtggaaaagacgctgcgcttggaaagcacagaacgctttccactttcccaccgccacgacgacgaagattgagaaagttccaccaaggtctgctgaggagagaaggagacgaaagaacagtccaacggcgtgccggaaaacctggacactcaaacgcgtccctggtgaccgagggatttaaaaggaccggcacgtgcggatcatcatcaagtgcccggagagcgattctccactaagaggccggatacatttacgcagactgtcccttcgactaacttcaaacctcttgcagtccggcggcggaccataca

SEQ ID NO: 7287 - DNA, 1394 bp, unidentified
  source 1..1394: mol_type = unassigned DNA; note = element_b4dc62d
  misc_feature 1..3: note = core
  misc_feature 4..124: note = LE
  misc_feature 125..1141: note = CDS
  misc_feature 1142..1394: note = RE
  misc_feature 1160..1392: note = bridgeRNA
agatggaatggtcgcctcccgccttagcggtcatctgaaggccgccgtctggacgccaatatcctggcgcgggcgatgtgcaacagtatcgtttccgcaaggtcatgcggtaaggagaaaccagatggaacccacaaccattgccatcgatttggccaaacgcgtattccagatccatttcgttgaaccgggaactggcgtaatccacagtaaggccctgaagcgcgcccagctcacgccgttctttgccaaccgtgcccaatgccggattgtgatggaggcttgtggaagcgcgcatcactgggcccgacagcttgcggcgctcggccacgatgtccggttaattgcagcgcagttcgtccgtccattcgtcaaatccaacaagaacgatgctgcggatgctgcagcaatctgggaggcagctcaacgacccggtatgcggttcgtcgccatcaaatcggaggatcagcaggccatgcttgctttacaccggatgcgccagcaactcgtgagattccgcgtgatgcaggtgaaccagttgcgcggcctgctgtacgagtttggcgtgatcctgccgcaaggccggcgtgcctcaattgacgcggccaaagcatcgctcgcatcgatcgccgatcaagtgccagccatgttaatcgacagtctgcaagatcagctatcaaggctgttagccctcgacgagcagatcctgcacatcgaacaacgcatcactgaatggcgtcgcggcgacgaagcatgccgtcgcatctccgagattccgggtgtcggtctgttgactgcaacggctgcagttgccgtcatcggtaacgcacacgcgttcaggtccgggcgagaattcgccgcctacctcgggctggtaccgagacagaatggctccggtggcaaggtcaagctgggcggcatcagcaaacgcggcgacgtctatttacgcacgttgctgatccacggcgcccgatccgtcatatcgagttcaaaacatctgcctgaacggatgcgaagcatgcttgcccgacgacccacgaacgtcgtggctgtcgcactggcgaacaaggttgcgcgaataatctgggcattgcttgcatacggtcgaacgtatcagtgtcctacggctgcgccagcctgaaaatgcgttgtagttgatacaaacccactcacggttgcattggtgatgttgaacgatggcaagacaggttggaccgcgcaaaggcaagcctgagacatttctcggacttcgagtccgttatttagattaggaactttgcggcgaaatccatcggggccggcgggtatgttccgcaatcgagtccggatataagtccgcaaccaccctcctcgccaacaacgatatctccttgcaaatgggaggcgaccatata

SEQ ID NO: 7288 - DNA, 1357 bp, unidentified
  source 1..1357: mol_type = unassigned DNA; note = element_b4e018c
  misc_feature 1: note = core
  misc_feature 2..71: note = LE
  misc_feature 72..1100: note = CDS
  misc_feature 1101..1357: note = RE
  misc_feature 1103..1347: note = bridgeRNA
tatgggatggcccgcccctctacccggcagcgtaggctgagccgggcaatcggagggaaaggagcgttccaatgaagatcgcggttctcgggatcgacttggggaagaccagctgcagcgtggttggtctggacggcaccggacacgtcgtcatgcggcgacggatgcatcgagacagcgtgatcaagttcgcctccggcatggcgccttgcgtggtggcgatggaagcctgctgtggtgctcaccatcttggtcgcatagtgcgtgaccatgggcatcaggtccggctgatgtcgccggaatatgttcggccatacgtgaaggcgcagaagaacgatgaccgggatgcagaagcgattgccgaagcggcgacgcggccgacgatgcgcttcgtcgagttgaagagtgccgagcaactcgacatgcagtccctccatcgcgtccgggaccggctggtcggcgaacggaccgcattgataaatcagctgcgcgccgtgttgatggagcgtggtatcaccgtcccgcaagggcgccgcaagctcgagcaacatctggcggtgctcctggacggcgaggagctgcgattgagcccacgagtgcgctcgttggtcgaggacatgcgagcggaatggggagcgctggaccgtcgtatcgaggcattcgacgatgagttcgccgcccgggccaagaccgacgatgctgctcgccgcctggcaaccatccctgggatcggtgtgctgaatgcgacggctctggcggcagctgtcggcaatgctgcctcgttcgcccgtgggcgcgacctcgctgcctggctcggcctggtgccgcggcagatgacgaccggcggaaagccacggctgatggggatcagcaaacgtggcaacaaatacttgcgcaagctgctggtgcatggcgctcggggagccttgccttcgctgtcggcgagcacgacaccgctcgggaaatggctgaaggatctcctgcagcgggcgcacaagaacacggtcattgtcgcactggcgaacaagctggcgcggatcgtctgggcggtgctgcgccatggcggaacatatgatgccgctgcgctgacggtggcctgattgggatcaccgaacgtgctgacacgcgcgggcggctgacgatgtctgtggggggtggaagcgagatggcctgacagttcaaccggcgttctggcaacctgtctttaaaaatggcgctctgacgccgtcagttttatgaggaccgggacgcgcggatctccatcttggccagggctgtgcccataggccggatacgttgatgcagactggtcagatcagatcgccaaaaactgcttgcggacggggcgggccatacg

SEQ ID NO: 7289 - DNA, 1545 bp, unidentified
  source 1..1545: mol_type = unassigned DNA; note = element_b4e5199
  misc_feature 1..3: note = core
  misc_feature 4..206: note = LE
  misc_feature 207..1430: note = CDS
  misc_feature 1431..1545: note = RE
  misc_feature 8..223: note = bridgeRNA
tttcgtattattaggtcaaccggaatttctggttggcctatttgtgtaggtatactaagatggtggtagccgggagtacatgcggcttttagggggaaaaccccggaataaaaactgttctcccaccacccccaatgaccatgtttgagctggttgggacattgaagatcccgtatcacatgcgaagctatgggtttggagccatcgtgggagtgccggcgagtatcattaaggagggtattatggaaccggtaataggaatggatgtatcaaaaggaagcagtgtcattcaagcctttttagggagaaatgaaccctatggaaaagcgaaacagatttatcataacgagcaagggtttgagtggctcagcgttttgtgtgcagaattaaaaacaaggacagaagcggagccggtagttataatggaggctacggggcattatcaccgaggggtcgtttgttacctgattcagaaggacattcgtcatattattcttaatccgctacagtccaagcgagcaaaaggaatggggcttcgtaaggtaaagaccgatgaggcagatgcatggagcttggccgaaatgttttacagaggagatgctttgccacaccgaatctgggatgagtcgtacatggaacttcaacacgctacccgccagcatgagtttgttacatcgttatatgtgcaagccaaactcaacactagggcactgttagatcaagtaattccagcttatgaaggagtgtttagtgacctgtactcggctacatcactacaagtgttgcagagctgtctgcaaggacaaatggataaggcggagattatagagaaagtcctaataaaatatgctggaagatctcgcagtcaaagctggataagagagaagtcgatacgaatagaagagatattaggcaagtggaaggaagagaggacaagtccttctcaaacggaagcgctgaaagggatgattacgctacttctaacatttcaagcccaattgaagcagttagaacagcaaatggaggagatatctgttcagctaccagaagtggatttattgaaatccattcctggaattggagaaaagctggcagcggctatagtggccgagataggagatataaagcagtttagacatgctaagcagctggtagcttatgcgggactagatccgagtgtgcatagttcagggaaatttacagctagcagtaaccgaataacgaagcgcgggtcaaaacgtctgcgtagatcgttatatctagcggtgcagtgtggacttcggcaaggaaataacagacggttagcatcgtactatgagcgaaaaaagaaagaaggcaagccctataaggtaacagtgatcgcttgcgccaacaagctattgcatcacatttacgctatcttgaatagaggccagccttaccaaacataaaacttattcaattctaaaaaactccacggcaatggagtttttttgccatgctcaaaaaccagtatatcagtatttcattaaatcaccaagggatagcttgacaaacattagctgg

SEQ ID NO: 7290 - DNA, 1218 bp, unidentified
  source 1..1218: mol_type = unassigned DNA; note = element_b4ec7fb
  misc_feature 1..3: note = core
  misc_feature 4..199: note = LE
  misc_feature 200..1192: note = CDS
  misc_feature 1193..1218: note = RE
  misc_feature 19..185: note = bridgeRNA
tacctttactttgaccttattaattttaacaagagaagagaggagaactctaacggtctttaggcattaccttttatacgtaatagtcctctcagtctcttgtaggatgcttagttgaactacttggaatacctagcttaaaaagctcattaaaggaaatagttgccaagcatcaataatcattaatatttataaaagtatgaaaaatgtaagagaagtagtaggtatcgatgtatcaaaaaatacattagatgcaactctatatcacattaagcaacatgctgtatttacaaatgatgataagggttatgctcaattattatcatgggtttctgatcaattagaagttagtagttattttttcatttttgaaaatacgggtaattactcactaaagctttctgtatttctaagctcaaaggacttggtttatgtagaagaaagtcccatgcgtataaaacgtagtaccggtcttactagagagaagacagataagttagactcttatatgattgccagatatggttggatgtatagagaagaactggaacctagtaagataaagccaaaggaatttcaggaactaggaagacttttgtcattgagagatcaattagtaagagatcgcagtggattgaagtcgactttaaaagagcaaaagcacttgttatcaagtccgtcaacagatagttgctgtaaactgctagagcgcagtatcaagcatatagacaaacaggtccaacatatagagcgacgtatgaaggagctgcttgaaacagatgatagtttacaaacaaattataatttgttaagatcggtaaaaggagtaggattgatactaagttgccaactgctgtatcataccagtaattttgtgaaattcaacaactggcgtagcttttcgagttattgtggaatagcgccatttgaatacagttcgggcagctctatccggcgcagaaaacagagtcattatataggggataggaagatgaagactttattaagtatggcggccgtttcagcaattcaatcagaccaagaattaagaaattattaccatcgtaaactcgaagaagggaagcataaaatgatagcattaaacaacgtgagaaacaagattttagcacgcagttttgctgttatcaaaagaggtacaccattcgttaatatagctgcaacaaattattgattaaaagcttgttttttaccttggaa

SEQ ID NO: 7291 - DNA, 1440 bp, unidentified
  source 1..1440: mol_type = unassigned DNA; note = element_b4ec90e
  misc_feature 1: note = core
  misc_feature 2..230: note = LE
  misc_feature 231..1427: note = CDS
  misc_feature 1428..1440: note = RE
  misc_feature 13..232: note = bridgeRNA
ctactaggagactttccgcaggatcggtgtctggccagactctgatctaggtgatcggcgggacgctctcattcgcggctgcccacccgctcttgggtgtggctctcatctggaatgcgacccgtcgttcaccgtgacgaggcgtggctcaagaggggtctgcccagctcgtagtagcactgcccacctcgccgtccgagtggatgccagaacacagatgaggtgagtagatgagcaagacgaagggcgagatcatcggggtcgacccccacaagatgtcggtgacgatcgaggtcgtcgacacccacgaacggctcctcggcagcggacggtttgagaccaccaacgccgggtacgccgcgatgcagcggtacgtgaagcagtggcccgaccgactctgggccgtcgagggagccaacggcgccggtcgtccactggcccaacgactcgtcgccgccggcgagcaggtcgtcgacgtgccagccaagctcgccgcacgcgtgcggctcttcgacaccggccacaaccgcaagaccgacgccctggacgcccactccatcgcggtcgtcgcggtccgcaccgagggcctgcgggtgctggtcgaggacggtgagctcgaagccttgcggatgctcaccgaccgccgcgacgagctcgcccaccaacgagtccagaccgtcaaccggctacaacgactcctcagcgaactactgcctggccagcgcaaacgcgacctgtccgccgcccaggccaaggcgatgctcgtcaccgtgcgaccccgtgacatcgccggcaagacccgccgccggatggccgccgaagagatagccgacctggtcgcagtcgacgccaagctcaagaagatcaaggccgagctggaggccgcggtcaccgcccgcgggtcgcacctgatggacatctacggcatcggaccggcaggcgcggcccgcgtgctggccgacgtcggcgacgtagcccggttcgccgaccgcaaccggttcgcgtcctggaccggcaccgcgccactggacgcctcctcaggcgagcaagcccgccaccggttatcgcgggccgggaatcggcggatgaaccacgtcctgcacgtcgccgcgatcgtgcagatccgccacgacaccaaaggccgcgcctactaccgccgcaagctcgccgccggcaagacaccgatggaagcactgcgctgcctcaaacgccgcctgtccgacgtcgtctaccgccagctcatcgccgacgctcaacagcaggatggagcggatccgggagggcactgcggagcggctcttcaatccagcgcggtcgactcgcacccgctcatcgacacttcggatcagccacttcccggacccgcgaacccgacgctacgcccagagagcgaccccgtgaagaacctcgttccaagcacccgttgacacagaggggtgc

SEQ ID NO: 7292 - DNA, 1409 bp, unidentified
  source 1..1409: mol_type = unassigned DNA; note = element_b4fdd7f
  misc_feature 1: note = core
  misc_feature 2..92: note = LE
  misc_feature 93..1139: note = CDS
  misc_feature 1140..1409: note = RE
  misc_feature 1173..1401: note = bridgeRNA
caatgggatggactcctcctcaccctaccagttcggcgtcgatgcgccagaatggtaaaaccaaccattcagaggatgaggagaagcccaacatgaacattacgcgagtcggtgtggatatcgcaaaatctgttttccatgtgcacggtgtagatcgccatgatcacactcagtggcaggcaaagctcaagcgtgatcggtggctggatgcactctgcgaccgcgttgccccaggggcggagattggcatggaggcctgtgcctcagcacactattggggacgagaactgcagaagcggggatacatcgtcaagctaatcgctgctcaattcgtcaagccgtacgtgaagagtaacaagaatgaccgcgtcgacgccgaggccatctgcgaagccatgagtcgacccgggatgaggtttgttgccgtcaagactgtcgaacagcaggatatccaggcagcccatcggatacgggaagaactggtgggtcagcggacggccaaggcaaaccagatccgagggcttgtcggcgaatacggcattatcgcgccagttggcatcaacaaactgcgccaggcattgccccaatggcttgaggatgcagagaacggcttgaccgacgattttcgggccctgctgttcgatctggcagaggacttgcgacagcttgatcgtcggatcgccaaccttgatgaccgaattacacagactgtcaaaaccgaaccggtagcgcggcgcttgctggaactgcgcggtgttggcccactcactgccagtgcccttgccggggcgctcggcgacggcagggcattcgggaaagggcgtgatttcgccgcttctctgggtctcacgccgcgccagcacagcactggcggcaaagaccgactgttgggtatcagcaaacgcggcgacagttacctgaggaagttgctggtgcacggtgcgagggcagtgatccggcatgcgaaggatcgggatgatggactgagccagtggctgaatcagttggtcgcgcgtaaacacgccaatgtcgctacggtcgcgttagcaaacaagacggcgcggatagcatgggcgattgtacacaacgagagcagttatgaaccgatgcttgcggcatcacattccgtcagtcaatagctagcgggattacggaggtcaataggagaacgttccaccacgattgcagagcatgatgtttgatggcgaacaggttgaaccgacgatgggatacccctactgagcggagagcgtgagagctcgtgtaagcgtttgggaaccatcgtgcgaatagcccatcagggtccgatgcctacgataacggcatcatcaatgagaccggatacacgtaggcagtcgtaccttgacgcgatcgggcaaagtgcttgcaaacgaggaggagtccataca

SEQ ID NO: 7293 - DNA, 1498 bp, unidentified
  source 1..1498: mol_type = unassigned DNA; note = element_b51574b
  misc_feature 1..2: note = core
  misc_feature 3..254: note = LE
  misc_feature 255..1478: note = CDS
  misc_feature 1479..1498: note = RE
  misc_feature 7..248: note = bridgeRNA
ctaatgagatgtagcgggccagtccgatcgggcagactcgctgccggtagcggctggcgggtgagcactgtttgggcccccaggacctcgagtcctgaaaaaagatcgtgtccccgccggtcgaccgggaggatggatcgctgatgggatgtcgtgcccgccgcagcggcgtgagcactttttcattagggcgccgagagttctcccgaacgctgccgatgtcatgacatcgtttgaggacaggagaattcgagttgctgttcgtcggtgacgactgggcagaagaccaccacgacgtcgagttgatgaacccggccgggaagcggatggcccgagcccggctgcccgaaggggtcgacgggatcgcacgatttcacgcgctgatagccgagcactccggcaccgacacccatgccgctgatgtcgtggtcgggatcgagaccgaccgtggaccgtgggtcgcggcgctgatcgccgccggatactcggtgttcgcggtcaatcccctgcaggcggcccgctatcggcagcggcacgcggtctccggcgccaagagtgacccggctgatgcgcacgtgctggctgatgtggtgcgcaccgactcccaccagctgcggccggtcgctgccgacagcgcggaggtcgaggcattgaaagtggttgcgcgtgcgcacaagacgctgatctgggaacgcacccgccatgttcaacggttgcggcacgcactgcgtgagtatttcccagccgcgctggaagccttcgatgatctcaccgcgcccgacgccctggaactgctcggtaaggcaccggatccggtgtcggcggcgcggttgtcgctcaaccagatccgcgcagcgctcacccgcgcccgccgccgcgacgtcgaggccaaagccgcccgcattcaggcagtgttgcgcagcgagcacctacgacgcgacgcggtgatcgacaccgcctacgcggccaccacacgagcgtcggtcagtgtgctcatcaccctgcgcgaacagatcaccgcactgcaagggcaggccgaggcgcattttggccggcacccggacgctgagatcgtcctgtcccaacccgggatgggcgtgattctcggcgccggggtgcttgccgagttcggagacgcccatgatcgttatgcctcggcgaaggctcgcaagaactacgccggcaccagcccgatcacccgagcctcgggcaagaagaagatcgtcgcagtacggttcgtgcacaacgaccggctcatcgacgccctcctccgccaggcgttcagcgccctgaccgtctcgccgggtgcgcgtgcctactacgacaaacaccgcgcccgcggcctcgaacaccaggccgcgctgcgccagctggccaaccgccttgtcggcatcctccacggctgtctcaagacgcgaacggtctacgacgaagccgccgcgtggtccccacacaccgagaaagcgaccgccgcttgacacccaagcccctgggatgt

SEQ ID NO: 7294 - DNA, 1432 bp, unidentified
  source 1..1432: mol_type = unassigned DNA; note = element_b51eb84
  misc_feature 1..2: note = core
  misc_feature 3..123: note = LE
  misc_feature 124..1140: note = CDS
  misc_feature 1141..1432: note = RE
  misc_feature 1210..1431: note = bridgeRNA
agaataatatgaacgcctccactaaagcgtcaggggcggttatctgaaaggatggatacccctggtcacggcatcgtgtgccaaaatggtcgttattaacgacagacagcaggggtatccgagatgaagcttaatgtattcggcgttgatattgcaaaagatgtttttcaaatccactgggtagacaaagcaggcaaagcgcgctcagagaaggtgaaacgacagcactttttggagtggttcagcaataagacgccatccctgattgccatggaagcctgcagtggtgcgcatcactggggccgctgttttcagcagatggggcaccaggtacggttaattgctgcccataaagtcaaaccctttgttattggcaataagaatgacatggtcgatgctcaggcgatttggaccgcagtacagcaaccccagatgcgttttgtggcagtaaaaagtgttgagcagcaagcagcactcgcggcacaccggatgcgcgagtatctgataaaaacccgtacgggtagcatcaatgcagtaagaggctttttggctgagtttggactggtcatagcgaaaggcagagcggcttttaaacgtgagatagccggctgcctggagacgttatcacaaagtgtccccaaggaattcgttgaccggttatatgagcgcctggcctatatcaacaaactggatgaggatattgccgggttagagcagcacattacggcttactttaagcgttgcccgcaatgtcagcggctgggtaaggtgccgggtattggcgtattaagtgcgacggctattgttgccaccgtaggtgatgtcagccagtttaaatcaggacgtgagctctccgcgtggttgggcttagtgccgaaacaaaccggctcaggcggcaaagtaaagcttcatggtattagcaaacggggcgatacctatgtgcggaccttattggtacacggcgcccgctcggccatcacacataataaacatccaagtgagtggttgcaggggctccttattcgtaggccaaagaatgtggtccttctggcgttagccaataaaacagccagagttgtttgggcattgttaagcaaagacgtcgagtacgacgagaacctgtattcacaggtgagttaatcgaagccggttaaccataatgattaacgataaatgatgtaaaactgtttagcgcgaaaacgttcgcaactgtttgtcagggcgcctgacgtgtgatgaaaattggtaagaccatactttagaagcctggccccacgagaggtttagataccgtccggagtgtaaggactaaagtcgcggaaatcattagggtcagcgggggcgcgccccgcattaataagaccggatatagtgccgcagcccatccaaactcagcacacgttaaaaacccttgcaaaggaggcgttcatat

SEQ ID NO: 7295 - DNA, 1642 bp, unidentified
  source 1..1642: mol_type = unassigned DNA; note = element_b5201d8
  misc_feature 1..2: note = core
  misc_feature 3..292: note = LE
  misc_feature 293..1477: note = CDS
  misc_feature 1478..1642: note = RE
  misc_feature 59..271: note = bridgeRNA
ctggtatattgtaattgactcatttaataagtcacttacaaatatactttcctttctatcaacctttataaccgtggttgattacggtctagtttatttgtaaaattgaaatatgtgtttgtggatttgtattttttcctgtggctttgactactttaaggaggttcttaccacaccttattcctaaacaatgattagttagatgagtcttgaattcctattttgaaccaggttttgcagattaagtgtttgtggataccacatcacatttttttagaaaggatgtagtaatatgttaactgtcggaattgacgcaggcaagctttctcattatttcgctatcgttaatacaaacgatggagaggtcttgatagaacctactaaattcaaaaacaataaacaaggttttgacaccttacttcaatcgcttaaaaagttgtctaaagaggaccttttgatcggtatagaggatactggacattatcactttgccttactgaaatttctgttagacaatgattacactgtcgctcttatcaaccctgttaccactgacctaactcgtaaactacaaggtggtatctcaaaaaatgataaattggattctttaaccctatgtgatgttctatcttccaattctcgtaaaaagccatatcgtatcaccaaagtcaatacctttgacctttatgaacaaaagcagcttaccagacatcatcacaatctaaaagaagaattaaatgttcactcaaatcgtttacagaaatgtattgatatcgtcttccctgaattcaacagcctattcaaatcaaaatatggtgctgtttatatgaatatcttaaggactttcacaagtgctgacaagattgcccattctgacattcgttccattcgtaaatgtttcgagatacagggcagaggcaatcgcatatccttgacagcggaagaactaaaagaagcagccaagaattctattgggataccatctgtcgcagatgaacttcaaatcaaacatcttgttttccaaatagaactcatcaaagaacaaatcgctgaaatagataaaaaaatagaagagttctccgctaaaaacaactctcctattctcaccatcccagggatatcacatttctctggtacttctattttagccgaattaggagatatacgcaactactcaaaagcatctaaaatcataaaatttgcaggagtggctccttatgaatatgaatccagtcaatttagggcggagcatacagcaatagccaagaaaggatcaaagtatttacgaaagacactatatcagataattcttccggtcattaatcataactctgtattcaaacagtactatagtttaaagatttctcagggaaagagtcatcgttgtgcacagggacactgcgttcgtaaacttttaagagtaatttatcatcttttaagtacgaatcaaaaatttgatccatctcttttgagataaagtacaagttcaaaaaatcgaacttcattgaagttgtttttgtcatgcctatattacaaatcactattcacattttcaaagatctaacaggataaactatactaaattctaatattttacattttcaaactttttcataaaaacacttgaaatttatatagttag

SEQ ID NO: 7296 - DNA, 1344 bp, unidentified
  source 1..1344: mol_type = unassigned DNA; note = element_b526b70
  misc_feature 1..2: note = core
  misc_feature 3..75: note = LE
  misc_feature 76..1089: note = CDS
  misc_feature 1090..1344: note = RE
  misc_feature 1062..1332: note = bridgeRNA
tgatggggtggacgccccccgacggcatcgatgtgccagagtggaggtgttgaacaccacaagagggaggcgtccgtgtctgaagttaccacaatcggtctggatattgccaagaacgtttttcatgcgcacggcgcggacaggaccgggcgaacggtgttcagccgcaagctgacccggggaaaactgctaaatttcttcgtgtcacagccgcgatgcacggtggcgctggaagcgtgcggcggcgcacatcactgggcccgcgagttgcgggcgatgggtcacgaggtcaggctgattccgccggcctatgtgaagccgttcgtgaagcggcataagaatgatgctgtcgatgctgaggcgatctgtgaggcggcgcagcggccaacgatgcggttcgtcgcggtgaagagcgaagagcagcaagccgccgccttggtgttccgcacgcgcgatctgctggtaaaacagcgcacccagctcggcaatgcgatccgcgggcatctcaccgaatatggctgggtggcaccgaaggggccgagccacctggcgatgctggcggatctgctagacgacagcgagatggccgcaacactgccggaggcggcgcgaccgatgttcgcgatgatggtcgatatgctagccgaactcgacaagcgggttgccgcattggacaagaagatcacccgccgtgctcgcgaggacgaggtggcgcgtcggctgatgacgatccctggcatcggtccgatcacggcgacggcgatcgcagcgatcgcgcctccggccgagacctttgcgaaggggcgcgactttgcggcatggctggggctcgtgcccaagcagaagctgggtgcgatctcgcgcatgggcgagcgaacgctcaggcggttgctgatcatcggcagcagtgcggtcgtgttgcaggcgagcaggcgcggtgcccccaagggctcgtggctcgagggcatgctcgcgcgaaagccgcgcatgctggtaacggtcgcgcttgccaacaaaaccgcccgcatcgtctgggcggtgctaaccaagcaagaggattacagagctccggtcgtagtcgcgacgtaagtcgaggcaggccagaggcgtcggagggcgcagtcggtcgaaggagggtatgccacaacagtcggcgagacggggccggaagaaccagatagacccatcgtgtccaagagcacgcgattatgaaatggttccggtccgcgaactcccatacaggccagcagcggcatcgctgcactacaggccggacagatggcagcatccgacacagtgtcagaacttccaaataccgcttgcaaccgaaggggcgtccacaga

SEQ ID NO: 7297 - DNA, 1366 bp, unidentified
  source 1..1366: mol_type = unassigned DNA; note = element_b52b3a0
  misc_feature 1..2: note = core
  misc_feature 3..75: note = LE
  misc_feature 76..1107: note = CDS
  misc_feature 1108..1366: note = RE
  misc_feature 1080..1354: note = bridgeRNA
tgatggggtggacgccccccggcggcatcgctgtgccagagtggtggtgttgagcaccaatcgagggaggcgtccgtgtcccaggttaccacgatcggcttggacatcgcgaagaacgtgtttcatgcgcatggtgcggatgcgcgtgggcagggcgtcttcagcaagcggctgagccgggcaaagcttctcggcttctttgcagcccagccgccctgcctggtggctctggaggcctgcggcggtgcccatcactgggcccgcgaactgatggcgctgggccatgaggtgcggctgatcccaccagcctacgtcaagccgttcgtgaagcgccacaagaacgatgccgttgatgctgaggcgatctgcgaggcggcgcagcgtccgacgatgcgctttgtcgccgtcaagagcgaggagcagcaggcctcggctctcctcttccggacccgcgaccttctggttcggcaacgcacccaactgatcaacgccctcagggggcatctcaccgagtatggctgggtcgcaccgaaaggcccgtcgcatatggcgatgctgggcgatcttctggaggacgagatgggctccttgcttccacctgccgctgtcgcgatgttccgggtgatgctgaacctcctggccgacctggatgaccgcatcgccgaactcgaccgggagattgcccgccgggctcgggaggacgagacggctcgtcggctgatgaccatccccggcatcggccccattaccgcaacggcactgattgccctggctcctgtggccgagaccttcgccaagggacgggacttcgccgcgtggctcggccttgcccccctgcaacggtcgacgggtggcaagcagaagctgggcgcgatctcgaagatgggcgaacgcacgttgcgacgtctcctcatcatcggcagcagtgcggtggtgcatcaggcgtcgcgacgcggagcgcctaaaggatcgtggctggaacagatgctggcgcgaaagccccgcatgctggtgacggtggcgctggccaacaagatggcgcgcatcgtctgggcccttctggcgaagggcggaagctaccgagctccggcggtggccacggcgtagagccggggtcggcgtcagaggctgtcggggacgcgaggtcggtcgaaggagggtatggcacaacagtcggcgagacggggccggaagaaccagtgctttccaccgtgccagcgagcacgctttgggtgacttggttccggtccgcgaactcccatacgggcccgcagccaaaagctgcagcagaggccggacagatggcagcaaccgacatcgtgcctacacaccaaaagccacttgcgttccagggggcgtccacaga

SEQ ID NO: 7298 - DNA, 1504 bp, unidentified
  source 1..1504: mol_type = unassigned DNA; note = element_b52d2ef
  misc_feature 1..2: note = core
  misc_feature 3..247: note = LE
  misc_feature 248..1483: note = CDS
  misc_feature 1484..1504: note = RE
  misc_feature 6..239: note = bridgeRNA
ctaatggggctcagcgggccgtaggagagactacggcccgtagccgccagcaggtgagcactccaaccgccgggacctgtacgagttctggtttgagaccgtgcccctgctggtcggccgggaggcctgacttctgatgggatggcgtgcccgccgggcggttgggcgtgagcactggatccattagggcgagagctgtgccttccgctggctgcgcgcaaggatcgtatgacagcgaagggttggggtgctggtgctgttcatcggcgacgactgggccgaagatcaccatgatgtcgaggtgcaggacgggacgggccaaaggctcgcaatctcccggctgccagagggcgttgaaggtatagcgaagctgcatgccctcatcggacggcacggcggcggggacctggaagccggacaggtggttgtcgggatcgagacggaccgcggtccgtgggtgcaggcgctgatcgctgccggctaccgggtctatgcggtgaatccgaagcaggccgcccggttcaaggagcggtacggcacctccggggcgaagagcgaccggggcgacgcacacgcgctggcggacatggtccgtatcgaccgcgaccagctgcggccgatcgccggggacagcgaccaggcccaggctgtgcgggtcgttgcccgcgctcaccagacgctgatctgggagcgcacccgcaccttccagaggctgcggagcacgctgcgcgagtacttccccggcgcgctgactgcctacgccggcttggaactgaccagcaccgacgcgatggaactgctgatcaaggcccccacgcccgaagaggcggtcaagctgacgaagccgcagatcaccgcggtcctggccagacaccgccgccgcaaccgggaccagcgggccgtcgcgatccaggccgcgctgcgcgagccccagctcgggcttcccacgcctgtgaccgtcgcctacggcgcggcggtggtcgcgcacgcgaggctgctgatcgcgctgaacgagcagatacaggcgctggaagagcaggtgagcgcgcattttctcgcgcacccggacgctgagatctacctgtcgatgcccggcatcggcgagatcaccggcgcccgggtgctggccgagttcggcgacgaccccagccgctacacctccgccaaggcccgcaagaactacgccggcacaagccccgtcacccgcgcctccggcaagcagcacaccgtccaggcccgctacgtgcgcaacgaccggctcgccgacgccctccacaagcaagccttctccgccctcaacacctcgcccggcgcacgccgctactacgacaagcagcgcgcccgagacgccggctacaaccccgccctccggcagctcggcaaccgtctcgtcggcattctccacggttgcctcaagacccgcacgctctacgatgaggccaccgcgtggtcacaccacgcaaccctcgccgctgccgcttgacatctcaacgccatgggatgt

SEQ ID NO: 7299 - DNA, 1327 bp, unidentified
  source 1..1327: mol_type = unassigned DNA; note = element_b534731
  misc_feature 1..2: note = core
  misc_feature 3..252: note = LE
  misc_feature 253..1290: note = CDS
  misc_feature 1291..1327: note = RE
  misc_feature 31..201: note = bridgeRNA
cttgtatgatgaattttaacaaccgatagcctagaagaaccgattaagctgtcatcgttcattgggaggccgttcgcccctgaggactggtaaataccagagcctgtgctgtagattggcccccgccctattcacccataccgtggagtatccgaggcttagagcctgcatacacaaggaaggtaggtgcatgcgcagggtcgggaaccggtgaatagtgtacttaacctttaactgaattaaaaaacgattatgacgaacctcccaatcaatgccatcgctgaatctatccaccgcctgtttgccggcgtggatgtcggagccgatgaattggtgctggtgatccgcaagaacggcaagtcgttcgatccacaaaaatatgccaatacccgctctgaccgtgcccgcttggtcaacaagctgatcaagctgccgggcatcaaagtctgcctggaagccaccggcatttaccatttcgacctggcaattgcgttgcatgacgccggtattcccgtgatggtcgtcaatcccaaggcctcgcataacttcgccaaggtgttgatgagaaacagcaaaaccgatgccgttgatgccaataccctggccgaatacgtcgagcgcatggactttgtcgcctggacccggccatcgaatcagaccctggctttgcgcgggtttgcccgccgcattgatgcgctgaccggtcagaaagctgccgcgaaaaaccatctgcatgcactgagtgcgactcaggaaactccaaaggcgttgctgcgcgatgccaagctggcgatcagtcaattggaaaaacgcatcgataccttggccgccgaagcgatgaccttgatcaaccagcacccggaactcaagcgtgtttttgagttgctgaccggcatcaaaggcattgcccaaaccagcgccattgctttgatgggcgaactgctgttattgccacccaacctgtcgcatcgcgaatgggtcaagtttgccgggctcgatcccaaagcctttgaatccggcaaaagcgtacataagaaaatgcggctgtccaaggcgggtaaccggcatattcgctcggcattgtatatgccggccttgagcgccaaacagcatgatccccatgtcagcgcttatttccagcacttggtcgacaacggcaagaaacctttacaggccgtctgcgcagtgatgcgtaaattactgcatgcgatccatggcatgctaaagcacgaccagccgttcgataacacacggttttatgtcattccgacacccatcatcgctgagtgaaaaagtgatggaattttgttgacttggaacagagtat

SEQ ID NO: 7300 - DNA, 1634 bp, unidentified
  source 1..1634: mol_type = unassigned DNA; note = element_b538910
  misc_feature 1..3: note = core
  misc_feature 4..275: note = LE
  misc_feature 276..1499: note = CDS
  misc_feature 1500..1634: note = RE
  misc_feature 13..295: note = bridgeRNA
ctcctacaataaagttaaggtttaaggcacggcagccagccgtgcctttttccatctcaaagctgaagctgttagaatgagcgagtaaatggcctgacgcttattaccatgggctaacacgcccgtattggagtccgtcagccgcctctctcattcacagcattcgatttacgcaggttgtaccgccggatttccgacgcgttcgtgtcactcaggagattgaacaggcaatgagtaaaagcggtcgccatatccaaatcacgaggaggaactttatgaacgctgttggaatcgatgtgtccaaaggaaagagcatggtggcggcactgcgcccaatgggtgaagtcgcattgttgccaagagaatatccgcacacagaagccggtctggaacagttggcgtgttccatcattgcccttggagaagacacgcgggttatcatggaggctactggtcgataccatgagccgatagcggcggcactgcatgaatatgggatttacgtttcggttctgaatccactgtttatcaagcaaagcggcggcggttccattcgggaggttaagactgacaaggcagacgccatgaagattgccaaatatggacttgacaattggactcaactgcgggaatatacccttatggaagcagttagacaacaactcaagctttatagccgccagtacgacctttacatgaaaaccatcgtggcgctgcaaaacaatctcatttctctgaccgacaagactttcccgggtgtgaacgagctgttctctagcccggaacgcgccgacggccaccagaaatgggtagactttgtcgcgtctttttggcactgtgaatgtatctgccatgtcagtgaaaaagcatttggcgaacgctaccgaaagtggtgtaaacggaaggactaccatttcagcgcggaaaaggtcaccaagctgtataccgcaagctgcgggcacattaccacactgccgaagaacgatatgaccagactgctcattactacggcggcacagcagttgacagctgcgaaaacgacgctcgttgccatgcgaaaggaaatgcttaatctggcaaagcagcttcctgaatacgaaactgtccgcgccatgtacggtgtgggagaaatcacggccacccagctcatggcggagatcggagatgtgcggcgttatcctcgccgcagcgcttcggtggcctttgccggcgttgatccctctgtgaaccagtcaggaaagcacaaggcgcaaagcaatcccacgacaaaacgcggctcgcctcatctgcgcaaaacgctttaccaaatcgtctgtacttacctgaagaaatctcctcccagcgagccggtgtaccagtttctcgacaagaagcgctctgaaggcaagccttactttgtttacatgaccgcagctcaaaacaagttcctgcgcatttattacgcaagagtgaaagagtgcctcgcgactctggatccagcagacactccgcaagcgtgatttacatcttcatatcccaactgttaagctggcgaaaaagacctctttccccggcttgttttgttgtatccttttttgctctcacgaattttagtgggaatttcttatttcaggacttgacttttatttgcagaa

SEQ ID NO: 7301 - DNA, 1210 bp, unidentified
  source 1..1210: mol_type = unassigned DNA; note = element_b53e6b5
  misc_feature 1..2: note = core
  misc_feature 3..188: note = LE
  misc_feature 189..1175: note = CDS
  misc_feature 1176..1210: note = RE
  misc_feature 12..198: note = bridgeRNA
cttgtatctttcaccgatgaatggttagctaccttcatcaccggaagtcagtgagaatgtttgaccatatagtgctttgacattgaattgtagattattccctgacttcattttcttctaaactggatggtatccaagcaccctatcagttaataggtgatgctgaatgtacaagtggagtagttgatatgtgtgaatatattggtattgatgttggaaaagaaaatttagatctttgttggttacgtgattccaataaggataaaataaaaacgaagactgttaataataagcttgaattgttcgatagtatcgcgctgtggataacgaaaaacacgaaaacagaaccacaagatattttgatcacactagaagcgacgggtgtttatcacgaaggtttagtttattttttacataagttaggtttcaaaatattgttatccaatccgggaaaagctaaaaagtttgcccaatctctaggcttaatacacaaaacagataaatcagacgccacaatgctcgcaaagtatggcttttctcaattaggtaacattcagctttggcaaccagaggcagaggaactatgtgaattaaagtccatgtgtcgccgattatccgctctagaaaaagacagtaggcgtgaaaataacaggctggaagcaagcaagataagcgacacatcaaaaagagtattgaaatctttggtagacatgattgatgtattggaatttgaaataaaggctctccgacaggacattgatcttcatctcgatcgttatgcggaacttaagaaaaataaacagctattgctaagcatcaaaggaattggacccgtaatggcaagggagctagtgtatttgttcgctgccaagcatttcacatcagctaagcaagtagcagcctatgctggactaatccccaggttaaatgaatcaggctctttcaaaggacgtacaacccttagtaagtctggtccctccagaatcagggctaagttatttttagctgcagtatcagcaagcagtttcaatccagatattaaagcccaatatgataggttacgaactgctggtaaaacaaaaatgcaggcattgggtgccgcgatgagaaagcttatacaaatttgctttggtgttattaaacaccaaactgaatatcagccacaagtgacttaaaatagtagcttgtgattggtcgtgagagatggtat

SEQ ID NO: 7302 - DNA, 1437 bp, unidentified
  source 1..1437: mol_type = unassigned DNA; note = element_b54815e
  misc_feature 1..2: note = core
  misc_feature 3..33: note = LE
  misc_feature 34..1182: note = CDS
  misc_feature 1183..1437: note = RE
  misc_feature 1254..1375: note = bridgeRNA
taattacatggactcgcccaagccgaggcgtctgtgcgccacggtggcattctattagaagccaacgacagcgagggcgagtccatgaaaaagaatacgacgaccaatcagtacgtgccaaccgatgttttgaaatgcaccgtcattgccgtagaccttgctaaaagggtcttccaggtggctggtcaggatgctgctggccttacggtgtatgaggaacgcatcaattcgcgtgagtcctttcatgcatttcttcgtaagctgccaacaagcataaccgtgctggtggagaccggtccgggggctcaggcatgggcgcaactgctgaaaactcaaggcaatcctgtccggatattgccagcccagcatgtcgccaatcaccgcagcggccccaagaacgatcgtaacgatgcactggccatattgcgcgcaggcagagataccagcatctcgtcggtaccggtcaagagtgctgcagccttggctatgcaagctctgcatcgtgttcggcaaggttacgtgcgccgtcgcacggcaatgagtaatcagatgcgcggtttgctgttggagcacggtcttgccatggcgcagggcgattccgcgtttagccagggcatcccccgcattctggaagatgccacccagccattgcctgatatgttgcgcgaattgattgatgagttactgggcgaatggagtcagttgggcgagcgtatcaacgtactgaccggtcgactggaaacagctgcaaaaaatgacgaaacagccaagcggctgatgaccgtgcgcggtatcggtccgattatttctacagcagtgatcgctaaacaaaccgagcctgagcgcttcgccaacgcgaggctgttcgctgcttactttggattagtgcccaagcagaacagcagcggagagaaagtccgattgggcaagatgagcaagcatggcgatgcctacttgcgaagcttggcgattcagggcgctcacgcggtgttgaggcaggtgaaagctaattcagaggatccagatgaccggcgattgcaacgctgggtgtccaggttgggccgtaaagaggcggccgtgcggttagccaaccgcaatttgcgcatcatctgggtgctgttacaaaacgaccaaacttatcgccgccaagtgaacaatgacctggagaaagcgatgagctaaggatccaaagagttctgccaccggggtgtaaaccgctccaacccatgcttaggaacattgatcacaggtcagaccgtcgcgaatttatgcctgcgctcctaccggcccttgaggcctaactgtaattggcatatcgcgagctcataaaatgttggccagaagccgattatggcttcctagaataggccttatacatagatgcagccgggtgtcagtgggaaaaagcgggttgacagtggggggcgagtccataca

SEQ ID NO: 7303 - DNA, 1446 bp, unidentified
  source 1..1446: mol_type = unassigned DNA; note = element_b54ee21
  misc_feature 1..2: note = core
  misc_feature 3..171: note = LE
  misc_feature 172..1197: note = CDS
  misc_feature 1198..1446: note = RE
  misc_feature 1232..1416: note = bridgeRNA
agatggggtaacgggccccggtctgccctccaagcaagccgcgcttgctacggcgctattgatggcgcgctgcgcgcggcttgcttggagggcgggcggtcgtccctcacatagatggtgttacggagtcggagggatgagcctcgctccaagcatcaaggagagacgaccatggactattatgccggaatcgacgtgtcattggaatgctcaagtgtgtgtgttgttgacgcaaacggcaagattttgcgagaggccaaggtggccagcgagccggaggcgctgatcacctggttccgctcgtccggccttgaccttgagcggatcgggctggaggccggccccttgtcgcagtggctttttgcggcgctgcgagaagcggggctggcggtcgaattgctggagacgcggcacgtgcgcaaggcgttcgaggcgatgccagtgaagtcggatcgcaacgatgcgcgcgggattgcgcaactgatgcggctgggctggtttcgtccggtgcactgcaaatcgatgagcgcgcaagagacccgaacgctgctgacggcgcgcaagcttgtgcaatcgaagcttcgcgacgtggagaacagcctgcgcgggatcctgcgcggctttggtctcaaggtaggcaagaccacagagcgaaagttcgcgggacggatcgaggagcttgtggcgggccatccgcatcttcaggtgatcgccaaggctctactttcggtgcgagcggtgctgcggagcgagttcgcagctttcgagaagcaggtacgcaagatggcgcgatccgatatgcggacacggctgctgatgtcgacgccggcagtcggcccgatcgtggcgctgacctatgccagcgcgatcgacgatccgacccggttcaaatcatcgaagcaggcaggagcccatttcgggttgaccccgaagaagtatcagtccggcgagaccgactacaccggcaggatcagcaagatcggcgacgcatcggtgcggaccgcgctctacgaggcggcccacgtcatgctgacgaaaccggtcaaaggctgctcgcaactgaagagctgggcgatgcggatcgccaagcgcgccggcatgagcaaagccaaggtggcgctggcgcgcaggctcgcggtaatcctgcatcgcatgctcgccgacgcaacccccttcaacgccgctgcagcaacctaacagggagaagcaacagttttcgggcgggtcacgacaccaggccttctcgaagcgaagtcccttcgccgggacgatggatcaggtcagaccgttgcccaccaggtagccctgtgagcacgcgaacgtagattggtcggcctatcctcttccaaccccatcaggtggcggcctgcgccgaccccgtacagaagcgagaccccggcgaaccgaccaagcaaaagggattgactaatcgaggcccgttacaga

SEQ ID NO: 7304 - DNA, 1308 bp, unidentified
  source 1..1308: mol_type = unassigned DNA; note = element_b554190
  misc_feature 1..2: note = core
  misc_feature 3..191: note = LE
  misc_feature 192..1151: note = CDS
  misc_feature 1152..1308: note = RE
  misc_feature 29..201: note = bridgeRNA
cttgtgtcctcgaaatctgtcagaatgtggcaacgggcggttggatcagaaccgcccgttgccggaactgagcccgttgcgcccaaaggcgacagagcctgcaaaagagcaagggacagctccggtgtcttcctcaacccgaacagttgcaagggctgcgagcccgtaccaggcaaggaagggagtggatgatgacacaaagcgatctggttgtcgtcggcatcgatgtcgccaaggataagattgatgcgtgcattcggtccgtaacggagcggaagacttgtccagcgaccgcgccggggcgacggagtttgattgcatggcttcgcaagcatcgggtcggcaaggcggtgatggaggccagcggtggctacgagcgtgtctggaccaaggcgttgcgccaagcaggtctggaagtgcggatcgtcgatcccaaacgggttcgtcacttcgcggaatcggcgggacgccttgcgaaaaatgacaagatcgacgcggagatgatcgcctggttcgccgagacatttagcgaggctcccagccaggtcgacgatcccgcccaagaggagatgaaggcactggtgaagggacgtcagagcttgattgacgtcagagctcgtctggaaatgcagaaggagcatgaggcgccggcccttgttcggaaggctcgtgcgcgtcttcttaagaagctggctgaggaaatcgcggtggtcgagaccgcgattgctgcgacgatcgaggcaacgccggattttgcccggcgcgccgaaatcatccagagcgtaccaggctttgcagaggggactgcaatggcgctgcttggaggagtgccggagctagggcaggtgagcgacgaaatcgccgccgcgttagtgggcgttgctccttatgacgacgatagcggcaaacgtcgtggcgaacgctgcatcaagggtggacgccgctgggtacgaaatgctctctacatgccctgcgttggcgccgcgacgctgaacaatccggtgttcaaggccttctatgaacgcctgattgccaaaggcaagccgccaaaggtcgcactcgttgcctgcatgcgcaagctgatcatcatcctcaacaccatgatcgctcgcgacgagaagtgggatccgaaacgatacaaggtggcctgacgagcgcctctatcatgcgctcggaactcggccgagcgcatgccaagcccaaagaccggcgatcagacggggtcaaggccgtcagccgccgaaggcgggggtgcgtaagcaccagccttgagcccgtctgatcgcaggtctacttccctcccagttg

SEQ ID NO: 7305 - DNA, 1522 bp, unidentified
  source 1..1522: mol_type = unassigned DNA; note = element_b556a80
  misc_feature 1: note = core
  misc_feature 2..230: note = LE
  misc_feature 231..1457: note = CDS
  misc_feature 1458..1522: note = RE
  misc_feature 14..245: note = bridgeRNA
ctacttgttgacttgccgtaggaccgatgcctggcgaggctcggtctaggcacccggttcgtcgctctcatttcggctgcccacgctggtcgtgtggctctcatttggcctgcgcgggccgggtgctgccgtgcagtggggagaggctcaagaggggtttgttctgctcgaagtagcggtgccctccctttgcccggcaaccacagcagggccggacaggagggactgagatgagccaggtagtcatcgggatggacccgcacaagcgcacggccaccatcgaggtgatggccggtgatgagaccgttgttggcggcggccggtatgccaccgacgccgtcggctaccgggcgatgcgtgcggaggtgaagcactggccggagcggatctgggcgattgagggatgccagggcatcggcaggcatctcgcgaaccggctgctcgccgatggcgagcaggtggtggatgtgccgcccaagctgtcggcccgcacgcgggtgttcgccaccggccagggccgcaaaaccgatgccaccgacgcgcactcggtcgcgctggccgccacccgcatgcaagggctgcgcccggttgtcgataaccagcagctcgcggtactgcggatcctcgccgaccggcggcggtccctgggcgaggaccacacccggatgatctcccagctgcaccagctgctgctcgagctcatccccggcggcgccaagaaggacctgtccgcagcccaggccaaggccctgctggccagggtccgcccgcgtgatgccgcgggcaagacgcgccggcgggtcgccgccgagctgatcagcgacctggaacgcatctaccagcgcaagaaggccgccaacaaagaactgaacgacctgctcaaagccaccgctaccacgctgcccagcctgcacgggatcggcccctccggcgccgcccggctgctagtcgaagtcgccggcataaccaggttccccaccagggcgcacttcgcctcctggaacggcaccgcgccgatcgacgcctcctccggcgaccaggtccgccaccggctatcgcgcgccgggaaccggcagatcaaccgggtgctgcacatcatggccgtcgtccagctccacaaccccaccgaaggccgcgcctactacgaccgcaaagtcgccgccgggaagacacccagagaggcgatgcgcgccctgaaacggcggctgtccgacatcgtctaccgccagatgatcaccgacgcccgggcggcggcaacgggcccgggaggacacctgggggcggctactggctccagcgcggccggcttgcaccccagcgccggcacttcggagaagtcacttcccggacccgccgctcacgaccttacgccagccaagccaatcccttcagctggccgtttccggcgcccttcaccggcgccagaccgcagccgccgtcaagcgcactctgcttgacggcggcgaggaccggcgcacactattcagggccgggaatgacccctcttgacacagaggggagc

SEQ ID NO: 7306 - DNA, 1431 bp, unidentified
  source 1..1431: mol_type = unassigned DNA; note = element_b55b17b
  misc_feature 1..2: note = core
  misc_feature 3..109: note = LE
  misc_feature 110..1126: note = CDS
  misc_feature 1127..1431: note = RE
  misc_feature 1194..1428: note = bridgeRNA
taatgaaatggacccagccttcttcccccatgagcctcaggcgaggcaccatgggtgttgtgcgagcgcacaacccacattcatcagcaagaagaagggaggggctgttatgcacaccacgacattgggaattgatttggcgaaacatgtgttccagttgcacggggtggatgcgcgagggcgcgcagtgctcagccgacgcgtgaagcgtcagcagttattagaggcagtggcgaacctgccggcctgtgtgatcgggatggaggcgtgcgggagtgcgcatcactggggacgggcgtttgaacagctcgggcataccgtcaagctgatgagtcccaagtatgtccggccttatgtcaagacgaacaagaatgatcgtcgagatgcagaagcgatctgtgaagcggtgggccggcccaccatgcgatttgtgtcgatcaagacggtcgaacaagccgacatgcaggccttgcatcgcacgcgatcgctctttgtgaaacaccgcaccgccgtcatcaatcagattcggggattgttggccgaatatgggttggtgattgcacaatccccggagaaggtccggccagccgtcgttcgttttttggatgacgcggggtcgggattgaccgcgtgtgcccgagacaccttctccgagttgtatgagcaactgaaggatctcgactcgcgtatcgagcgggtgacgcaccgagtcgagcgcgtgtatcggacgcatccggtctgccggaaactggccgcggtgccggggattggtccgttgacggccaccgcgttgctggcgaccgtcggtcgacctcaggcgtttcagaacggacggcatctggcggcctggttgggtctggtgcctcgacaatattccagtgggggcaaggagatcttaggcgggatttcgaaacgaggcaatcggtatgtgcggacgctgctgattcatggggcacgagccgtcgtgcagcgggccacgcggaggaccgatacgcagggccagtggctgtgcacgctcatgcgccgcaaaggcaccaatgtcgccgcggtcgctttagccaacaaaaatgcccgggtcatctgggctatgttggcccatgatgaggagtatcgacaacccgcctaggggccaggctaggcgtaacggtttttgcaaggagcagggcgccgcatcacaggaggaggatcacaccaaggagtgcagcgcggaccattcgtgatgacaccagagggacacccagcgcgttcagaccctggacaaattgtcggcccggacaaggccgttgtgctaatgaggagaatgcgcgcgtatttcatcaaggcccggacatattgcttgtccatcaagaggccggatatatagacgcagccctgcattggtctggttcatcgcgtgacacccgtcgttgcatcgaaggctgggtccatata

SEQ ID NO: 7307 - DNA, 1163 bp, unidentified
  source 1..1163: mol_type = unassigned DNA; note = element_b562b94
  misc_feature 1..2: note = core
  misc_feature 3..241: note = LE
  misc_feature 242..1156: note = CDS
  misc_feature 1157..1163: note = RE
ctcctaccatgaattcgtatagaatgatgtataatgggtttgtgcggatttaggtataattattcatgggaaggcaggaggactccgtgcttcctgggcgttagagccctcacttcagcatgtcccaagcctctgtgaaccataatcggttggttggatcattgaatccttgtcacgctggaggattggtctggaggcttacggcacctgctttccccctcttctgattggaggtggcaaaatgtcattaaagggcggctttgattgttttgtcggcgttgatatttccaaggataagtttgatgcctgtgggataacaggggaagaagtaaaactttttcagttttcagcggccatggatcgaaagggttttgaaaaactgaagggacatcttgcggcggtttcgatctcatccgttttaatcgggatggaatccacggcgtcctatcatgtcaatcttgtgcatatggcagggatatttacaaagtctatcctgaagcttttacaacagtacccttctgcatttacgcttagagatgcgaatcttggtcagttgtctcagatgttgattgcagattcttatgggcataaaagagaggcgtttgcagcagagttaatcaaggcagctcatttgtcgataggtagcaagagtcccgccaaagacatgattctgaagcagaagatagcgctgctccgtcaccttgaagacgcccttcaggagataaccggcatgctcattgaaatgagccggaaactgatggaagaagaaataaaccttatgatttccctcaagggtatcggggagaaagccgccgccaattttcttattgagatgggcggcgacatcaatcagtttgatcgttccggcaaaatcattgccatggcgggattggatccggctgtttaccagtccggtaagcatgatggcaagggccggatcacgaagcggggtaatcgtcatctgcggaagatcatatggttaatgacaaccaaagtaattcaatacactgatgtttttagtgtttattatcttaaacgaagaaaggagggattgccctacaagatggctgtcttagccacggcccataagttgatccgtgttatctatgccatgctgacacaacgaaaaactttttgtccacaggtgaattcatgatagttga

SEQ ID NO: 7308 - DNA, 1938 bp, unidentified
  source 1..1938: mol_type = unassigned DNA; note = element_b571f61
  misc_feature 1: note = core
  misc_feature 2..133: note = LE
  misc_feature 134..1420: note = CDS
  misc_feature 1421..1938: note = RE
  misc_feature 1608..1879: note = bridgeRNA
aaggagcttcctgtataattcaaatatagggaattccgagaaaggtggttgataaaaagatacctcagagtaaaataagatttgctgactttgcaggttagtacaaatcttatagaacagagaggtatctgaaatgaagtataacacacaaaacgcaaaaattgaatccattactgaaaaaactttaattgttggtattgatgttggaagtgaaactcattttgctcgtgctttcgactggaggaattatgaattcaccaaaaagccttttgagtttagcaatagtgaagcggggtttctgacattcaaagcctggatggaggatcttttagagaaaaatggcaaatctgttgtgattcctggtatggagccaaccggtcattactggttcgccctggggaaattcctgcaggacaacggaatgaggccggtgcatgtaaatccccatcacgtaaaaaagtcgaaagaactggacgacaataatcccaacaagaatgaccgcaaagacccaaagacaatcgccagtcttgtgaatgaaggacgtttttcttatccttatataccgaccggcgtttatgcagagatcaggaatctgtcgaacatgcggttccaggaacaggaagagcttaccagagcaaaaaaccggattgccagatggttctccatctatttcccggagtataaagacgtttacagggatctaaaggcggtcagcggaaggatggtactgcaggcagcgccattgccggaggatatccgaaaactgggtgtggaaggcgtaaaccggatctggagggacgcaaagctgagaggtgccggaatgaagagggcaaagaccctggtatcggctgcggagcacagcgttggaagtaaggaagcgccggaagcggcaaggctagagcttaggaacctgctgaacgacatggatgtatacgcgtcgagagtggaagaactgctgggaatgatagaagaaaaactgaaagagatcccatacatcgacaaactgatggcgattaagggagttggattgattacggtcagtgggtttattgcagaagtcggagatatcagacgcttcgatgatccgaaacagctgcaaaaactggcgggatacgcgattgtagcgaacgaatccggaaagcacaaaggagaaagccggatcagttacagggggcggaaacgcctgagatatgtgctgtatgaagcagcattgtcgttgatcggaaggaatgcggagttcaaagagatccatgagtattaccggacacgcagggacaatccgctgaagaagatgcagtccgtggtggcaatcgcatgcaaagtgatcagaatcttttatgtgatactgaccaaaggagtggactatgacccggaaaaaatgaagggagatatccgcaggtcccagatacaggcagcataaaaaagcaaaacagtaaccgttaatcaatgcttgtcacagttgaattgagcccatgaagaggaagttgtgggttgaattcagctgtgacaggacagctggaggtacggggaatcatttgcggggaaacgtccgccgcaaggcgccgaaaagaggaaacgtacagaaagtcagtaaatgaaagacaaagaatgagccagtagtcggcaggaatcattaccatagggcaagaccctgcaaaggagctaagctgacaccctggttatgggcaggcgggacgaaggaagtgaggacccggcggagacgcgggagatcctggtagacacgggaggtgcgctgccatagatggatgggtatacacaaggccatgtaaagcgaaatagcaagacgttttacttcgtgtacccaaaaccagctattttcgtatcagatacagagaaatgcccatctccttggctcattcatctgagatagtaacttgaaaaaacctttattttaaaggaaaaatcacttgacaatat

SEQ ID NO: 7309 - DNA, 1452 bp, unidentified
  source 1..1452: mol_type = unassigned DNA; note = element_b57380e
  misc_feature 1..2: note = core
  misc_feature 3..207: note = LE
  misc_feature 208..1437: note = CDS
  misc_feature 1438..1452: note = RE
  misc_feature 12..201: note = bridgeRNA
tccttacctttcttgcagggtggtcgtggccgagggccttaggcttcgaactgcccagggacgtcgggtatggctttcatgcgtttgccgtctgtgatggccgaaggagattggccgcccagcgtcctgcgacgactcgaccgctaattgagagatgcgatttgatcgctgtgtaaggacacgtcggcgtggtcgtctgctgggttgatgatgacgataatgaccatggaggtggttgtgacgcaacaactgtgggctggcgttgatgccggaaagtccgaccaccattgcgtggtcatcgatgcagagggcaaccgactgctttctcagcggatccccaacgatgagagttcgctgctgcaagtgatccaggcggtcacgaggctggccgatggcggcgaggtcacctgggcggtcgacctcaaccacggcggggccgcgctgctgatcaccctgctcatcactgcagaccagcggctgctctatatccctggccgcaccgtctaccacgcttctggcgggtatcgcggcgatggaaagaccgacgccaaagacgctgcggtgatcgccgatcaggcccggatgcgccgcgatctgcaaccactgcgccctggcgacgagatcgccgtggacctgcgcatcctgaccgcccgacgcagcgatctggtcgccgatcgcacccgggcgatcaaccggctgcgcgcccagctgctggaatacttccccgccctggaacgtgcctttgactacagctccagcaaggccgcgctgatcctgctcaccgggtaccaaactcccgatggattgcgccgtgccggggtcacccgacttgcggcctggctgcgtaaacgcaaggcccgcaatgctgatggtgtggcagctgcggcgatcgaggcggccaacgcccaacacacgatagttcccggccaacaactggccgccgcgatggtgggccggctggctaaggaggtgatgaccctcgacaccgaaatcggcgccaccgacgtgatgatcgaggaccgatttcgccgccaccgccacgccgagatcatcctgagcatgcccggcttcggcgtcatactcggcgctgaatttctcgccgccaccggaggcgacatgaccgcctttgacagcgtcgatcgccttgccggcgtctccgggctggccccggtaccgcgagactccggacgcatcagcggcaacctcaaacgcccccgccgctacgaccgacgactgctgcgcacctgctacctgtcggcccaaatcgccatccgcaccgacccggcttcgcgcacctactacgaccgcaaacgcgctgaaggcaaaacccatacccaagccgtcctcgccctggcccgccgacgcctcaacgtcttgtgggccatgctgcgcgaccacgccgtctaccgccccgcaaccactactgcggctgcttgacaacgtcattgagat

SEQ ID NO: 7310 - DNA, 1388 bp, unidentified
  source 1..1388: mol_type = unassigned DNA; note = element_b5788e1
  misc_feature 1: note = core
  misc_feature 2..70: note = LE
  misc_feature 71..1102: note = CDS
  misc_feature 1103..1388: note = RE
  misc_feature 1149..1383: note = bridgeRNA
caatggtatggaccccgcccttggcctaggctgggatgtcgaactgtcactcgcagagcaggagacgaccatgcacatcgtccgtatcggcctcgatctcgcgaaatatgttttccatcttcacggtgttgacgaacgcggcaaagtcgttttgcgtaagactttacgccgcccggccgttgcgctcttcttcgcgaatcttccgccctgcattgttggaatggaagcctcgaacggcgcgcattattgggccaagacgttctccgagcttgggcatgacgttcgattgatcagcccgcagttcgtcacgccatacgtaaaatccaacaagaatgatcggaatgacgccgaggcgatctgtgaagcagtcggccgtccgaacatgcggttcgttccggtcaaatccgccgaacagctggcgatccaggctattcatcggattcgcagtcgtctagtcgccaatagggttagacttgtgaaccagatccgcggcctactcggcgagcacggcgtcgttattgcgcagaccatcggcaatcttcggcgcgctttgccgcggatcgtcgacgaggaaagcaacggtctgaacagcattgttcgggagttgatcggcgaattgcgggaggaattgatcgaccttgataggcgggtcgcaatttacgatcgcaaaatccgggaattgtatcgaacaagcgcagcatgtcagcgcctcggcatggtcgaaggaattggacctattactgcgacagcgctggtcgcagcggctggcgatgcaaaatgcttcaagaatggacggcagttcgcggcatggatcggacttgtcccgagacaacgatcgagtggcggccgatcgcggctgctcggcatcagcaaacgcggcgaccgatatcttcgtaccttgcttatccacggcgcacgcgccgccttgggccggatacgagggaagcaggatccgagaagcctttggctgctcaaagcgcgcgaacgccatcatccaaatgtcgtcgccgtcgcgctcgccaacaagaacgcgcggatcgcatggagcttgctcgccagcggcatgagctacgatcagcgtctaaccgtcagctcggcctaaccgcagctaagcatccgggaaacagacaaccaacgagattcccaccagcaattgcaacgattggcagtgatggcgaaacggtcactccgtcgattcccgaacctgatgtgtggaccggcatggcgagagccaatgccttgggggcattgaggtggaagcgcgcgaaaatccatcgaggctcgcggcaagaactttttcggccgcatcatgaagccggatatacgtcagcagttgtgaccgaaagtcggaactgtcaaagccgttgcaatcgggcggggtccatata

SEQ ID NO: 7311 - DNA, 1657 bp, unidentified
  source 1..1657: mol_type = unassigned DNA; note = element_b583aee
  misc_feature 1..3: note = core
  misc_feature 4..316: note = LE
  misc_feature 317..1327: note = CDS
  misc_feature 1328..1657: note = RE
agttcctatgtttgaaacccaaataaaaatggagtgagctctggcgagctcatctgggaggcctggagtgggcaccaccgcctcgatatacgcccctcggcggttacagcacaaacgctgcgccgagctcggttaaaaggctcgctccgcgtttggctgttgccggaaaaggcatcccaagaaaaaagctaccgaaaatttggttactttgtaaaagcaaatcgaagttcaaccaaatatacagtagcttatgagacaacaaagtaacgaaatttcgttcaaaggacaaaacatctacgtcggaatagatgttcatttgaaaagttggtcggtgacaatcctgtcggagacctcggtattgaagaagatgagtcagggtgcagacccggatgcacttcaccgatttctcacaagtcactatccagaggcggagtactactccgtgtacgaagcagggttctgcgggttctggatacacgacaggttgacggagttggggatacacaacattgtcgtgaacccggcagacgttccgaccatgagcagcgaaaagttgcgcaagacagacgctgtggacagccggaagttggctgtcagcctgcgggcgaaacaactgaaggggatatataccccggacagtgaagcgctggagatacgctctttgataagattgaagaactcgattacgaaggatatgacgcggcaaaagaaccgcatcaagtcccagttgcgatatctggggatagagataccgaccgagtatcttgaaccccactccaactggtcgaagcgtttcctgaactggctgagggaggtagagatgaggacaccgagcggacgtcagaccctggacattctgattatgcagttcgaagccctgcgcaagcagaaagcagagatgacacgaagactgcgggcattgtctcacacagatcgatttgaggaaatgctggggttgttgatgacggttccgggcattggccagaccacaggtctcgcactgatggcggagattgtagacattacccgcttcgacaatgcggaacaactggccgcctatgtagggatgataccgatgtgccattcaagcggcgaacatgaaggcgtgggagatattaccctccgcaagcacgccattctgcgaagcaatgttatcgaagccgcctgggttgctatccgcaaagacgaggcgatgcaactctgctatctgaacaactgcaagaggatggttccaagcaaggccatcgtgaaggtcgcgaggaagctggtcaaccgcatctacttcgtactcaaacgccatcagccatatgtcaatgctgtggcatagagatatatccttactggtagacaaactttccaggagagaatactacatatttattgcggctttgaagtccgcttaaaagagtttgctcctcctgcctttgtaaactaatacaggaacttgcggcccttaactggatgaccgctgtggaaagtttgtttaccgaaggatctttatcgggttctgaagtccgacctccccggaggccgcagagttacgcgtaccaacgcaaacatggagaaaaatatttttggccgtaatgccttggatataaataaattaaagtttaaccaataaaatcggaatccatttttatttggatttcaactggaa

SEQ ID NO: 7312 - DNA, 1340 bp, unidentified
  source 1..1340: mol_type = unassigned DNA; note = element_b58c661
  misc_feature 1..2: note = core
  misc_feature 3: note = LE
  misc_feature 4..1074: note = CDS
  misc_feature 1075..1340: note = RE
  misc_feature 1111..1338: note = bridgeRNA
ttaatgagatggtcaccccaccctgtgagcggtacctggcagggtgttttttttctgaaggggatcatcatgcaaaacgttacgcttattggtatcgatctcggtaaagattctttccacgttcactgtcaggacgaaaaaggtcatgcactgttgcgtaagaaattttcccgcacccagcgtatgcattttctcgcttcctgcaaggcggcgaccgtgatgatggagtcctgcggcggggcacactttatgggacgccggattgcggatttaagtcatgaagcaaagctgatttctccgcacttcgtccgccctttcgttaagagtaataaaaacgattttgtcgacgctgaagcgatatgcgaggcggcatcccgcccctctatgcgctttgttacacccagaactgaagcgcagcaggcaatgtctgccctgcatcgggtcagagattcattgatacggcaacgcgttaaaaccaccaaccagatgcacgcatttttgctggagttcggcgtcagcctgccacgcggtattgccctgatacgacgtctgacggtcgtgctggaagaaaatgacttcccgccttatctggtacgggttctgaacaggctccacagccagtatgtttacctcagctgggaaattgatgaaatcgataatgaactgaaaacgcatctgacggaggatgaaaccgcacagcgcctgctgagcattcccggcgtcggtccggtaacggcgagtctgttagccacgcggcagggcgatggaaaaaactatgccagcagccgggactttgcggcatcgccctggcgggttccccgccagtacagtacgggtggaaaaatgccccttatgggcatcagcaagcggggaaataagaatctgcgacggctgctggtacagtgtgcacgggtatttatgcagcggctggagcacaatccagggcgcctgtccgagtgggttaaaaagcagcttgccagccatcattcaaacgtggtggcgtgcgctctggcaaacaaactggcacgcattgtatgggcagttacagctcatcaggcggcgttcagtaaataaaagagccaacgagaaactcgtcagctcagttaattaacaggttactttctggttttgcgacgacagataatttatgacataaacggcctataggcctgccgatgaacctgacataaaaatggctctaagaagccgtcggctttttaaggttcggcaggcgcggaactcatcgtggcgcgggcattgctgcccaccagacgccgaatagatttacgcaagcccatcataaatcaaaatctctgttgcaaaaaaagggggaccataga

SEQ ID NO: 7313 - DNA, 1553 bp, unidentified
  source 1..1553: mol_type = unassigned DNA; note = element_b58d0a5
  misc_feature 1..2: note = core
  misc_feature 3..288: note = LE
  misc_feature 289..1485: note = CDS
  misc_feature 1486..1553: note = RE
cttctaccaaaaatttttgtaaaattaacatacaaagagataagcaagagaacgttttatccttagattttatctattaaacttaaaattttaaattaatagataataaatctccatacgagtctgttacttgctttcaatcccaattagttgattaggtcttagaacctctgtcatttggaaggtaggatcaagtcaagtatttgcttatctgtttgtatgtttttaaataacttttggtttttattttttatattcaaatataaactccaatttaaaaggaaatttatgtaccaatattttctaggaatagatatctctaaagatagttttgatttttgttttatagattcaaacgagaagctattagataaaaatcattatcttatgagttatgaagattttactaatcttggtgatattttatcttctttttctaaggatgaaattttaatatgcatagaagcaacaggaatataccatttaaatttactctcatttttattagagcttaattttaatgtatgtgttataaatccattgtttgttaatgcatttactaaatcaataactattagaaaaactaaaacagatagcaaggatgcatatactatttctctatttgcaaagagaaatagtagtacacttaggctatcaaagcttagtgatttagaaacaataaaacctatcattagagaaaaagagaaacttaccaaccaaatatcagctataaaaactgatattaaagcattagttaatcaattattcccagaatttttaaagaacacaaatatcttttcaaagagcagtttaaatctgctcttgcaagctcctagcaaacaagctattaggaacttgaaagagaagaaaatagcttcacttttaaacaaagataaccaaagaggagctaaagctaaaatcagtgctaatgatatacttttattagctcaaaattctattggtattaacaatccatctttagaaaaaatactcatctctaaaatcaaacaattagaattcttacaaattcaattagatgagtacattaaaataatagaagagtttgttgacgaacatcacaatgacgatattgaaatattaacatctattgctggtgttggaaaagatagtgcttcatcatttcttgcagagataggaaatataaaaaactttgaatcacctaagcaaattattgcatttgcaggcactgatccagctatttaccaaagtggatcttcagttaatattagaggttcaatttcaaaaagaggcaactctcatttaagaagaaccatatggcatatggcaagagcagcaactgtttggaatgaaacactcaaatcctattatgataaaaaacgaaatgaaggcaaaacttttaaacaatcagttattgctgttgccaataaactcattcgtattatttttaaaatgttaaagaacaatactaaatttgaatcaaatcacacaaatttagcaatataaaagtttccaactgaaactcttatattaattttttgatttaagtttaactattaatttaaaatagttga

SEQ ID NO: 7314 - DNA, 1562 bp, unidentified
  source 1..1562: mol_type = unassigned DNA; note = element_b598958
  misc_feature 1..2: note = core
  misc_feature 3..101: note = LE
  misc_feature 102..1229: note = CDS
  misc_feature 1230..1562: note = RE
  misc_feature 1300..1492: note = bridgeRNA
agactgtatgtcccttcccttgctgaggcgactcgccctcgatgcgattgcgagggttacccggataggccgggcagagcctcaagcaaggagggcgagtcgtgggcaattgtagcgaagctttcgtggctttcgatacctcaaagttgcgtaacgccgtggcaattgcggacggcagtcgagcgggcgaggtgcggtttctcggcgagatcgagagcacggctgcggcgaccgccaagctggttggcaagctcgccgccaagtatgggcggctgaccttctgctacgaagcggggccgaccggatacgggctgcagcggcagatcgggagcctcggtcacgcgtgcatcgtggttgcgccgtcgctgatcccgaagcgtccgggcgacaaggtgaagaccaaccggcgcgatgccgtcagcttggcgaagctgctgcgggcgggtgagctcacgccggtatgggttcccgaccgcgctcacgaggcgatgcgcgatctgacgcgggcacgcgagaccgcgatgatggatctgcgcgcgaagcggcagcagatctcggcgttcctgctgcggcaggggcggcactatgcggcgagcaagaagacgtggatgaaggcgcacatgagctggcttttgagccagaagttcgaccacccggaacaacgcttggtgttcgaggagatgatgctggcggcgcgccaagcgcaggagcgcttgctgcgcctcgagcaggcgatcgccgctgccgtcccggactggtcactggccgaggtggtggtggccttgatggccatgcgcggcatggatctgatcgcggcggcgacattcctggccgagatcggcgacctgacgcgtttccaatctgcgcacgagctgatggcctatctcggcctggtgccgtcggaagcctccaccggcgacacgatcaagcgcggccccatcaccaaggccggcaaccggcgtgcccggcgcatgctggtggaatgcgcctggagctatcagcatccgccgcgggtcggagccggcaagcagccgaaggttgatgccgctccgccggcggtccgcgacatcgcctggaaggcccagtgcaggctcaatcggcgctaccgggcgctgatcaggaggggcaagctcaagaccgtcgccatcacggcggtggcccgcgaactcgccggcttcatctgggccgtcagtcgcgaggtcacaaccacccctggcgtggcaaagtaagagacccgcgaaggcgaaaaggtccctgcgaagccagaaaaggagcactgcgccggggagcccggcgaagacatctcgtgcaacggcgggggcgaagccgcggccaggggaactctcgatcatcctgtgaggccgatcgctagatcgacgcccgacctcagaccgggacagccccagacgaaaagacggacatgcgtgaacccgcgaataagaggatgttgaccgacgtcttcgggcttcgctcccaccattgcacgatcatcacatccacgtctctccgccactcggagagatcggcttgtcatgcctcccaggcttgacgagggacataag

SEQ ID NO: 7315 - DNA, 1412 bp, unidentified
  source 1..1412: mol_type = unassigned DNA; note = element_b5a1577
  misc_feature 1: note = core
  misc_feature 2..195: note = LE
  misc_feature 196..1383: note = CDS
  misc_feature 1384..1412: note = RE
cattacagtcgaaattgtcagcccgggaccgtctcgggctacgattgaggcgcgcccagaacgggccgccgaccgggcgcccgcgcacggccgaacgtccctgccccgagagggcccgttgggtgctgccggcgcggggcgcgccgcccccgacggctgataggaaagtgccgggcaggtgccgcggctggtaatgtgagtgccgagggggaggccatccggtcgaacgactaccggaaggataccaccgtgaaagcgccatccaccagacccgcggccgtgctcggcctggacgtcggcaagtcatcgcactgggcctgcctgatcgaccgcgacggggaggtgctggacagcgcccccgtccgcaacagggaggccgagctcgacgcgctgttcgcctccgcgcccgccggcacgctcgtcgtcgtcgaccagttccgcaacatagggtccctcgccgtgaggcgggcccgcgccgcggggctcggggtcgcctacctgcccggcctcgccgccagccgcgccgcgggcctgttcgccggcgaggccaagaccgacgagcgcgacgccgcggtgatcgcgcggaccgccctgggcgtgccggactccctgtcgggggtcccgggccgcggcgaggccctcgaggccgctcgcgccctctcgtcgcagcgcgaccacgtcgtcgcctgcgcgaccagggacaagaaccgcctgcgcgcggtgctgctcgagtcctgcccggccctcgaggccgcggtcgacctgtcggaccggcggtggctggagctgctcgccgggttcggcggggcgtgggggatcgcccgctccggggccgagggcccgcgggccgaggccgccggggaggccgcggccgcctccaccgcgcccccgccggcgctcgtcgaggccgagaacaggcaggtcaggttcctggccgcccggatatcggaggccctcgacgaggccggggccctcgaggccgagacggcggcgctgctcgagggcgacgagacctacgcgtgcctgctcaccgtgcccggcatcggcccgaggaccgcggcgcagctcgcggtgtcggtcgacatcgggaggttcccggaccacgaccacctggcctcgtactgcggcatagccccgagggtgaggagctccggcacgtcggtgaggtcggtcagggcgtccaggcgcggcgacgcgaggctcaagtccctgctgatcttctcgtgcaacagcctggtgaggtcctcggggcgctacggcgagtactaccgggcctgcagggcgcggggcatggggcacgggcgggcgctcaaggccgtcgcgaggaagcggctcagggcgatatacgccgtggtgcgcgaccgggtgccctaccgggagtagccccgacggttgacaaaactataggaaca

SEQ ID NO: 7316 - DNA, 1384 bp, unidentified
  source 1..1384: mol_type = unassigned DNA; note = element_b5a1f57
  misc_feature 1..2: note = core
  misc_feature 3..249: note = LE
  misc_feature 250..1287: note = CDS
  misc_feature 1288..1384: note = RE
  misc_feature 16..228: note = bridgeRNA
ctcctatgtttgttatgacctaataaaaagaatatattaggtattatacttaagtgaaaaagagtgagagctgaaagactcctaaacaacctatgggtatgttcgtccgaagatactgcctcactcttttttaccttttagagtctgaacagaatgtaaggcatatcgttcaacgttatagccaggatatccaacaggagaaaagacggaggaaggtcactcacttaggttgattaaacctaacaagacatgataagaattgtaaaacaggcggtaggcattgatgtggccaaaaaagagctagtggtttcccttgggcgaatgagtcatgataccggggtagagatctacgcacataagacatttcccaatcacaccaagggctttgcgaatcttgtggcatgggtgggcaaaatgaccttaagggatgtgcgaaccagatatgtgatggaggcaacaggggtttaccatgaatgcctggcttattatctttcaggccaggggcatcagctgagcatcgtgttgccaaacaagatcagtaattatttcaggacactggatgtaaaaacgattaccgataagaccgcttcgcaggcgatatgccagtttgggctggaacggaaactggatgattggcagaaaccaaaaaagatattcagtgaacttaaacagcttaccagggaaagagaacagttgattaccgacaggacgatgctgaaaaaccagctgcatgccgagatggctgaagcatttccaaacctgggcagtatcaaaagagctacaaaacgaattcatttgatcaacaggcaagaactggagatcagggcggaactggccggaataataaaaaaagatgcagagctggctagaaagatcgacctgatcacaacgatcccgggggtagggaagctgacggccgtgatagtcttggcagagaccaacggatttgagcttataaacaacaaaaaacagcttattggttatagtgggctggatgtaaggctcaaggactccggcacctcggtgaagggaaagccaagaatatccaaaagagggaacaggcacatcagaaaggcaatgcatatgcccgcactgtccgcaataaaacataacagggagcataagggtctctttatccgtctggtatcaggccatggcataaaaatgaaagcagtggtagcggtgcagagaaaaatattagagctcatccatgccatctttaaaacagacaggccctttgacagcgattatgcaaaaatggaggtagcagaagtattaaatgattagagcagccattatataaatgaactgccctaaagaggctagcttaaagctgccttgaagaaataaaattaaaaaaaacatttggatattaacacagaat

SEQ ID NO: 7317 - DNA, 1216 bp, unidentified
  source 1..1216: mol_type = unassigned DNA; note = element_b5a2607
  misc_feature 1..2: note = core
  misc_feature 3..243: note = LE
  misc_feature 244..1194: note = CDS
  misc_feature 1195..1216: note = RE
  misc_feature 30..199: note = bridgeRNA
cttatatgttgacgtgttctctgaaataaagagaatttactaaggacgcttagtaaagggaagtgagatcttgtgaccaggccaaggttaataagcctgatgcccagattaagaccacttccccacgcactataaactgtacggtatcttaggctggttaaaccaagcctgtatataaggttagtcgttcatagtgcacctactaagcaatatagattttacacaactgatgaggaattgaaaatgacctatttcattggtgtagatattggaaaacactattttgatgcaagcattgacggacaaacaggcacaaagcgttttgataacgatgaaaaaggctttaaagcttttttaaaatggatcgcgccctttgaagagcgacacgtggccatggaagccacaggcaattattcaatgcctttggcgatattcctttatgagaaagacatccatgtcagtatcattaatcctgcacagattaaatactatgcgcaagcgcaactaaagcgggtcaagaccgatcctgaagacgccaaagtcattgctgatttttgcaaaacccagtcacctaaattatggcaaccaagccgcgatttagtggctcgtcttcaacagtggctagggtttaaacacctactggagcagcaaaagcttcagctacaaaaccagatgaacagccacatggatgaagagctcaaacagatacaagcccagcagcttgcagagtttacacaacaaattaagcagttggataaacgtctaaaaaagtgggtaaaggccgatgaggtcttaaaccgagatgtatcgttacttgagactattgatggcattggcacaaatagcgccatgaatatgctggcaagcatagaagacatcggccgctttgacaaagccaagcagcttgcctgttatgcaggtttaaccccacggattcgacgatcgggaacgagcgtcaatagttcatcaatctcaaaaacgggcaaccacaaactacgaaaggcgctgtatatgcctgccatagcagcattacgttttaatcctgtgattaaatgttttgcccaaaggctcaagcaaaatggcgtcacaggtaagaagatggtggttgctgtgatgcgtaaacttattcatatcgtgtttgctgtattgaagagcggcaaatcgtttgatcgagaatatgagattcgtgcttgattttataaatcaaacacggtat

SEQ ID NO: 7318 - DNA, 1363 bp, unidentified
  source 1..1363: mol_type = unassigned DNA; note = element_b5ac3fe
  misc_feature 1: note = core
  misc_feature 2..71: note = LE
  misc_feature 72..1103: note = CDS
  misc_feature 1104..1363: note = RE
  misc_feature 1123..1353: note = bridgeRNA
tatgggatggcccgcccctttttcgtgctggcgtaagctggctgggagacctgcggtaagggagctgacccatgttggagtttgcggttctcggggtggacctgggcaagaacagttgcagcgtcgtggggctggacgcggccggtcgggtagtcctgcgacggcggctgcaccgggagggcgtcgcaaagctggcggcggggtcgccgggctgtgtggtggcaatggaggcctgctgtggggcgcaccacctcggccgcaggctgcgtgaggccgggcacgaggtgcggctgatgtcgccggagtacgtgcagccctacgtcaaggcgcagaagaacgatgagcgggacgcggaggcgattgccgaggcagcgacccgtccaaccatgcgatttgtcgcgctcaagggcgaggcgcagcttgacatgcaaagcctgcaccgcgcccgtgaccggctggtgggagagcggacggcgctgatcaaccagctgcgcgccatcctgctcgagcgcggcatcaccgtgccccagggccgccgcaagctggaggtctacctcgagaccctgctggcgggggatcggatcccgctcagcccgcggacccggctgctggtggaggaccagcgggccgagtggcgggagctggaccggcgcatcgaggccttcgacgaggagttcgcggccgaggcccggagcgacgaggccgcccggctgctgaccacgatccccggcatcgggccgctgaacgcgacggcgctggtggcggcgatcgggagggccgagaccttcgggcgaggacgtgaccttgccgcctggttggggctggtgccgcggcagatgaccacgggcggcaagccgaagctgctggggatcagcaagcgaggcaacggctacctgcgcaagatgctgatccatggcgcccgtgctgcgctgccgacgctctccaagggcgagaccccgctcggcgggtggctgcgaggcctggctgcccgggcacacgtgaacaccgtggtggtggcgctcgccgccaagctggcgcggatcatctgcgccgtactgcgaactgggcagaagttcgagatgaaggcggcgacggtgtcgtagcccagaggatcagctgctcgcgctcacccggcgcggacggctggatgaggtctgcgggtggtggaagcgagatggcctgacagtcgaccggcgttctggaaccctgattcaaaaaatggcgctcgacgccgcgagttttatgaggaccgggacgcgcggatctccatcttggccgggagcttgtctccgaggtcggatacgttggcgtagactgatcagaccaggtcgtaaaaacccttgcagacggggcgggccatacg

SEQ ID NO: 7319 - DNA, 1577 bp, unidentified
  source 1..1577: mol_type = unassigned DNA; note = element_b5ae6cc
  misc_feature 1..3: note = core
  misc_feature 4..192: note = LE
  misc_feature 193..1467: note = CDS
  misc_feature 1468..1577: note = RE
tttagtacgctataaagtgtagtcggtatagttatcagccagatgttttatgataagggagtcagtaatacggcctgacgtggtccttttggaacttaagcttccgtaataagaaactgtcagcctctcccttatcattcacattcgtttacgcgagttgagtctgaaacaacactccggtatcttactaaaatgattaaggataagtgtgggcggccgccgattactgcaaaaggaaaggagaccgtttttattatgatcagtatagggatcgatgtatccaaactgaaaagcactttctgtatcctgaatgaatatggggaggtgttacagacagccagagagatctcacacacagaaacagatcttaatgaactgatcagacaggtcaaaagcttcggcggcaaagatgatgtccgggtgatcatggaagccaccggagcctacagcaaacctgtcctgtactctcttatagaagaagggatcttcgtagcagagatcaatcctctggcaatgaagaagtatcgttctaacatcaacttcaggggcgtgaagaacgatccgatcgatgcgttggccattgcctcctatggaatcgacaaatggcacaggctgaaggaataccaaaaagcagataaagaatatgcggccatgaaggctttatcgagacaatacctcagctatatgaaaccgcacgtttcccttacacagaatctcgatcatctgatcgatcaggtaatgccggggataaaggatgaatttgacggctatgatcccgcaacgggaaaagacaggcttaccgattttttggaagagttcgttcattatgattgcatcagatcgctcgggccaaagagatttgatgaaagattcaaaagatgggcaaagaaaaaaggataccgtccgcgtcagggtaagtccggcaagatctattccctggcaaaggaaggcatcccgactctggcatatgatccaatcagcagactgcttgtcaagcaggctgcgcaagctttgcgcagcatgaatcatgtgctcaatgaaatcttatcacagttgaggtctttggctaagcaaagaccggaatatcctatcatccgggcaatgagcggcgttggcgatgtgctggcgcccttactgattgcggaggtcggtgatccaagaaggtattattcaggaagcgctttgatcgcctgtgtggggatcgatgtcccgccttatgaaagcggacagttcaaggcttcagaaagaggcatcaccagaaaaggatccaagcagctcagaaaactaggctatcttatggtaaagaatctgagaaagatcaaaccggtaaaagatacagccgtctatgattactatctcaaaaagaagtccgaaagcaagaaggacaagcaggctatcgtcgccgccatgaacaaattcttcaggatctattacgcacgagcgatggaagcttacaagacggaataaaaaaacataattacaacaatcaacccgaaaagaaaaatcgtccgattgtgacgacttttcatagtggacaattagtttgtgtgaatttatcattgacaaaccttagcgag

SEQ ID NO: 7320 - DNA, 1574 bp, unidentified
  source 1..1574: mol_type = unassigned DNA; note = element_b5c3e15
  misc_feature 1..2: note = core
  misc_feature 3..334: note = LE
  misc_feature 335..1465: note = CDS
  misc_feature 1466..1574: note = RE
  misc_feature 10..268: note = bridgeRNA
gtataatgtatttaggttgttcgagggatacctataaacccttagacctacttctttacatctccagtctgataggagataattgttttattagattgagaggatgatcgttttctccttgagcgattctgctcgtacttgaaagactgatccctctctctaataagctttccgcgtatgagttggatgttggttgccttatggcttctctccgtatttagcacaaggtagtggcgcttattagatgagtggtctcccaatctgaaatcttttttcgaggtgttcttatgtttttgtgggcattgatattggtaaaaataatcatgttgcttccatgatggatgatactggcaaagtagtattcaaagctttttcctttcccaatacttcggatggcggaaatgcgttgttttccaaactcgcttcttattctttaaacccctctgattttgagatcggtatggaagctactggccactactggctttccgtttactctttcctctttgagaaaagtttccttctccatgttatcaaccctatccaaaccgatggatggcgcaggggaacagaaatccgcaaacgcaaaaatgacatcattgattccctcctgatcgctgacctgatccggtatgggcagttcgtggaaaccaggcttgcagacgaagctctgttttctctgcgtaccctgactcgcttccgcacttatcttgtggaatccatcagtgatttaaaacggaaagttgtctgtgttctggatcaggtattccccgaataccagtccatcttttccgacattttcggcaagacctcaaaagaaatccttctccagttttcttcaccgattgattttgaatcggtttcatctgaaaccttggcggaacttcttgcacaacttagcagacagaaagtcggcgctgcgaaagcggaacagttaaaagctgctgcatcctcttctttcggcgttacctttgccaaaaacagcttcacgttccagctcaaatcactgatcgagcagatttcttttattgaaaaacaggtaacagaaacggaagcggaaatttccagtatcatggaaaaactggaatcccccattactaccattactggaattggcactgtcacaggagcgaccattcttagcgagataggcgatatctccaaatttgacagccccagaaagctggtggcttttgccggtctcgatgccactgttacacaatccggtgaatttgaagcagcccacaatgtaatgagcaaacgcggatcaccttatttgcggaaagccatttttcagtccgctctaatcgcttcttttagagaccccgtattaagtgtctattaccagaaaaagagggcagaaggcaaacatcatttgacatgtgttggagctgttgctagaaaaatgtgcaacatcatttatgccgtcctaaaaaacaatcggccttacgttccaaaagtgtaaatccttttaacccatgccggcttgcctgacagcaggccttattgtcatactcttttttacaaaatttcttttgaattttttcaattatctacttgacttttaatagttg

SEQ ID NO: 7321 - DNA, 1421 bp, unidentified
  source 1..1421: mol_type = unassigned DNA; note = element_b5c4b29
  misc_feature 1..2: note = core
  misc_feature 3..79: note = LE
  misc_feature 80..1120: note = CDS
  misc_feature 1121..1421: note = RE
  misc_feature 1119..1408: note = bridgeRNA
tgttgggttggacggctcccaacggcatcgcgatgtgccagagtgagtttgttagaggactcattcgagggagccgaccatggaacagattacccacataggcatggacacgtcaaagaacgtttttcagctgcatggcgttgatgcggcagacaggccgatcctgcgcaagaggctgacgcgacggaaaatggtcgagttcttcgaggagttgccgccgaccgttgtcgccattgaggcttgtggcagcgcgcattactgggcgcgtgttcttggttcttttggccacgaggtaaagttgatcgcgccgcaactggtgaaaccatacgtcaagcgcggcaagaacgatgcagcggatgctgaagccctgcgcgaggcaatgagccgcccgacgatgcggttcgtgccgacgaagagtgccgaccagcaggcggcgctcatgcttgtgggcatgcgcaccaggctcatcaagaaacgcacccagcttgccaacgcgatccgaggcttcgctgcggaattcgggatcaccgcagcaacgggcatgtgccggatcgaacacctgctcgatcgcatcgcggctgacgaacgacttcccgaacttgcgcgcgaactgttcgcgcttcacggtcaggaatacgcgcagcttctgcacgagatcgagcgggtcgaggccaagcttatggaatggcatcgcaacgacgaatgcagccagcggctcgcaaatatccccgggatcggtccgatcggcgcatccctgctgatgatgaaagctcctgacccgcgcatgttcaagtccgggcgagactttgcggcctggatcggcttgacccctaaagatcactcgactgccggcaaagtcaggctcggaggcatcacgcgagctggcgatgaactcttacggagcacgttggtggtcggagccaccgccgtcgtccagcatgtccgtcgcagcggcggcaggaatgcctcgccttggctgctgggattgctagaacggaaaaagccgaagctcgtcgcagtggcgctcgccaacaagatcgcgcgcattgcttggaaactgatggtaagcggtgaggggtatcgaagagcagatttaggcgcaccaacggttgccgcgtgagagatcggcctgatacgatgagcaaatttgacgctatcgtactgagctgatgccagatcttgcaagagaagagcagatggtgcgatcgatcgatccaaggtgcgatcgatcgatccaaggcgtgtggcattccttcgggaccaatggctgttcgaagccgctgaggtgttaggaactcacgctgcggaaaccatcttggccagcgaccatgtgcggttgcacccaaaggccggacatatggacgcaagcgatccgatcaaatttttccgctcagcccttccaagagggagccgtccacata

SEQ ID NO: 7322 - DNA, 1350 bp, unidentified
  source 1..1350: mol_type = unassigned DNA; note = element_b5cc31b
  misc_feature 1: note = core
  misc_feature 2..68: note = LE
  misc_feature 69..1094: note = CDS
  misc_feature 1095..1350: note = RE
  misc_feature 1120..1347: note = bridgeRNA
taatgggatggtcacccccacctctcagcgagtacgctgctgagaactttcctcgggaggccactgccatgcacaacgtcacgatggttggaatcgatctgggcaagcattcttttcacctgcatgggcaggacggcgccggtaaagctgtattccgcaaaaaagtttcgcgcaagcaactgcttgagttctttgtgacattccacccttgcaccgtcgtgatggaggcctgcgccggcgcacattggatggcacgcaggctcagcgagttcggacataccgtcaagctgatttctccacaattcgtacgcccgttcgtcaagagcaacaagaacgacttcgtcgatgccgaggcgatttgcgaagccgcatcgcgaccatcgatgcggtttgttacgccaaagacagaatcccagcagactctgtcagcactgcaccgggttcgccaggctctggtccgcgaccgtgtgcgtactaccaaccagatgcatggattcctgcttgaattcggcatcagccttcccgttggccacgccgtcgtaaagcgactgccggccgtactggcggagcatcgactgccgccacgtctggtcgcgatcctcgatcgcctgcatgcgcacttcaaataccttacagagcagattcgcgatatcgagaaggaactcgagcggcaactcgccgatgactccattggccagcgtctgctgacgattcccggcattggaacgatcactgccagtctgcttgcctcggagctcggcgatggtaagcaataccgatgcagccgtgacttcgccgctgcggtcgggctggtgccaaggcaatacagtactggtggaaagtcaaatctgctcggaatttccaagagaggggacaagaatatccgccacctgctggtccagtgtgcccgagcatttatgctccggctggacaagcagtcgggccgtatggccgactgggtgcgagcgatgctggggcgacgccactccagcgtggtcgcctgtgcgctggccagcaagctggcacgaattgcatgggcgatcgtaagccatgacactgtattcgaacgacaggcgcccgctgcggtcgcgtaacgatgtgccgtcgcacttttaacgaattcaacccacctggttttgcgactgctgattattgatgacgtaaacggcaaaccggcctggcggacaccctgaaaggttaacgagctcctgaagctgcgtctgttatcaggaccgcctggcgcgattctcatcgtggcgcggggagtagtccccacaacgacgccggatagatttgtgcaagccatccacccgtcaagatcagcattgcaaaaatgggggtgaccataga

SEQ ID NO: 7323 - DNA, 1223 bp, unidentified
  source 1..1223: mol_type = unassigned DNA; note = element_b5ce635
  misc_feature 1..2: note = core
  misc_feature 3..221: note = LE
  misc_feature 222..1208: note = CDS
  misc_feature 1209..1223: note = RE
  misc_feature 12..191: note = bridgeRNA
cttgtatcttattccatgtcatggttagctaccctgacaagagatagaagcagcttgtgcccagccttaaggatcaaccttgccgcgtagataaagccttctgtctcgcttctgatgccaacctggacactgaacggtagccaagggcgtagaccctgtatgtacaaggcaagtgggctcagttggtggtttttatatgtatccattaattaggttttactatgtttttcattggcattgatgtctctaaagccaaactcgattgctgtctgttgctggatgttgccagcaacaagcgtcgcgccaaggtggtcgccaattctaaaaccgggattgccgatctattagcctggtgtattaaacagcaggcgcctgtccacgaactccatgccattatggagggtaccggtgtgtatcacgaacaggccgcattggctttatccgatgcgggcgcggcggtgtccattgtcaaccctgcgcaagtcaaggatttcggccgtagtctcggtgtgcgcacgaaaaccgacggcgtcgacagctttgtattagcccgttacggcgccttgctcaaacccaaaccctggacgccacccgcccaggaagctcgcacccttcaagccctgttgtcacgccgtgaagcaattgctcaggatttgcaacgcgagcgcaatcgtctggaaaaagccgacgccaccgacactccgctgctaatccgccaatccatcgaagattcgattgactttctggaaaaacaactcgccaagctccagcaggacattgacgatcacatcaacaaacatcccaacctcaaagacgatcgggatttgctcattagcattccggcggttgggccgcaagtaggtaatcatttactgtccgccatgcacaatcatgaatttcaatcggccgagcaattggcagcctatcttggcttggtgcccgttgagcggcagtccggtacctctctactgggtcgccctcgcttatccaaagccggacctgcacgtattcgtgcggttttgtatatggccgccattgtcgctacccaacataatccgcacctcaaagccctttaccagcgtttgcaagaacgggggaaaaccaaaatgtctgccctcggggccgttatgcggaaactggtccatttgtgcttcggtgttcttaaaacacgccaaccttatcaacctgattatggatctacggcttgacttttaagatggtat

SEQ ID NO: 7324 - DNA, 1521 bp, unidentified
  source 1..1521: mol_type = unassigned DNA; note = element_b5d5232
  misc_feature 1..2: note = core
  misc_feature 3..260: note = LE
  misc_feature 261..1463: note = CDS
  misc_feature 1464..1521: note = RE
  misc_feature 6..219: note = bridgeRNA
cttgtatgatacagtcatagccctttgacagattaaagagtaatttctatcattaagaatgatagaggttacgcaaacatcccttgagctttcaggctcgcatatggagtttgtccgcctctatcttttggtttaggctccaattagttagttgtccttcggggaccaatcaaaaacaaggttgggcttaacaaaagattagaggcaattgtcttaactctgtcgtttatcaactaatccaagacaactaaaggagttctatgaccaaattctacttgggcgtggatgtgggcaaatacaaccatcaagccgcgctcattaatgagaatggtttggttttaacgccagcctacaagtttgccaatcagagccaagccattaacgaattatgccaaacaattaaaaaacagctgcctgataaacagacagctgtaaaagttggcatggaagcgaccgggcactactattggcatttaagagatgagcttttaaagcaggggtttgaagtggtggtgtttaatccgattgagacccaaaccaaggccaaattaaaattaagaaaagttaaaaatgacagaatagacagtttaattattgctgatttggtaagagaaaaggacttaaagaaacaaggtgaaacaacaagttttaaccaaccagacgaacggctaaaagaattaaggcaacttactcgttttactactcgtttaaagaaacaagccagattctacaaacaaggaatcactgtcctactagagcgaatctgccctgaatttgagagttgttttaagaatgttttcagtaaaacagctttagttgttatgcgtgaatattttatcaaaaacatttctgaaaaaaaattaatcaacttaatggctaaaacctcgcgtggacgaattaaaaccgagcaagccaaggaaattattcaagccctaaacaattctttgggtttatcttaccgcaatgagagcgctaaattggaattatctattctcttggacgatctgggaactaaattaagccagataaaacaattagagcaaagaattaaagacatgagcgaaaatatcaaagaggttgagttaattgcttctattaaaggagtttcagaaagaatggcctcggtaatttacgctgaaatcagcaacattaatcgttttgagaaaaaagaacaattaaccgcctttgccggtttagacccggcggtcaaacaatccggaacttatttaagaaaacaaggcaaccatatttccaaaagagggcctaaatatctccgtcaagaactttactttgccgctaaaacagcaattatctttgaccctgaattaaaggcctactatttgaaaaagaaaactgaaggtaaacattacaactgcattatgattgctatttccagaaagattctaatgagaatttgggcagtgttaaaacaaaaaagaccttacgagttaaggactgcataaagtcttttttggaactaacaacaaaggcacaaatttacttgactgaatcatagttagt

SEQ ID NO: 7325 - DNA, 1374 bp, unidentified
  source 1..1374: mol_type = unassigned DNA; note = element_b5dba49
  misc_feature 1: note = core
  misc_feature 2..91: note = LE
  misc_feature 92..1123: note = CDS
  misc_feature 1124..1374: note = RE
  misc_feature 1149..1369: note = bridgeRNA
caatggaatggactcctcctcccctcaacggcatctaggtgccagactggtaagtgtgattaaaccagtcaacggagaagaggagtccgagatgaagattagccgcattggcgtagatctggcaaagaacgtgtttcaactgcatggggtggatggccgcgatcaggtggtgttcaagcgccgattgagacgagaccagtggttgcgcgttctgctaaagaacacggatagcgattgtttgattggcatggaggcctgtgccggggcacatcactgggcccgcgtgctgcaggctcgaggctatcgtgtcagattgatcccaccgcagttcgtcaagccgtatgtgaagagccacaagaatgacgcgaacgatgcggaggcgatctgtgaagcgatgagccggcccaacatgcggtttgtgtccatcaagcgggttgagcagcaggacatccaagcggtgcatcggattcgctcggagttgctgacacagcgcacggccaaggcgaaccagattcggggtttggtggctgagtacgggctggtagcgcctaagcaactaaccgctctgcgctcggcgatcccttgttggttggaggatgcggagaatggcttgacggtccggttccgggcgctgttacacgatctctggcaggacttgctgggtctggattgtcgggtgcaggggctggacgcagagattgaggcactggctaaggccgatccggttgcccagcgtcttcagcagttgcggggcgtgggaccgttgatcgccaccgcgttggtggcaagcgtcggtgacggccaacagttcggccggggtcgccagatggcggcggccctcggcctgacgcccaagcaatacagttccggtaatcgggagatcttgggcgggatcagtaaacggggcgatgtgtatctgcgcagcatcctgatccacggcgctcggtcagtggtcagtcatgccaagcataaggaggatcgcttgagtcgatggatgacggaactggcaaagcggcggcatccgaacgtggccgcggtggccttggccaacaagaccgtccgtatggcctgggccatgatgaccacgggaaccgactatgaccctgagtatgtgacggcatgagtcagaacacgaggaggaaccgatagacgattgcgaagtaatctgaatgatggcaaacaggtcgaaccggcgtcggcacaacccgtaaatgtctgggtgctacgagcacgacaaagcgattgggagtcgatgcgcgaatacaccattatggcccggcatcagcgtatgccaacctcaaaggccggatatacgtatgcagtcgagcctaccgccaacaatcagactacttgcatcgaggaggagtccatata

SEQ ID NO: 7326 - DNA, 1223 bp, unidentified
  source 1..1223: mol_type = unassigned DNA; note = element_b5f051a
  misc_feature 1..2: note = core
  misc_feature 3..221: note = LE
  misc_feature 222..1202: note = CDS
  misc_feature 1203..1223: note = RE
  misc_feature 12..192: note = bridgeRNA
cttgtatcttaatccatgtcatagttagctacattgacactgagacagaagcagcttgggcccacccttaaggttcaaccttgttttgtagatcaagccttctgtctcgcttctgatgccaacgtgaacactgaacggtagccaagggcgttgaccctgtatgcacaaggcaagtgggctcagttggttggttttatccctagtcattaggagtaacctctatgtttttcatcggtattgatgtttccaaagccaaactcgattgcagtctattgctggatgccgccaacagtaagcgccgtgccaagtcggtctccaattccaaaacgggtattgccgatctcttagcctggtgtgccaaacagcaagtcattatccatgaactccacgccattatggaaggcactggtgtttatcacgaacaggctgcattagccttgtccgatgcgggcgtgaccgtatccattgtcaatccggctcaggtcaaggattttggtcgcagccttggcgtgcgtactaaaaccgatagcgtcgacagcttggtattggcccgttacggtgctttgcttaatcccagagtatggactccgccatcacaggaagcacgtacgctgcaagccttgttagcacgacgtgaagccattgctaaagatttgcagcgcgaacacaatcgtctggaaaaagccgatgctaccgatacgccagtattgatccgtcagtcccttgttgagtccattgcctttctcgaaaaacaactcgccaagctccagcaagagattgacgatcacatcaacaaacatccaggtctgaaagccgaccgggacttacttaccagcattccggccgtcgggccgcaagtcggcaatcacttactggcggttatgcacaaccacgattttcaatctgctgaacagttggccgcttatctgggcttggtgccggtagagtggcaatccggcacttctgtgcttggacggcctcgtttatccaaagcaggcccagctcgcatccgtgcggtactctacatggccgctattgtcggcactcaacataacccacatatcaaagcactgtaccaacgcctgcaagaacgcggtaaaaccaagatgtctgcgctcggtgccgccatgcgcaagctggtccatttgtgctttggtgtactaaaaactcgccaaccttatcaggctaattatgccgtttaaggttgactttcaagacggtat

SEQ ID NO: 7327 - DNA, 1441 bp, unidentified
  source 1..1441: mol_type = unassigned DNA; note = element_b5f1653
  misc_feature 1..2: note = core
  misc_feature 3..222: note = LE
  misc_feature 223..1425: note = CDS
  misc_feature 1426..1441: note = RE
ctgatataacgcgcagagaggtcagaatcgcaactgacctcggcggggagaccggcaatcggctatacggcattcgaccgacgctcctagtgaccggccctctctcttcgcctgcgagcggtgattgggatccaacggcatgaccggtgatggagcatcagcccacgcttgggcggagacctgcgagtacccctggggtcgcaaccgacacaggaggtgttcatgagcgtatccgtgggtgttgacattggcgcctacaagcacgccgcggcggtgtgccgccagggcgagcgagaggccgagcgcaaggcgctcaagatctcggccaaccggcagggcttcgaagagctcgaggcctggatgaccagacaacccgagccggtgggtacggtggtgatggagtccagcggccactactggttcaacctggccagtcacctgcgccggcgcgggtacgaggtggcggtggtgaacccgctggaggccaagtacttcgccaagagccggctgcagcggagcaagagcgacccggccgacgcgcgcacacttgcagcgctgggaatgcgagaccaaccgaggacctcagaccccttggggggagccgaactcaagcaggcgtcgcggttcgcgatgcgcctggtgcgcgagcaggcccaggcctgccagcggatccagcgcttggtggacattggcttccccgagctgcgcgaggcctgggacgaccctacctgcatgagcgcgctggccgtattgcgcaaggccccatcagcgaaggcggtggtacggctgcggcttgacaccctggccaaggtgaagcgcccaggtgatggagcacgggcgattggcgcggccaaggcgacgcaactgaagcagttggcaaccgagtcggtggcggcgcccgaactggaggcgcaggtcaccttcgagatgcaggtgctcatctcccaatacgacctctatgagcagcagatcgcggccgccgagaaaaacctgcagagcctattggacggggagaccgcgcggcggttgctgaccatcccgggcgtgggccccgcgaccgcggccacgctcatggccgagattggagacatctggcgcttcgaggacgtcgaccagctgctggcctacgccggcgtccatcccaaggagcagagctcaggcaagaagggcgccaaccccgagaccagctggaccatggccaagaccgggaacgcctacctgcgggccgccgcttaccggatggccgtcgttggtatccagcacaaccccatcatccgcgagcactacgcgcgcaagcgggccgccggcaagtcaaaaatgaacgcggtcggccactgcatgagcaagtcactctcgctcgtctggggtgtctggcggggtggtaaggacttcgacccagccaaccggccgggcctcagggcttgacaagaccctatgggat

SEQ ID NO: 7328 - DNA, 1370 bp, unidentified
  source 1..1370: mol_type = unassigned DNA; note = element_b5f9c51
  misc_feature 1..3: note = core
  misc_feature 4..87: note = LE
  misc_feature 88..1122: note = CDS
  misc_feature 1123..1370: note = RE
  misc_feature 1140..1357: note = bridgeRNA
tgatgctgtggacggcgcccactctgcggcatcgaagtgccatagggtggctgctgcagagcgcaaccacgatgaggggagccgtccatgggcgaggttatcacgattggtcttgatacagcgaagtcggtttttcaggttcacggcgtcgatgccggtggcgcggtggtaatacggaagaaggtcagccgagcgaaagtcttggagtttttctcatcgctaccacccagcctggttggcattgaggcgtgtccaaccgcccatcattggagccgcaaacttcaggcgcagggccacacggtgaggctgatgccgccgagctacgtgaaggcctatgtcaagcgcagcaagaacgacgccaacgatgcggccgccatctgcgaggctgtgacacgaccgtcgatgcggtttgtgccgacgaaatccgaacagcagcaatcggcgttgatgctgcatcgcagtcgccagctcctggtgcgtcagcgcacgatgctgtcgaacgcgatccgcgggcatctggctgagctggggatcatctctgccaagggccgcaacggtacggcagagctgatcgagattctcaccaatgagaaggatgatcgcatcccagcggcagcgcgcctgagccttaccattcttgctcgccaatacgcggcgatcacgaccgagatcggcgccatcgagaagcacatccatgcctggcaccggtcgtgtgaagaaagtaggcggcttgaggaggtccccggtgtcggcccgatcgtcgccaccgcgctggtggccgagataggcgattggacagcattctcgtcagggcgcagcctcgccgcctggatcgggttagtgcctaggcagcattcgaccggcggcaaggagcggctcgggaggatctcgaagcaaggcaatcgacacttacgatggctgctggtctgtggcgccatggcggtcatccgatacgcccgacgacacggcacgaaacggccctggctcattcgcctgatggggcggaggccgaccaaagtcgctgccgttgcgctcgccaacaagatcgcccgcatcgcctgggccacaatggtgcggggcgagcggttcaaggaaatgaagttgctgtcggccgccgcataggcctcaaccagagcaggagcgaattggcgagggcatgacgacgtaatgcagatacggtcgttccgagggttaggagagcccgtttggggtcaacgcacttccaagtgcgcggtttcgattggggcctgatccgcggagagcattagggccagcggccgaccgcgccgcacaaacagcccggacacgtgaccgcacccgaccaatctgcagctacgtaagaacgttcttgccaaggcgccgtccacgcg

SEQ ID NO: 7329 - DNA, 1169 bp, unidentified
  source 1..1169: mol_type = unassigned DNA; note = element_b5fb022
  misc_feature 1..2: note = core
  misc_feature 3..204: note = LE
  misc_feature 205..1068: note = CDS
  misc_feature 1069..1169: note = RE
  misc_feature 3..180: note = bridgeRNA
cttgtatgtttagacttgaaggggtgggcggcgactaaaagcccgattccgactctagccagtacggaccgtgggagacttctcgtcccgccctttctaccctaagcgccgataaggaattcatcgggaaaaccgacaatagaggcaagccagcgctgggatagaccccgacaagcccttaaaccctagctccgaggattagttatgacaatccttacttcaccaacggttgtgggtatcgatgtggccaaggccgaaatcgttgcctaccgcgaagacctcaacgccactcaagccattgccaacgaccgcgatgctcttggccgctggctcaacacattacctgccaacagctcaattgccctggaagccaccagcacttaccacttggacacagctgaactcgcccatgaaataggacatcgggtttacgttgtagacgcttatcggttgagccattaccgcgaaagcattggccagcgggcgaaaaccgacccttgtgatgcacgtttattagcgcgctacctgagcagcgagcagaaacggctacggctctggagtccacctccgcaggcttacaagttattgaaaagcttgctacaccgacgtgcagaacttatcaacttgcgtgtaagcctcacactgagctggtcaggcgaaccgcttttgaaagacgagttggcccagcagttaaagtccttcaaacaagctgagcaggtcattcagaagttgctgcacaaggtcagcaaagaggcgggcatcaccgaaaatatcaagcgctgcaaagccattgagggagtgggtgatcttacggctactggtctagcgacagccttcatgcgcggtcagttcgccaatggcgatgcattcatcgctttcttggggatggatctgagaccaaaagactccggaaaaaaggccggccctcggcacttgagtaaaagggcgattcagagttgcggcgccttgctcacaacgcagcgatggccgctagccgatctgcgacctggaaaccgtactacgagtcctacctggcccgaggactggcaaagacccaagccctggtaatcctcgcccgcaagctctgccgggtggcattcgcgctgatgaaaaaccagagcgaataccaaccgaacttaaggttgcagggtttacctgcaacatagaat

SEQ ID NO: 7330 - DNA, 1242 bp, unidentified
  source 1..1242: mol_type = unassigned DNA; note = element_b5ff37b
  misc_feature 1..2: note = core
  misc_feature 3..101: note = LE
  misc_feature 102..977: note = CDS
  misc_feature 978..1242: note = RE
  misc_feature 977..1229: note = bridgeRNA
tgatggggtggacggctccctcctttacggcatctatgcgtcaagatggagccatcaaggatggagccatcaagcaaccatcaacgaagggacccgctctcatgcacgctaccacgatcggcctggatattgccgagtggaggtttcagattcacggcgtcgatagcgtcggcagcgttgtgatcagcaaggccctgacccgtggtcgcgttgtcgcgttcttcggcaagatcgatccctgcctgatcgggatgaaggcctgtgccatcgctcatcactgggttcgtgagcttcagaccctggggcacgacgtgcgtctcattccgcccgcctatgtgaagccctacggtcggtggaacaagaacgacgcggctgatgcggcggccatctgcgaagcggtgatccgcccctgcatgcgtttcgttgccgtcaagtcggcggagcagcaggccgcccgctccctgactcgggtgcgcgagcagctcattgcccagcgcaccgctacggtcaacgccttgcgcggtcatctggcggaattcggtatcgtggaagccgctggccccccccgatcctggcggctggcgacgatcccggggatcggcatcctgaccgcggctaccttcgctgccgccgtccccgatccgactttcttccgctccgggcgggagttcgcggcccggctgggcctggtgccgcgacagaactccacgggtggcaagctgcgtctcggacgcatcagcaagcgcggggacgcacgcctgcggggcctcttggtcgtctgtgccagcagcgtcctccaggggctgacccgacgacagagcgcagctgcccgggcaccgtggctggccagactcctggaaagcaagccatgcatggtggtcaccatcgccctggccaacaagctagcgcggaccgtctgggctctgatggtccggaaccaagcctaccacccggaacggggcttcctcggcgtctgatcggcgacaaggacgagccaaacgcaaagccaccaggatacttgcaaggaagatcgactgatggctgtgacggcgtcaccgcaggccggccaaacccgtttccctcagcggagcctcaagcctgtgcgtttgatcgggaccggcaggcgcaacccatcagggccggaggtcatgataacgaccgcacaaaaggccggacacgtgaccgcaagccttatgcggccaaatccgttttttcccttgcaagacaggagccgtccacaca

SEQ ID NO: 7331 - DNA, 1411 bp, unidentified
  source 1..1411: mol_type = unassigned DNA; note = element_b6037fa
  misc_feature 1: note = core
  misc_feature 2..319: note = LE
  misc_feature 320..1396: note = CDS
  misc_feature 1397..1411: note = RE
  misc_feature 10..313: note = bridgeRNA
ctgtgagtcttggtagtggctggtctgggaccggctggcagagtaggtgttggccgtacccatcccgtgatcgtgactcaacccggcggtgacccacccctctttggtggtgtcttcgggccgatttgtccgatcacatgggtggtgcggccggcaccagcccggcccacctcggtaacttgatcagaaggctgtccacccccggaaaaccgggggcgtgactcatcacagtgttgttccgaagtgactcctacccggaccggtaccggccgcaagcggccggtcaacctatcggtcaaacaggaagcttcgaaccgccatgtccattgtcgcgcacttatacaacttcttcatcggcgtcgatacccacgccagaaaccacgtctacacgatcatcaccaacaccggtctcctcgtcgctacccgcagtttcccgacgtcgcgggccgggatcaaacgggctctgaactgggctggtaggcgcaccagcggtgacctcgacaccctctgggttgtggaaggaaccgcatcctacggggcggtgctgaccgggcacatcgccgcggccggatactcggtcgtcgaagccgggcggatggatgccaaggccaggttcggtgtgggcaagagcgacgagctcgactcctaccggatcgcggcatccgtgttggcgttgcgcactgaccagctgcggtggccgcgacaaggcgcgggtgtccggcaggcactgcgtgtcctgctggcagcccgggacgcgatgaccacggaacggactcggatgatcaactccctgacagctctggtgcgcaccatcgatctgggcatcgatgcccgtcagtcattgactgatgaccaggtcacagagatcgcgaaatggcgggcccgcaatgaggacattgatgtgtccaccgcccgtgatgaagcgatccgtctggccaaacgggtcctggctttgaatgacgatctgcaggacaaccatgacaggctcgccgagctcgttgaagccagcccggccgcggtcttgctggccgagcccgggatcggtccgttcagtgctgctgtgtgcttcaccgcgtggtcccatcccggtcgggtacggaacgaggctgcgttcgcagctttggcgggggtcaacccgatccctgcgtcgtcgggtaacacgcaccggcatcggttgaatcggggtggggatcgacagttgaaccgggctttgcacacggtgatcacgaaccggatgatccacgatgagaggaccagggattatgttgcccagcgctttggtgaggacccgacgaagaagtcgaagagggagctcaaacgcaagctcaaatggtatctagcgcgtcgggtcttcaggattctcaacgggctagaaactagtcccgcgccggcttgacagacatagaaggat

SEQ ID NO: 7332 - DNA, 1368 bp, unidentified
  source 1..1368: mol_type = unassigned DNA; note = element_b606d21
  misc_feature 1: note = core
  misc_feature 2..236: note = LE
  misc_feature 237..1232: note = CDS
  misc_feature 1233..1368: note = RE
  misc_feature 60..223: note = bridgeRNA
cctttagatttgcttaataaaaaaatgataaatttatatatacgagagaagtagaataaataaacaaccaaaccaacaaagtgtaccatcgtaggggcaaagcatcaaggcttataattcgattaggactttgttggttatactaagaagtatcaaattagtaattaagacgttcgggtctagtatcaaggtttagataatactttagtaagtggttgttataaataatttttattatgaacaaatttaagcattttattggaatagatatttcaaaagagtatttcgatgcaacgattttaggtgaatcaaaacaatcttcacacaatcaatttagtaatacaaaaaagggaattactcagtttttgaaatgggtaaggcaagaaaaatgttctatggatgttactctaatttgtatggaatatactggtatttataataagataatactagatattttgataaataaatcgttttatgtctgggttgagatgtcatatcgtattattcgtagtagtggaattcaacgaggaaaaaatgataaaattgattctgagagaatagctctttatgccaagaaaaatcaagaagatgcaaaaatatttaaagcatcggataaggttttagataaaatacaagggttattagggcaacgagaaatgattttatctcataaaacggctttacaagttagaacaaatgaattgaaagtgtatgatatagaagtttataatgtattatcaaagaatattaaagcaatcataagatcagaagaggtagctttaaaagctattgaaaatcagatagatgatttaattaaagagaatcaagaacttcaggtattatataatcatatcacttctgttcctggagttggaagagtaacggctttgtttttaatctgttttacaaatgcttgtacaacctatgaaaacccaagacaattagcctcttattgtggtgtagttccttttgaatatacatcaggtaaaagtgttcgtggtagagcaaaggttcattttatggcaaataaaaagcttaaaaaactattgcatttatgtgctctatctagttctaaaaatgatattgagatgaaacaatattatgataagaaagtagctgaaggtaaaagtaaaatgcttgtattgaacaatgttagaaataaacttatacatcgtatttgtgcttgtgtaaaaaataatagaccttatgaaattagattaatagcataatttaattttacatataatataaaaacaaggataaccacaagttacccttagggatttgtatgctttgttttattaaaatattctcaaaaaacaacaataattatttctaatttttaattggttttgtcatagtaat

SEQ ID NO: 7333 - DNA, 1342 bp, unidentified
  source 1..1342: mol_type = unassigned DNA; note = element_b6094f1
  misc_feature 1: note = core
  misc_feature 2..74: note = LE
  misc_feature 75..1142: note = CDS
  misc_feature 1143..1342: note = RE
  misc_feature 1111..1333: note = bridgeRNA
taatgaaatggtccgccgccttcatcgaataagaagtgtggcagcattgacgcgagaaaaaggaggagcgttccatgacagcacacgtttgcggaatcgatctgggaagacagtatttccatctggttggcctgagtaaggaaggccacgttgtccttaagaagcgactaagccggaagcagctgattactctgaccgtcaacatgcctagttgcttgatcggcacggaggcttgtgctggtgctcactttcttgcacgcgttctgcgagcgcagggtcacgatgtcaagctgatgcctgccgaatacgttagacccttcgtgaagtccaacaagaacgactacgtcgatgcggaagctatcgctgaagccgtacagcggccgacgatgcgctttgtcccgatcaagaacgaagctcagctggatcttcgagctcttcaccgcgtgcgcgatcgctggatggggaggcgaacggccgtcatcaaccagattcggggtttcatgctggaacacggaatcacggtatcaacaggaccggctcatctgaagcgtcagcttccaacgatcctcgaagacgcgcagaacttgctctcgactcgcatgcgcgcgctgctcaccgagctcaggcttgagtgggagaagctggaagaacagatcgacgcgatgaaccgggagttcgcgcagtttgccgccaaggaagaaggatgccggaggctcctgactatccccggtgtcggtcctctgacggcaaccgcgctggttgccgcgatcggtaagggtactgcatttcgaaaagcccgcaacctggccgcatggcttggactggtgccacgacagcattcaacaggcggcgcaacccggctcatggggattagcaagcgtggcagcccctatctgcgaagactctttattcatggcgcccgtgcggttctggcctcggtcaaacgcgaagatcatcggtttggagactggctcgaccgcctgcaggctcgatcccctcaaaacgtggcggtggtggcaatggcaaacaagatggcacgaatggcatgggcggtactgacaagagatgattcccactttcccttacgacgattacgacgatatctaatgttcccaccaggtttgcacgtaagttgcttatgactgaacaggtcaaaccggcccaccctgaaccttcatgcaaaaatggtccgcagctgaggccgttgctgtaattaggagagggagggcgcggaattcatcatggctcgaagcagacgcatcgcttcaacagaagccgaatacattgagcagaccacttcgtcatcaacgatcttgcttgcaatcaggcggcggaccataca

SEQ ID NO: 7334 - DNA, 1371 bp, unidentified
  source 1..1371: mol_type = unassigned DNA; note = element_b614316
  misc_feature 1..3: note = core
  misc_feature 4..87: note = LE
  misc_feature 88..1119: note = CDS
  misc_feature 1120..1371: note = RE
  misc_feature 1142..1358: note = bridgeRNA
tgatgctgtggacggcgcccactctgcggcatcggagtgccatagggtggttgcgattaaagcgaaccactatgaggggagccgtccatgggcgatgttatcacaatcggtctcgatatcgcgaagtctgtcttccagattcacggcgtggatgctgatggcgcggtagtgatccgcaagcgggtaagccgtgccaaggtattggagttcttcgcggctgtgccgcgatgccttgtgggcattgaggcgtgtccgagcgcgcattattggagccgcaagcttgaggttctcggccatacggtgaggctgatgccgccgagctatgtgaaggcttatctcaagcgcagcaagaatgacgcgaatgatgccgctgcgatttgtgaggcagtgacgcggccgtcgatgcggttcgtatcaacaaaatccgaacaacagcagtcggggttgatgctgcatcacagccgccggcttttcgtccgtcaacgaacaatgctatcgaatgcgatccgcgggcatatggccgagctcggcatcatctcggccaagggccgcaatggcacagccgagctgttggaggtcatcgcgaacgcgaaagacaattgtatccccgcagccgcacggttcagcctcgaagttcttgctcggcaatacatagctatcgcaacagagatcggagtcctcgagaagcgcatccatgcctggcaccggtcatgtgaagagagccggaggctcgaggaaattcctggcgttggtccgatcgtcgccaccgctctcatcgccgaggtgggtgattggaaggcgttcgcgtcgggccgcagtctcgcagcatggatcggcttggttcctaagcaacattcaaccggcggcaaggagaggctcggtggaatatcaaagcaaggcaatcgatatctgcgctggctgctcgtagccggtgccatggctgtcatccgatatgcgagacggcacggtacgaagcgcctctggcttacgcgcatgatggagcgtcggccgatcaaggttgctgccgttgctctcgctaacaagatcgcacgtatggcttgggccataatcgtgcgcggagaacgcttcagggagccgagattgctgctggcggcctagccgatcaggaggctaacagattcaacgaattggcgagggcatacgacgtaatgcagatacggtcgttccggggatcgggaaaacccgctagggtcatcgcactccaagtgcatgtgaacgattgggaccagatccgcgcagagcattagggccagcggccatccgcgccgcatcaacaggccggacacgtgaccgcacccgaccaatgctgcagcaacgtcagaaagttcttgccagggcgccgtccacacg

SEQ ID NO: 7335 - DNA, 1435 bp, unidentified
  source 1..1435: mol_type = unassigned DNA; note = element_b6143cb
  misc_feature 1..5: note = core
  misc_feature 6..230: note = LE
  misc_feature 231..1367: note = CDS
  misc_feature 1368..1435: note = RE
  misc_feature 11..225: note = bridgeRNA
gtcctacctttcaagggtggttgctctggtcattcgtaagatcggagggcccgggggctttgggtatggctgcatggtgggcgccttttggatggctcaaaggacttggccgcccggagccccgcgacgactcgaccgccaattgggagacgcgacccgatcgctgctgtaggacaacgtcggcgaggtcgtctgcgggagtgaagtgacgacgagctggtggagggaacgtgcccgagatctgggccggagtggacatcggcaaggaacatcaccactgcgtggtgatcaacgcggacggcgaacggttgctttcccgccgggtcctcaacgacgaaaccgagctgctccagctcatcggcgatgtcctggagatatctacggatgtgctgtgggccgtcgacctcaaccacggcgccgccgccctgctgatcggcctgctcctcggccacggccagcccatggcctatctcaccggcctggccgtccaccgcgcctcggtcacctacaagggcgagggcaagaccgacgcgaaggacgccttcgtcatcgccgaccaggcccgcgtccgccgcgacctcggcctcctgcggcccggtgacgagatcgctgtcgacctgcgcaccctgaccgcccgacgcttggacgtggtcttcgaccgcacccggcagatcaaccggctccgtgcccaactgctggaggtgttccctgcgttggagcggtcgctggacctggtcaacaagggcccggtgatgctgctgaccggctaccagaccccggccgcgatccgccgcgccggcgtcaagcggatcgagacctggctgaaaaaccgcaaggtccgcggtgccgccgcgctggcgaagacggctgtggaggccgcccaggcgcagatgaccgcgctgcccggcgaaaagctggcggccgccatggtggtccgcctcgcgaagggggtgatggcccttgatgaggagatcgtcgagcttgacgccctgatcgaggccacgtttcgcgagcatccgcacgccgaggtgatccgcagcctgcccggcatgggccccaagctcggcgccgaattcatcgccgcgaccggcggtgacatggacgccttcggcagcgccgaccgcctggctggcttcgccggccttgccccaggccccgtgactccggccgcgtcagcggcaacctgcgccgcccccggcgctaccaccgcggactgctgcgctcgatgtacctctcggcgatggtcagcatcacgacatgccccgcgtccaaggcgtactaccagcggaagagaagcgaggggaagggccacaagcaggccctgctcgcgctcgcccgccgcaggctcaacgtcctgtgggcgatgatccgtgacggacagtgctaccaaggttcacctcccgccacgactgcggcttgacatcacgattgggaa

SEQ ID NO: 7336 - DNA, 1403 bp, unidentified
  source 1..1403: mol_type = unassigned DNA; note = element_b6155cd
  misc_feature 1..2: note = core
  misc_feature 3..112: note = LE
  misc_feature 113..1141: note = CDS
  misc_feature 1142..1403: note = RE
  misc_feature 1161..1398: note = bridgeRNA
agatgccgtaacggtcctccgctggagcgtgaccggcggggcgtctgtccccagagtgatggcgtttgcggggtccgagcgggtcggccccaggcatcatcgagggacagccatggagcactatgccgggatcgatgtatcgctggaacggagtagcgtgtgcgtggtcgacgcgacgggccgcatcatccgtgaggccaaggtgccaagcgagccggaggcgctggtcgccttcttcggccagctcggcctgcggccaacccggattggactggaggcggggccgctctcgcagtggctccacgcgggcttggcgcaggtcggcttcgaggtggtgctgctcgagacccggcacgtgaaggcggcgctctcagcgatggtggtcaagacggatcgcaaggacgcccgtggcattgcccaactgctccggatgggctggtaccggccggtgcaccgcaagtcgcctccggcgcaggagatccgggcgttgctcgtcggacgcaagctgctgcaagccaagctgcgggatgttgagctgagcatccgtggcatcctgcgcggcttcgggctcaaggtgggtgaggtcagcaagggccggttcgccgccagggtcagggaactggtcgccggccacgagatgctggaagcggtcatcgccgcgatgctgcaggcgcgcgatggtttgcagaccgaattcatgcgcctgcatcggcggatgctggccatcgtacggggcgatgcgatctgccgccggctgatgacggtgcccggcgtgggagcgctggtggcggtcaccttcaagacggccgtcgacgatccagggcggttccggacggccaaggcggtgggggcacacttcggcctcacaccaaagaggtaccagtcaggcgagaccgacgtgaccggtgggatcagcaaagtcggggatgcgatggtgcgcaccgccctctacgaggcggccaacgtgatgctgacccggaccacccgcgtctcgaccctcaagcgctgggcgctggaggtcaccaggcgccggggcatgaagcgggcgaaggtggccctggcgcgcaagctggccggcgtcctgcatcgcatgtgggcgaacgccaccgacttccgctggggcaaggaggtgatcgcgtagcacggcaccgagaagaacagattcggggcagggccgagcggtcctgctcctccgaggtcccgtcgccgggacgcgggaatcggtgagaccgggagtagtgctgtggacgcccagtccgggtgaaccacgcgccctagattggtccaccggctcccttctgaccgcatgatgtggcggctctggtgctgaccacggacggaagcatgacaccggcgacgggataatcgctcgaaggacttgacgcccaacggaccgttacgga

SEQ ID NO: 7337 - DNA, 1423 bp, unidentified; identical to SEQ ID NO: 60
  source 1..1423: mol_type = unassigned DNA; note = element_b61587d
  misc_feature 1..4: note = core
  misc_feature 5..479: note = LE
  misc_feature 480..1409: note = CDS
  misc_feature 1410..1423: note = RE
  misc_feature 1..174: note = bridgeRNA

SEQ ID NO: 7338 - DNA, 1566 bp, unidentified
  source 1..1566: mol_type = unassigned DNA; note = element_b615c59
  misc_feature 1..4: note = core
  misc_feature 5..281: note = LE
  misc_feature 282..1457: note = CDS
  misc_feature 1458..1566: note = RE
  misc_feature 4..263: note = bridgeRNA
tctcgtattattcatttaggaacaacctaaatgaatttttctttctaggccgttcttgctcaagtatatcttacggccatttgatatacttgttttgcactgtggatttgtttctatatttttacagccttgactgttcttaggagattcctaccacagttcttttctaatgttgatcagttgattagcacaccgatgctttatgactaacgagttcacatggatcgaacatttgtgggggttcttaccaagcagtgcacaattttataggaggtattgttatgacctatttcattggcattgatattgccaagtacaagcacgactgtttcatcatggatcaagatgggaccgttatccgcgattccttttccttctccaatgataaaactggttttgccttgcttctttctgtcctagattcccttgatccttcccacgaaaaaaggataggctttgaatcaaccgggcactatggtttgaatctcatgtgttttcttgagagtcatgatctttccttcatggaaatcaatcccattctgatcaaacggttctcctcagctaccaccttgagaagaactaagaccgataaagcggatgccgctcttatcacttcttacttaactacggttgaatatattacctatccaacgcaatcttaccatatccatagcctgaaatcattgactcgctctagagataccttggttagacaacgatcccaacagcttgtcatgatcacaaatgtcatggataagatattccctgaatttaagcccttcttcaataaatctcttaaaagttctacagctatgtatattttaaaaaattacaccgtcccttctaaaatagcttctatgaattctgaatcttatagaaagatgtcttcaaagctaagaaagaccatctcttatgcccgcttctcaaagctcagggaactcgcaaaaaatacagtagggcaagaagatgagtgtctaacttttgagctccatacttatctggaactctatcaatcgctggattctaagatcaaggaagtagaagcctatatcgaagcagagtttaagaaagttcagtctcatatccagactattaaaggaataggatggatatctgctgcttctatctattcagaatatggaggcgtcgaaaacttccaaacaccgaatcaaatgctggcttatgcaggtcttgatccttccagaaacgaatccggggaacatgcatataagggacacatggtgaaacacggatcatctcatcttcgctatgttctcctgaactgtgcagagatggtcattatccatgattctattttttacgagtactatcgtaaaaaacgggaagaaggcaaacatcatcgggttgctcttacccatgtggccagaaaactgattcgtatcattttctttttagaaaaaaacgatactgattatgaccctaagaaaatgaggtagccattttcttatagaccattagaccattttttaaaattgaccttttgttaggtctttttgtcatgtctttttataattcttgtctttttgcttgatttttaatagttaa

SEQ ID NO: 7339 - DNA, 1413 bp, unidentified
  source 1..1413: mol_type = unassigned DNA; note = element_b6163a8
  misc_feature 1: note = core
  misc_feature 2..89: note = LE
  misc_feature 90..1124: note = CDS
  misc_feature 1125..1413: note = RE
  misc_feature 1176..1405: note = bridgeRNA
caatgggatggactcctcctcttctcaacggcatcgatgtgccaaactggagttgttatccaccagtgaacgaaaagaaggagtccaccatgaataaacttaaccgagtaggcattgatttggcaaagaatatttttcaattacacggtgtcaatcgcactgaaacatcaacctggcgtcgccgtttgaaaagagaaaactgggttaaggtattgttgaacaaggttgagccaggctgcgtcatcggaatggaagcctgtactggtgcgcatcactgggccagactccttcaatccaaaggctttcatgtaaagttaattgcgccacaatttgtaaaaccgtatgtaaaaagtaacaagaacgatgccaatgatgccgaggcaatctgcgaggccatgagtcgtcccggtatgcgatttgtaacagtcaagacggtagaacaacaagagatacaagcagtacatcgcattcgttcagaactcgtaggccaacgcaccgccaaaggcaatcagatcagagggttggttgctgagtatggattagttgccccgcaacgaatgaatcatttacgtgcggcaatccctgaatggcttgaagatgctgagaatggattgagcgctcggttccgtcgattattgaatggtctgtggggcgatctcaatagactggatgaacgtgtgagtgaaatggataaagagattgccttgatcgcggagcgtgatcctatggcaaaacgtctgcaacaattacgcggtgttggaccgatggtagcaacagcattgcttgctgctgtaggtgatggcaaacagtttgccaatggtcgacaaatggcagcgtcactgggattaacaccgaaacaacatagctcaggcggcaaagagcgtttgcttggcattagcaagcgaggtgattcttatcttcgtagtttattgatccatggcgcacgctctgccatttatgctgccagaggaaaagaagatcgtttgagtcagtgggtgataagtatcgcaacacgtcgacacccgaatgttgcagcggttgcattagccaataagacggctcgtattgcctgggccatgttacgtcatgatacagattataatccggcactggcagtagcatgaacacagaagtcttatagaatattaattaatatgattaacgaataggagtgcttcaatcacgattgcaaagtaagccgtatgatggagaacaggtcgaaccggcgttggcaaaacccgtaaatgtccgagtgcacaaagcacgagaaagcaatgaggagtcagcgcgcgaatagcccattatggccctgcatcaaaacagtgatgctttatttgaggccggatatacgtgagcagtcgtacccagtcaccatcaaaacggagtgcttgcatctggggaggagtccatata

SEQ ID NO: 7340 - DNA, 1353 bp, unidentified
  source 1..1353: mol_type = unassigned DNA; note = element_b61bd4e
  misc_feature 1..2: note = core
  misc_feature 3..77: note = LE
  misc_feature 78..1094: note = CDS
  misc_feature 1095..1353: note = RE
  misc_feature 1105..1339: note = bridgeRNA
tgatggtgtggacggcccctgctccggcatcgctgtgccaggatgaggtcgttgggtctcatcggcaggagccgtccatggcacaggttagcaccatcggcctcgatctggcgaagaacgtcttccaggttcacggcctcgatccgcagggcaaagtcctcgtgcgtcggccgttgcgccgaaccgaagtcctgcccttcttcgccaagcttgcgccgtgcctgattgggatggaagcctgcggcaccgcccatcactgggcgcgcgagctgacgaagctcggccataccgtcaagctgatgccgccggcctacgtgaagccctacgttaagcgcggcaagaccgacgccgccgatgccgaggcgatcgcggaggccgttcaacggccgaccatgcgcttcgtcgccatcaagacgaccgaccaacaggcggtgctgatgctgcacaaggtgcgcgatctgctcgtccgtcagcggaccatgctgatcaacgcgctccgcgggcatctggccgagttcggcatcgtggcagcccagggtgctgtcggcgtgaggagcgccatcgcgcagttcagggccgatcaggccagcctgccggagttggcccgatcagcgatccgccacctcatcggccagattgaggcggtcgccgaggacgtgaagaaggccgagacggagatcctcgcctggtgccgggccgacgccgcgagccgtcgcctcctgaccatccccggcatcgggctgatcaccgccagtgcgatcgcggcggccgtccctgacccgaccctgttccgctctggccgtcagtttgcagcctggctcggtctgacgccgcggtcccagagcagcggcggcaaggagcggcttgggaggatcagcaagcagggcgacggaacgatccgccggctgctcgttgtgggggccacggcggtgatccgggtggcgcgccaggacaatcccggacgcgcctgggccaagcggctcctggagcgcaagcccgcgcgggtcgtgtcggtggcgcttgccaacaagaccgcccggatcgcctgggcggtgatgatgcgcggcgaggtctacagagcgcccgccgtctgacgagatcccgcctgccggtcctcttgccggcgacgggggtgcgaggtgctgagaggtgatgacgaaccggtcgagccgggattgaggggagcccgctttgcgacatgcgctttcaggcgcgatggcttgatagggacctcagtcgcggacttcatcagggccagcggccatgagcgccgcgtcgacaggccggacacatgactgcaccccgaccgggcagcatcccttttccgcttgcaccgcaggggccgtccacaca

SEQ ID NO: 7341 - DNA, 1443 bp, unidentified
  source 1..1443: mol_type = unassigned DNA; note = element_b61f59b
  misc_feature 1: note = core
  misc_feature 2: note = LE
  misc_feature 3..1127: note = CDS
  misc_feature 1128..1443: note = RE
  misc_feature 1178..1393: note = bridgeRNA
gaatgaaagggcctccccgccccgaggctgcggcgaaagccggcctcaccccgcgccgcaaagcgaaactacccgatcaacacgaacaagcgaggaatctcatgtctgttgccaccgtcggaatcgatctcgccaagaacgtatttgcgattcatggagttgacgcgtcgggcaaagccgttctggtcaagccccgggtcatgcgtgatcagctagtggcgctaatcgcacagctgccgccgtgtgtgatcggcatggaagcatgctcgggcgcccaccactgggcgcgcatatttcaacagtacgggcacaccgtcaaattgatggcaccaaagcttgttgcgccataccggatgtccggcaaacaaggcaagaacgatgcggccgatgcagccgccatctgtgaggccgtgactcgacccagcatgcgatttgtgcctgtcaaggatgaacatcagcaggcgaccctttgtctgcatcgcacaaggcagggcttcgttcaggaacgcacagctacctataatcgactgcgcggcctgctgtcggaattcgggatcgtcttgccacaaagtccggaaaaattgcgaagcaatatcgcggcccgtctggatgcgctgccaggttgggcgaatcgctgcattcgcgatatgctcgagcacgtcgatcgcctcgatgaacgtctcgaagaatatgatcgcgccatcggcacgctggcgcgagaagacgaacgtagtcgtcggcttatgcaattgcgaggcgtcggaccaacaacggccagcgcattgctcgcgacccttggtgcagcacgcgacttcaagaacggccgtcaggtcgctgcgtggttcgggctaacgccgtcacagtacagcagtggcggcaaggcgcgactcgggggaatcacgaaggcaggtgattcctacgtgcgtactcttctcgtaagtggcgctcgcgccgtgatgtcaaatctacgagacaagcaggaccgtttcagccgctgggtcagatgtctcgtggaacgccgtggttattggcgtgcggcgatcgcgattgcggccaagaacgcgcgaatggcatgggcggttcttcgatacggcgacgacttcaagtacgagccagtgaacgcctgaacgaggcaaccgaacacccgttaaattaggaatctcgcaacgagaagcaatatcggagcagatagaagatcactttgcgctgccagcagtgatgtgaagtgggttggacccgcgcggggagtgcctgttagcaccacggggagttcgttcccgatacatgaatgaggccctcgcgcgcgtctttcatcagggtccgggcactagcccaacatgaccgtttgtagtatcgcagtccttcaccttcacactttgcagacagttaaacaagaggatctgaaaatttgtcgagcttgcgcttaatggggaagcccttgta

SEQ ID NO: 7342 - DNA, 1375 bp, unidentified
  source 1..1375: mol_type = unassigned DNA; note = element_b62ad69
  misc_feature 1..5: note = core
  misc_feature 6..97: note = LE
  misc_feature 98..928: note = CDS
  misc_feature 929..1375: note = RE
  misc_feature 1152..1375: note = bridgeRNA
tccatggataatggaatggaccatccccttttaaccggcctcgcaatgggccacgatgaagttgttgaaagtcatctggaaagaggatgggtccactatgaagattacaaccatcggtttggatatcgcaaagttggtgttccacgctgttgcggtcaacaaagcaggtaagctggtgcgcaagaaaatgcttaaacgaaaagaagtactcggttttttcgctaagttggaaccttgcctggtcgcgattgaagcctgtggtggcgctcattattggaacagggaaattactgcccttggtcatcaggttaagttgatccctcctcaatatgtcattccctatcggcaggaaaataaaaatgactacaacgatgcccttgccatagtggaggcggctcagcgaccaaacatgcgcttcgtgcccgccaaatctatcgaacaacaagatgtgcagatgttgcacagggttcgtgagcgactcacacagcaaaccaccgccttggtgaatcaggttcgaggcatgttggccgaatatggcatcgtgctggcaaagggaaaaacggcctttcgcagtcaattgcccgacattttggaagacggtgagaatgcactcacagccaaaggtcgagcgattttccatggactgtataatgagtttgtcgaacttgtgaacaggctgaaagggtgtgaaaagcaggtattgcaggaaaatgctgataatcctatctgccaacgattaggcaccgtcttgggggttggtcctgtcactgcgacggcattttatgccgctgttggggaggggaaggcatttcacaatggccgccatttttcagcttggtgcggtctggtgcccaggcagcacagcagtggcggcaaggataatctgcaggggatcagtaagcgaggcaatgcctatctacgaacctagttcattcatggtgccaggtccattttgcgtcactgcgagcacaaaaccgataagctcagcctgtgggcgaaggccctcgtggagcgtcgaggctttaatcgcgcctgcgttgcagtagccaacaagcttgccagaattgcctgggtcatagcggccaaagaagaaacgtatcggccggcgacatgaagcttataaatcaggttgtgaagtaagataatgccaacctatcaccaagttgcggtgacaattgatttgatgatgagacagtcagactgttctacttaaaacctgttgaatccataggctcatcgtgaagccgcaaggatgatgaggaaagtagaagcacatatccatcagggccagagatttaactcagtaacaggccgaatatatgggtgcaatgaactcttctcaaattgaaatcaaatgtcttgcaaacgggatggg

SEQ ID NO: 7343 - DNA, 1503 bp, unidentified
  source 1..1503: mol_type = unassigned DNA; note = element_b62c1c1
  misc_feature 1..2: note = core
  misc_feature 3..262: note = LE
  misc_feature 263..1483: note = CDS
  misc_feature 1484..1503: note = RE
  misc_feature 16..258: note = bridgeRNA
ctaatgggaggtatcaagcctggccggtccggcagacttgatacctggtagccgctggtggatgagcactttggtggactggacccccgaccagggagtcctgagttgagaccgtgcctccaccggcgtgccaggaggtctgcatcgctggtgggatgtcgtgcccggccgaaggtcgtgagcactcgaccattagtccgcgaaccgacttcctgcaggccgccgccgggtaatactcgaggttccgtgggaggtgtgtgagttgctgttcatcggagacgactgggccgaggatcaccacgatgtggaggtccaggacgaacaaggccgggtgctgcggcgtgaacgagtgccggaagggatagcgggaatccggggcttcggtgagctcgtcggacggttcgtcgacgacgataccgagttctccgacgtactggtgtgcatcgagacggaccgcggaccgtgggtgcaggcgttactggccgccggttatcgcatattcggtgtcgacccgaaacaggctgcgcggcatcgggaaatactcggaagctcccgttccaagagcgacaagggtgacgcacacgccctggccgacatggtccgcacccgccggcatcaactacgcgaggtcgccgacgattccgatcgggtggaagcggtcaaagtcgtcacccgtgcacaccagacgctgatctgggaacgaacccgacacatgctgcggctacgggcggcgctgcgggactacttccccgccgcactcgaggcctacacgccgctcgggctcacctgcgcacccgtgttgactctgttggccaaggccccgaccccggaggtcgcagccaagctcaccctccggcagatcgctctcacgctgaagggacgccgtgacatcgacgccaaagcggcggcgatacagcaggtactgcgggccgagcatctcggccggcccgccgcggtgaccgcggcgtatgcggtgacggtccggtcactcgttgcgatcgtgacgacgttgaacaccgagatcgcgaatctcgagaaagacgtatcggcccattttggccagcacccggacgctgagatcctgctcagccagcccggtctcggcgtcgttctcggtgcccgggtgctcgccgaattcggggatgcccccgatcgttacgtcagcgcgaaggcacgcaagaactatgccggcaccagcccggtcaccagagcgtccggcaagacgcgcattgtctccgcccgacacgtgcacaacgaccggctcgtcgacgccttgcacatgcaggccacctgcgcgatcttgcacgacaagcatgtccgcacctactacgatcagctccgcgcccgcgaggtcgggcacaacgcagcactacggcaggtcggtaaccggctcgtcggcattctccacggctgcctcaagacccgcaccgtctacgatcaggcgaccgcgtggtcacaccgtgaggtcggcgtcgctgcttgacgtcaaagatccagggatgt

SEQ ID NO: 7344 - DNA, 1317 bp, unidentified
  source 1..1317: mol_type = unassigned DNA; note = element_b630de7
  misc_feature 1: note = core
  misc_feature 2..278: note = LE
  misc_feature 279..1274: note = CDS
  misc_feature 1275..1317: note = RE
  misc_feature 63..268: note = bridgeRNA
cctttagatttgataaatgttaatattcttagattactgttatatacattgagagtgctggtagagactcataaattgttaataacggtggataacattaaattaggaataggaacggggtgaacttacgccctttctaggacactaaggcctatgccctgtatcagtccccgttccaagttccggttgctttgagaaccagttagaattttaggttaacagaccttctaaaggttttagtttcagcaaccatatttattacacttaatagtaaagttatgaaatttagagcatttatcggtattgacgttagtaaatctaccattgacatctatttgagaaacgctggaagacacgctgtgtttgttaatgatttgaaaggttttgaagccatggtcgaatggcttatggacattttgggacaggtatgtcctgaagaaatgatgtttggcatggagcacaccgggctttatagcgagcttctgatctcttttctcgacgatcacaatttcccctttacagtactgcctggcttggaggtgaaaaagtctatggggatccgaagaggtaaatcagacaaagctgactccaaagttattgccgagtatatttatgagaaaagagagaaaatcaaattgttccgtaagccctcccgaaacttggaatcgataagaaagattgcctcttacagggaacgtttggtaaaggaaagaactgccttcaaaacaagactaggagaacaccaaaaggtctatggtaaggagtcttatgagatatatactcaatcacataaacagatcatagcctgtctagacaaccagattaaaggaatggaagccgaaatggaacggctgataaaggatgaccaggaaatgttaagacaataccagttggtcaaatctgtaaagggtataggtccccagacggccatcatgatgattgtacttactaaagcgtttactgcttttccagattggagaaagtttgccagttatgcaggaatcgcccctttcccaaaccagtcggggacatatatgggtaagacgagaaccagtaaactggcaaacaaacgtataaaagcacttctaaccatgtgtgcgggggtggccgtacaatacaatccagagatgagactttattacgaacaacgggttaataaaggcaagaataaaatgagtacaatgaatattataaggaataaactagtatcaaggatctttgcggtaatagaaagaggtaccccatatgtcgaaacaatgaaatatgctgcctagaaattaaaaattgtactattccacttgctttaatcttagaata

SEQ ID NO: 7345 - DNA, 1461 bp, unidentified
  source 1..1461: mol_type = unassigned DNA; note = element_b6372a2
  misc_feature 1: note = core
  misc_feature 2..230: note = LE
  misc_feature 231..1439: note = CDS
  misc_feature 1440..1461: note = RE
  misc_feature 9..224: note = bridgeRNA
cgttaccttgttggtggtcccgggtggtctgggaccgggccagccgcttccggcatgatgtcgtgtccctgtcgtttgatgatccgggggatgttgtcaccggtggtggcgggcggatggtgatcgctgattaggggaacggaccgcttgacgcgagtcctttcgtaacgtgggtgcggggctgtctgcctgacaggctgacccaacaacgcacgaaaggatgcggaaaggtgaatattcaggatgtggaggtcttcgtcggtatcgacgttggcaaggccgagcactgggccacggccctgaccggcgatgggaagaagctgttcgacaaggccctgcccaacagcgaggaccggctgcgcgagatctaccaacggctcggtgagcacggtcgggtcctggtggctgtggatcagccagcgacgatcggtgccctggcagtggcggtcgctcaggccatgggcatcatgatgggctacctgcccggcctgtccatgcgccgtatcgcggacctgaccccgggcaacgccaaaaccgacgccaaggacgcggccgtgatcgccgaggcggcccgcaccatgccccacacgctcaggtccatcagcacttcggatgaggacgccgcatccttgtcgatgttgactgggtttgacctggacctggcccggcaggtcaaccagaccgcaaaccggatccggggcctgtacacccagatccacccagccctcgagactgtgctgggcaagtggctcgaacacgacagtgtgctggaggtgatcgccgcctggcccacacccgccgacctgcgcaaggccgggcgggcgcggatcgacgccaagctcaaagccaagggcgccaagcgccatgccgcctgggcgcaggccatcaccggtaccctgggcaagcagaccgtcgtggtcgctggcaccgacgcggccggcgtggtgctgccccacctggcccgccagctcatcgccctacatgcccagaggcgtgacgtcgccgcccaggtcgaggccctcgtggaggcccaccctctttacccggtcctgacctccatgcccggggtgggggccaggaccgcagccatcttcctggccgaaaccgcaggcagaaccttccccaccggcgcccacctggcctcctacgccggcctgacccccgtcacccggcgctccggctcctccatccggggcgagtacgtctcccacgcgggcaacaagcgcctcaaacgcgccatgttcctctcagccttcgcctcactgcgctctgaccccgcatcacgcgcctactacgaacgcaaacgcacccaaggaaaacaccacaaccaggccgtcctcaccctcgcccaccgccgcatcctcaccctatacgccatgatccgcgacggctccctctacgacccccaaccagcacagcaactacccaccgccgcttgacaaaccacataggggcaccccc

SEQ ID NO: 7346 - DNA, 1487 bp, unidentified
  source 1..1487: mol_type = unassigned DNA; note = element_b63a7be
  misc_feature 1..2: note = core
  misc_feature 3..233: note = LE
  misc_feature 234..1466: note = CDS
  misc_feature 1467..1487: note = RE
  misc_feature 7..233: note = bridgeRNA
ctaatgggactgcaatagcggcccttcgggcatgctgttgtccgagcccgctgccggtgagcacttcattacccctggccttatttgaggtctatgactagatcgtgccccggtagttggtgagggggccgggagtgctggtgggatgttgtgccggtgagcactgatccattaggtcgtagcaggtcttctccgaggttcgaggcatgttgatcaaataacgagggggcgcggtgctgtttgttggcgacgattgggctgaggcccaccatgacatcgaaatcgaagacgatcagggaagggtgctggcccgccggcggctgccggagggcatggctggcatcacgctgctgcatgagctggtcggggagcatctagaccccaccgctgagccggatcaggtgcagctgggcatcgaaaccgaccgggggccgtgggtgcaggcattgttggctgccggctatgtggtgtttgcgatcaacccattgcaggtggctcggtatcgggaacgccattccccgtcgggggccaagtcggatccggcggatgcgcatctgttggccgagatcgtccggctggaccgggcgcatcatcgcccggtcgccggcgacagtgagatcgctgaacacgtcaagatcgcagcacgggcgcatcagacgatgatctggtcccgggtgcggcaggtgaacatgctggggtcgctgctgcgggagtactaccctgccgctttggccgcgttcggcaccgacctcgctggccgggaggcgctggcggtgctgaccgtggcacccaacccggacctaggccgccggctctcccagagccgcatcgaaacgctgctgcggcgtgccggacggcagcgcaacctcgccagcactgccgccaagatccgcaacgcattaatctctgagcagctgaccgcgcgacccggggtgatccccgcctacaccgccagcgcatcggctctgctcgcggtgttgaccgcgatcgcagcccaaaccgaggtactggccaggcaggtggagcagggttttggccagcacccggacgctgagatctacggcagccaacccggcctcggtgtcatcctcggcgcccgggtgctagccgagttcggcgacgaccccgggcgttacgccgacgccaaagcccggaagaactactccggcatgtcaccgatcaccaaagcctccggaaccaaacgggtcgtgctggcccggttcgcccgcaaccgccgcctcggcgacgcgctgtttttccaggcgttcgcttctttgaacaattccccgggagcccgcgccttctacgatcgacagcgcgcccggggagccacccactaccaagccctccgaaccctcgccaaccggctcgtcggcatcctgcacggctgcttacgaacccacactctctacgacgaacacctcgcctggcgcaatgaaccagacaaactcagctctgcggcttgaccgcttccagtcgtgggatgt

SEQ ID NO: 7347 - DNA, 1331 bp, unidentified
  source 1..1331: mol_type = unassigned DNA; note = element_b63caae
  misc_feature 1..2: note = core
  misc_feature 3..82: note = LE
  misc_feature 83..1117: note = CDS
  misc_feature 1118..1331: note = RE
  misc_feature 1092..1316: note = bridgeRNA
agataattggactccctcactccctaagaagtgaggtaatatacttgttaccacacaaaacatattaaaaagagtccgtaaaatgaataatactatcgttggtgtagatttagcaaaagaagttatccaagtttgtatatatacaaacaaaagagtgcgttctaataaagaaatgacaacaagtgagtttttaacattcttagctaaccaaaagtcagcgatagtagtatttgaagcatgtgccacatctaactattggaagcaaaaagcctgtagtttaggtcatgacgcgcgtttaatttgtcctaagcttgtcaattctgttcgtcaaaatcaaaagactgataaaaatgatgccttagcgattgtacaagccgcattactgccagacgttaattttatttcaggcaaaaatattgagcaacaacagcttcaatcaatagtgcgttttagagaattagccattaagcaaaaaacggccttgtctaatcagttgaaaagcttgttactggaattgaacattcgagtttctagtcgtcatggcgggttgaaaggtgttattcaaagtacactggaagatggcgaaaacaatttatcctttgagtttaggagcgccttaaaaatggcttggacgcaatacagtaccttgcttaaatcaatagctcattatgaagaaacattagccaaaatatcaacaaagcacagcgactgtaaaagactgctcaaattagaaggtgtcagtaccatcaatgcggttaatttatatatagcattgggttgccaacctgagatgtttaacaaaggcaaagatgcttcagcctgtatcgggttaacacctatacagtattcatcaggaggcaaagtcaaactgggtagtataggtaaatatgttaaaaatagtatgctgcgtagtaatcttgtggtcggtgcaatggccgctattaatcgcataatcacgcgagaagcgaaaacaaaaaaagaagcgtggatacaggcactggttgcacgtagaggaaaacgttgtgcagccgtagcattagcaaataaaacggtaagaacagcatttgccatgttaactcaaggcacagaatacaaggctgaattaatttcagcttaacaggttcaaacaataaaaacgcacaattgaaggtaaaaaccagcgggtgaagtcagtgaacaaccaagagcctagcgctcgcttaatagatttgaccacctgttcgcgcaaatatcaatgagccagagttagctactcaattagagctcgaacataagtaagcgtttaatttcttcaaaaaagtttttattgttgacaagagggagtccacata

SEQ ID NO: 7348 - DNA, 1225 bp, unidentified
  source 1..1225: mol_type = unassigned DNA; note = element_b63e24e
  misc_feature 1: note = core
  misc_feature 2..233: note = LE
  misc_feature 234..1199: note = CDS
  misc_feature 1200..1225: note = RE
  misc_feature 34..223: note = bridgeRNA
tcttaagtttgtaatatctatatttcattaattaatatgaaagaacaaaagagaggattaaggtttacatacccgttgagactttgatctcgtcaacaatgataatcccctctctttttctacttcaatttcgttcagttccctgcctgccggcaggcaggtgtgagacgtttagatctcgattttaagttgttgaaagcaaggtagagtgtcctttcaaaaaacattttcttatgtataaatataatcaaatctttggtgttgatatcagtaaagatgtattcgatgttatgagctctgaggagaaacatcttcagtttgagaataactcaaaaggttttaatcagttaatcaaacatcttaccaagaaagacctaatcgttatggaggcaacgggttattatcactattgtttagctcaacacctctatgaccagggctatactgtatctgttgtcaatcctcttgcagtaaaacgttttgttcaaatgaaactatctaagatcaaaacagataaatctgatgcacttgctatttgtcaatatgcttgttcaaatgaagttcctctctttacttctaaagattcaaatcaagcagaatgcctgcaattgatgagtcttattgaaatctaccttaaacaaagtaccgcattaaagaataaattacacggtgaaaaaacattgggtataccctccaaaaccgtttatcattcaatcaatcgttctttgaaaatgattcaaaaggaaatccaactattagaaaagaagctcttagaactcgtaaaagagcaccaacaaaaacaacttaccctacttaaaagtatcccaggaatgggtactaaaacttccatcatcctgattgtgcttaccgatggatttaccaagtttgaaaatgccaaacagctttgctcatatgcaggaaccacaccaactatccgtatgtctggatcctctgtgagaggcaagagtcgtatcagcaaaatgggtaatcaaaaacttagaaatctgctctttttatgtgccttctcagcttgtaaatacaacaaggcttgtcgtgaattatatgagagaattgttgccaaaggaaaaagtaaaaaattggccctagtagctgtgataaataaactcttaaaacaggcttttgctgtagctaaatctggattgccttatgatgaaaattatgtgtcgaatttaagttaatttcctttggattttaactcagttct

SEQ ID NO: 7349 - DNA, 1366 bp, unidentified
  source 1..1366: mol_type = unassigned DNA; note = element_b6571b6
  misc_feature 1..2: note = core
  misc_feature 3..82: note = LE
  misc_feature 83..913: note = CDS
  misc_feature 914..1366: note = RE
  misc_feature 1079..1353: note = bridgeRNA
tgatggggtggacgccccctcgacggcatcggtgtgccagaatgttggcgtttaacagccacagcaaaaggaggcgtccgcaatgaaagttaccacaattggtctggatttggcgaagaacgtgtttcaggcgcatggtgccgatgcctgcggctccgtcgtttttcgaaagcaactccggcgcgacaaggttttgcatttcctcgcggggtactccccatgtacggttgcgatggaagcatgcggtggtgcccatcattgggcgcgcgagatcggcaagctcggccacacggtcaagcttattccaccggcctacgtcaaaccgttcgtgaagcgccagaagaacgacgctgctgatgcggaagccatttgcgaggccgcccaacggccgacgatgcggttcgtcgccgtgaagagcgagacggccgaagcaagtgcagttgtatttcgagctcgagatctgctggtgcggcaacgcacccaaatcatcaatgctctgcgtggccaccttgccgaatatggctttgtctgcgctcaagggccttcccatgttgccaggctcattgagcatgtcgcgagttctgggaacagtttgccggatgctgccagaaccgttctcggcatgatgattgatacgctccagatccttgaggagaaagtcaaaacgctcgatatggaaatcgcccgccgcgcacgggaagacgaaaccgctcgccggctcgtgaccgtccctggtgtcggcccggtaacagcgacggccttcgccgcgctagcgcccgacgcaggaggatttgcgaaagggcgtgactttgccgcatggctgggtctgacaccgctgcagcgatcgaccggtggaaaacagaagcttggatcgacatcgaaatgggcgaacgaaccctgcggcgacttttaatcataggcgcaagttcggtggtccgtcgtgctgtgcgactcggcgttcagtccaatcgtggctgggacgcctgctggcgcgcaaaccacgcatgctggtgattgtcgctctcgctaacaaactcgccaggatcgtctgggcgctgatgaaaaaaggggaagtctatagagctccggttgcgacggcataagccgctcactgccagaggcgtcgaagcgtaagaaggtcgaacggaagtatggcgcacagtcgataagagacggaatcggtaatccaggcctgaacaaagtgctatgagcacgctttaatgatttggctccggttcgcgaactcccatacgggcccgcgacgaatgaacggtcgcatcagaggccggacagatgtcagcacccgactttgcacaccgtactgaccaccaaagattcttcttgcgtaaacgggggcgtccacaga

SEQ ID NO: 7350 - DNA, 1408 bp, unidentified
  source 1..1408: mol_type = unassigned DNA; note = element_b65ecdb
  misc_feature 1: note = core
  misc_feature 2..90: note = LE
  misc_feature 91..1128: note = CDS
  misc_feature 1129..1408: note = RE
  misc_feature 1178..1403: note = bridgeRNA
taatgggatggacgcccccttcctgcaacggcatcaaggtgccaaagtggaaatgggatcaatccactgatagggaaaggagcgtccgtgatgaagattacgacagttgggatcgatttggcaaaaagcgtgtttcaggtgcatggagtcgatgagcgcggcaaggcggtgctgcgtaggcagctcaagcgcaaggacatggtgaggttcttcgctaatctgcagccttgcgtgatcggcatggaagcttgtgggagtgcccattactgggcgaggaaactcactgagcttgggcacacggcgcgcctgatggcgccgcagtttgtgaagccctacgtgaagacgaataagaacgaccgtaacgacgccgaggcaatctgcgaagcggtggggcggccgaatatgcgctttgtgccggtcaagacggctgaggcgcaagcggtattggggcttcaccgagcgcgccagggatttgtgagggcacgtaccgcgcaggcgaatcagattcggggattgctggctgagttcgggatcgtgatccccaatggtatcgggcacgtcaccaaacgcttgccagagattctggaggacgcggagaacggtctaccggggatgatgcgccagttgctggagcgcctggttgagcagctgaagcaactggatcgccaggtcggggaactggagcggcagatcaagctttggcatcgcgcgaatgagcaaagctgcaagctggaagaaattgccggcattgggccgatcacagcgagcgctctggtggcctcggtgggcgatgccaggagcttcaagaatgctcggcaagtaccggcttggctgggtatggtgccccgccaggactccaccggaggcaaagcgacgctgggcaggatcagcaagcggggcgatgtgtatttgcgcacgctgttgatccacggcgcgcgcgccgtcatctcgcagttcgagcgcaagcccgatcagcccgatggttggctcaagaggctgcttgcccggcgcaacaagaacatcgccgcagtggcgctggcggccaagaacgcgcgcatcgtctgggcgctgctcgcaaacgatcggacttatcagtccgattacgctgcgaagcgcgcggccgcgtaatcgcagtcggctaaattgaacgagagaaccgtttaggaaaggaggacttccgcagattgctcaggcaatcatgacgtgatggcaagataggtcagaccgtgacggggtaaacctgcagtgcccagagcacttcgagtgcgaaaatctgatgagggccccgtcagccgattccatcagggaccgaggcttaggcctcatgcaaagtccggatctatggctgcaatcttcaccttctggtcatcatgaattgatcgcttggcaaaacaggggcgtccatcta

SEQ ID NO: 7351 - DNA, 1152 bp, unidentified
  source 1..1152: mol_type = unassigned DNA; note = element_b66030c
  misc_feature 1..3: note = core
  misc_feature 4..186: note = LE
  misc_feature 187..1137: note = CDS
  misc_feature 1138..1152: note = RE
  misc_feature 43..183: note = bridgeRNA
cttgtatgtttctatgccatggctcatgatatgttttgtcaggctaaggacgtgacagatcgactatagcgccagggacataaagtccgagcgtaagcatgggtcgtcacgtccatctccacataacccgaacagttgtcagggccattgaagcccgtatccgcaaggccggggggagaagctatcatgagccaatcagagcgagttataggtattgacgtctccaagaatcttttggatgtagctgtagttccagagaaagatacatggtcggtggccaacgacgaggaagggatccgcacgctgattaaagacgcaaagcggttccgtcctcgcctgattgtcctggaagctacaggaggccttgagacagctgttgttgctcttttggccgcagctcgtcttcctgtggtggtggtcaatcctcgccaggtgagggattttgctaaatcactcggtaagctggctaaaaccgacaagatcgatgccctggttttggcccactttggcgaggcgacaaagccggaagtcagatctctcaaagaccagcaagcacaacaactcagtgccctggttgcccgcagaaagcagctggtagagatgcttactgcagagaaaaatcgtcttatgactgcccctgaacctgtagacaatgatatcaaagcccacattgcctggcttgagcaacgtctaagcggtatcaataaggatctcagaaaggccataaaggccagtgctgtctggcgggcaaaagaggaattactccgcactgtaccaggagtaggaccagtactatcggtcagtctgttggctggattgcctgagttgggcaaactcaaccggaagcaaattgctgccttagtaggagtagctcctttcaacagagacagtggaaaatttcgcggcagaaggtccatatggggtggccgtgcacacgtcagagcagtgctatacatgggaacactcactgctattagatttaatcctgtcattagtgctttctaccaacgtctctgtgccgcaggcaaagcgcacaaagttgctctgactgcttgcatgcgaaagttgttaaccatactcaacgccatgatgaaaaaccatgcgccatggcaaccttatttcagagaaacagcttgacaactaagacagttg

SEQ ID NO: 7352 - DNA, 1387 bp, unidentified
  source 1..1387: mol_type = unassigned DNA; note = element_b661377
  misc_feature 1: note = core
  misc_feature 2..75: note = LE
  misc_feature 76..1131: note = CDS
  misc_feature 1132..1387: note = RE
  misc_feature 1153..1378: note = bridgeRNA
taatgggatggtccggccgtgctcctacccggccagcgctaagctggccagaggcagccagacaaggagcacgccatgcctccagcaacagtacagacgatcagcgtagtcggcatcgatatcgggaagaactcgtttcacatcgtcggtctcgatgaccgcggggcgattgtgttgcggcagaagtggtcgcggggccaggttgaggcacggtttgccaatctgccgccctgcctgatcgggatggaggcttgtgtcggggcgcatcatctcagccgcaagctcaaagccctcggccatgaggcacggctaatgccggcaaagtacgtgcggccctattcgaaaggccagaagaatgacttccgcgatgcggaggcaattgccgaggcggtgcagcgtcctacgatgaagtttgtggcgacaaagaccgccgagcaactcgatctgcaggcgctgcaccgggtacgagagcggctagtccaccagcgcaccggcatcatcaatcagatccgcgctttcctgctggagcgcggcattgcagtgcgtcagggactgcggttcttgcgggcggagctgccgcgtatcctggcagcaccaagcgatgtcctctcaccgcgcatggtacgcctgattgaaggtcttggtgccgattggcgccggcttgacgaacgcattgatgaggtatcgagcgagatcgaagcgctcgctaaacaagatgccggctgcgaacggctgatgagcgtcccaggcatcggaccgattatctccagtgccgtcgtcgccgccattggcacgggcgaggccttctcgaaggggcgtgacttcgctgcctggctcgggctcgttcccaaacagatatcgaccggcgaccgcacgattctcggcaagatatcaaaacgcggcaatcgctacttacgcacgctgtttgtgcaggcagcatgggtcgtgcttgtgaagataaaatcgacgagatggggcactcacgcgcttagggactggatcgaaggtgccaaaaaacggctgcatcacaatgttctagcggtcgcgcttgccaacaagctcgcgcgcattgcctggagcgtccttgctcgtggtcgcagcttcgagacgagcaaacttcaaacggcctaatcaaccgcaaataaccgagctacccgccgaggtctgcgagaagatgagatgagatggaggttcggtcttcccggcgcctgcgaatactggtgacccgaatggcccacttgaggtctgtccgctaataaggtcgcagacgcgctgatatccatgatggcccggagcaacgctccaatcagaggccggatacattgatgcaagaccgctcaccgccagctcgtcaaaatcttcttgccacgcacggccggaccataca

SEQ ID NO: 7353 - DNA, 1547 bp, unidentified
  source 1..1547: mol_type = unassigned DNA; note = element_b666bc8
  misc_feature 1..3: note = core
  misc_feature 4..241: note = LE
  misc_feature 242..1435: note = CDS
  misc_feature 1436..1547: note = RE
  misc_feature 7..261: note = bridgeRNA
attagtaatatataagcgagggttttacagccttcgcttttcctttatgatgaaggtggattggctgacgaaattctcgattgggacaccacgcccgccgacaaatgtgtcagccagccttcatcatccagcatccgattcagcaagttgggacgaatcatcgctcccgtttcacggactaatctgtttggattttgaagtgctggagccagtctgatctcacccacaaaggaggaatcttatgattgcagttggaatcgacgtatcgaagtccaaaagcaccgtggcagtcattgactcaaacggcgtagtcctcgcaagcccatacacgatagcacatacgcagccggaacttcacgcacttgcaaagtatctaaaggagctgaaagagcccgtcaccattctgatggaatacaccggccactatcattatcctgtgctgaagcagctccagtcggagggctttcctgtgtgcctcatcaatccgtaccaaatgaaaaaatacggagatacagaaatccacaaggctaaaacagataagaaagacgctctgcgaatcgctacttatgctttggagaaatcctataaacttgttccgtacagttccatggagcagaaatacgaggatttgaaattcctctccagacagtacgagcaacgcatatccttcgttgccaagctaaaagtacagcttctcgatctgctcgaccagacgatgcctggaattacgaaacagctttcgttaaccagcagaaatccggagaaatgtgcgcttcttctctttattaagcgttttaagtccttcgacgagatccagcggatggggaaaacaaggtttctttcatcatatgaaacgatgactaagaaaacatccgacagatatgctgctcagaaaggtcttgctatctatgaactggcaaaggacagtataaccaccaggggtgatgatccgtatatctggctgtctcaaacccagtgcgttgatttgctctctgctgctcaaaatactgctgacgagattattctgaagatgcagaatattgctcaaacgattccggaatacgccgtccttcgtgcgatgcacggcgttggggatcgacttggccccatcatcctggctgagatcggtgatatccgccgattccacagcggcaaggcgctaaattcctatgctggtaacgacgcaccgccataccagtccggacagttcgagagcagaaaccgccacatttccaaacgtggcagctctgctctccggaaggcttgttacgaggtcatgcaggctctcaaactgacaaaacctcaagacgaccctgtctatctcttcatgctcaagaaggagcaggaagggaagccctacaacgttgcaaaaatggctggcgtcaacaagttcctccggatctactatgcaaaagccatggagctctacaggtagatcgccttcattctaaacctttttttcaaagcccgcaatctggtgggtttattttgtgtacccatttttattccatcaagcctgaaaaagggacttgacaaacattagcaag

SEQ ID NO: 7354 - DNA, 1399 bp, unidentified
  source 1..1399: mol_type = unassigned DNA; note = element_b67f817
  misc_feature 1..2: note = core
  misc_feature 3..87: note = LE
  misc_feature 88..1131: note = CDS
  misc_feature 1132..1399: note = RE
  misc_feature 1157..1397: note = bridgeRNA
tgatgtgatggacgactcccgcccttcggggttcggcatatgccaaagtggagaagtcgtgacttccacggcaaaggagcgttcatcatgaagatagccactgtcgggctggatcttgcaaagactctattccaggttcatggggtggattcgcagggacatatcgtcgtacgcaagcagctgcgccgcgctgatgtattggcgtttttcgcgaagcttgagccgtgcgtggttggcatggaggcatgtgggtcttcgcactattggggccgggaactcacgaagcttgggcacacggcatgcctgattgccccgcagttcgttcgaccttacgtaaagagcaacaagaccgatgcagccgatgctgaggcaatctgcgaggcggtaaatcgaccgcacatgcgctttgtaccgatcaagacgcaggcgcaacagacgatgctttcactgcaccgagcacgtgccgggctggttaaatcccgtacggcattggccaatcagatccgcggcttgctgagtgagtttggcattgtcctgccgcagggcatccggctgctcggacaaagggtcatcgaagccctttccaatcgcgagcatgagctttgcgaacagttccggagcctgatccagttacttgtggagcacttgcgtgaactgggcaacaaggcagctgaactggagggacgcatccgcgcgatgcattgtacggatgaggccgggcaacttctcgaaacaattcccggagtcgggccgctcaccgcttccgcgctggcagcatcaatcggtaacccccgcgcctttcgggacggccgcgaactcgctgcatggctgggtctagtcccgcgtcagcactcctcgggaggcaagccacgtttgctgggcatcagcaagcgcggcgatacagcactacgaacgcttctgattcacggcgctcgtgctgttatccgtatggcagccaacaagcctgaaatgactgattcgtgggtcatgaaactatgtcgacgccgacacaaaaacatcgccgccgtggcgctcgcagcaaagaacgcccgaacggcgtgggccctgcttattcgcaaacaggtctaccaggttggccacgttccagtgcgagttgacgtgacggtttgacaggcccaggttctaacgtagcaacaacaccaccttccagaggttgcttgagcagattttaattcgatgacagaacggtcggaccgtggtgggccaaacccgctttgcaccaagggcaatcaagcccgtggctctgatggggtacccactcgcggatattcatcgtgggcccgcagcaagcgctgcgaaccgagcccggatacatggctgcaacctcgacccaatgccagagagtcagactgcttgacaactgggagtcgtccataca

SEQ ID NO: 7355 - DNA, 1603 bp, unidentified
  source 1..1603: mol_type = unassigned DNA; note = element_b6820b5
  misc_feature 1..2: note = core
  misc_feature 3..334: note = LE
  misc_feature 335..1498: note = CDS
  misc_feature 1499..1603: note = RE
  misc_feature 91..311: note = bridgeRNA
cttgtatgatatagtcgacgactagatcatacactccttgtgtatatttgcactctcattctgttgtttatccatccgaaatcaaaagagtgcataaaacagattccgggtagtagtaacatctttgttggtcatcaactataatggagacggacactgtggactttttatattaacctatggttcgaccattagttggagtgtattgccacggttttgtctccaatcatttatagttggataagtcgcgaacttttatatcaagcaagtttatgagggcaggaccaggtgggttgaaacagttgtccgaaatccaatgaaaggaagtgatagaatgatctacgcaggcatcgacattgctaagaacagacatgtcgcatgtgttgcggaccaaagacttgaaatccttgttgaaccctttgcctttgaaaacaatatcgaaggtttccgaaaactcgattccgtacttgattcatttgacaatgaaaccctcgtgatcggcctggaatcaaccgcccattatggcgagactctgattgaacatctgctatccaaaggacatcatcttgcagtcataaatccaatccagacggctactcttcgcaaaaccaacatcagaaacaccaagaccgattcaattgactcgctgcttgtggtaaagtcactggtcgtcaacggttgggttccctttacagctcatgatgcggatatcctgaagctaaggcatctctgccgtttcagagacaaaaagcgaaaatccattgcaacggctaaaatcaggcttacatcctttgtcgacaaggttttcccggagctacagtacttcttcaagtcaggaattcatacaaatgcatgccatgaactgttgagcagacatcccgatgcggatgatattgccgccttacacctcaccaatctctacaatcttctccgaaaggcctcgcacggccattatgggaaagaaacagccaggcaattgaaaagtcttgcaaactcatccgtaggcatcagggacgcccatatgtccatccagataacccaaacaattgaaaacctgaggttactggagaaacaactttcacagcttgatgatagcattaaagcgattgtcgttcaacttgacccgataatcctgaccatacccggtgtcggtttaatcaacgccggaatgatcctgggtgaaatcggcaacatccataggttctcaaatccgtcgaagctccttgcctttgcgggacttgaccctacggtcagacagtcaggtaatttcactgcaagaagtaccaggatgtccaagaagggttcaaagctcctgagatatgcattgattaatgcctcatggaatgtggtgagaaacaattctacattccgtgaatactataacctgaaggtgtcccagggcaaaggccactatgctgcccttggctccgttgcctttaagcttgtccgcataatttacaaaatgatgaaggacaacgttgcttttaatctggattgataaacctcaaagaaattcaaaggctgcttttaacttgctttgatttaattgtttgtcacgatttatccaatcacctcattttttacttgacaattcatagttggt

SEQ ID NO: 7356 - DNA, 1392 bp, unidentified
  source 1..1392: mol_type = unassigned DNA; note = element_b685a81
  misc_feature 1: note = core
  misc_feature 2..88: note = LE
  misc_feature 89..1117: note = CDS
  misc_feature 1118..1392: note = RE
  misc_feature 1164..1384: note = bridgeRNA
caatgggatggacgcccccacctttgacggcatcaacgtgccagagtggaagtgtcagcaaccactcgaaccggaaggggcgtccaccatgcagattacgacgattggcatcgatctggcgaagaacgtgttccagatccacggtgcagaccagcgcggcaaggcggtgctgcgcaagcaacttcggcgcgagcaggttgcgccgttcttcgcgaacttgccgccgtgcctgatcggcatcgaggcctgcagcagcgctcaccactgggcgcgaaagcttcaagccctgggccataccgtgcggctgatggcgccccagttcgtcaagccgtacgtcaagagcaacaagaacgatgtcgctgatgccgaggccatctgcgaggcagtgggtcgtccgactatgcggttcgtgccgatcaagaacgtagagcagcagtcagtgttgtcgctgcaccgcgtacggcaggcattcgtcaaggcgcgcaccgcccaggccaaccagatccgcggcctcttggcggagtacgggttgatcgtgcccaaggggattggcttcatcgccacgcgagtgcccgacctgatcgaggatgcgagcaacgagttgccagggctgttccggcaactcattgatcgactgctgaagcacctgaagctgctcgaccagcaggtcgacgagatcgaagtgcagatcaaggcctggcaccgcgacgacgagaccagccagaagctgcagaaggtgccaggcatcggtccgatcaccgccagcgcgctggcggcaacggtgggcaacgcgaagaacttcgacaacggccgacagctggcggcttggctgggcctggtgcccagacagaactccagcggcggcaagcaaacgctgctgggcatgagcaagcgcggtgatgcctacctgagaacgctgctcatccacggtgcgaggtcggtgctgtaccgggcctcgcagaagaacgacacagagagctggctgatcaagctgacggctcggcgcaacgcgaacgttgctgcggtcgcccttgccaacaagacagccaggatcgtgtgggccctgctggctcatgaccgagagttccgacccgactacacggctgccgccgcgtagtcgggtcggccggtctcaacaacttcagacacggaaggatcacaccaccgattgctcaggcgatcacgccgtgatggcatgacaggtaagaccgtggttggcacatcccgcgccggacgaggcacccagagtgcgtgtaagcgatcgaggcgccgaccagcagaacccatcagggacagcgggctacgcccgcgcgacagtccgaatgtacgggtgcaatcttctccttcacgccgccccgaactgagagcttagcaaacgggggcgtccatgta

SEQ ID NO: 7357 - DNA, 1379 bp, unidentified
  source 1..1379: mol_type = unassigned DNA; note = element_b6863aa
  misc_feature 1: note = core
  misc_feature 2..69: note = LE
  misc_feature 70..1098: note = CDS
  misc_feature 1099..1379: note = RE
  misc_feature 1139..1376: note = bridgeRNA
tactgagatggacccgacgcccccttcgggggcacactgacttcccaaccggacaagtcggagttcatcatggaaatccacatcctcggcatcgatctggccaaacaggtctttcagctacacggtgctgaccgtcgcggtcgcgcggtgcatcgcgcgaaggtttcgcgcggttcgctgtttcaggcggttcggacgctgaagccgcgcatgctggtgatggaggcatgcagcagcgcacaccactgggcacgccgctttcagtcgcttggcatcgaggtacggcttatcagcccgcagtatgtcgcaccattcgtcaagaccaacaagaatgaccgtaacgacgccgaggccatcgttgaagccgcctgtcgacccaccatgcgcttcgtgagcatcaaatcggtcgagcagcaggatatccaggccgcgcaccgcatgagagcaatcctggtacgccaccgcaccgcgctcattaaccagatgcgcggactgcttggagaacgaggtctgagcatttcccgttcgccacaagccttcaggcgagcaatgccggaattgctgcacgccagcagtgatgaactgacatcgttctgccaaacactgcttaccgagttgctgcagcacctcgccgccatcgaagaacgtctgcatttcctggaaaattccatccagtcgttcatgaagcactcgacgctttgcaggaagatcacccgggtgcccggtatcggcccggtcaccgccacggctatcgttggcgcagttggcgacgcccgacagttccgcaacggcagacatctggccgcctggctcggtcttgtaccccgacagtattcgtctggcggcaaggctcgcctgcaagggatcagcagacggggcgacacatatctgcgcacgctacttattcacggggcacgggccgtgttgcgctacgtggcagcaaaaaccgatgcgcgcagcgtctggctgcagcaactgatcgtgcgacgcggatacaattgcgccgccgtcgcgctcgctaacaaaaacgcccgactcatccaggtacttctgagcggcgacacggactacgttgctccacgcgcagccgtcaactgaacacgtttctctgcaacagccgggcgaccggatcattcacgtggtttgcgaagcttctcaagatgatgacgaaaatggttgaaccagcatcctgaaacctgcgaacctggccggctgccgtatcatcaggcaagccgccaatatgctaaggacaggatgcgcggatctcatcaaggctgcgggcgtgcttcggcaagtcgcccatcggcaagccggatacatgcatgcagaccgtttcgacatcagaaaaagaagcttgcaaaaggcgtcgggtccataca

SEQ ID NO: 7358 - DNA, 1607 bp, unidentified
  source 1..1607: mol_type = unassigned DNA; note = element_b689bc6
  misc_feature 1..2: note = core
  misc_feature 3..263: note = LE
  misc_feature 264..1442: note = CDS
  misc_feature 1443..1607: note = RE
  misc_feature 11..238: note = bridgeRNA
ctcgtataatatagttaaagtttaattacttttaatttcttttctatctcactcttcttgtgagataatatttgtacagataggggtcgtagtgaacctccttgaagcgttgtcttccttattaagggttacgcctcttctttacatccatatgcgaatgagctggatagtacctagttactgaatatctaacgaggttgtattgttgtaaagtagagaggtcttagactttatctgtaaatattttaaaagctggtgattttatgttttatgttggtattgatattgctaaaaaaaaccacgaagcttctattattaattctaaaggtgagctacttgataaaagtattcccttttcaaattctcaagctggttgtactaaattggcttctttgcttaataaatttgaagttcatgcttccaatgttattattggtatggaagcaactggtcattactgggttagtctttattcttatctgattgatttaggttttactgtttatgttattaatcctattcagtctgatgcttttaggaaaatgtatattaggcaaactaagaatgactctaaggattcttttatcattgctcaaattatgcgtttcggtgaattttcaactacttctttggctgatgaagatattatggctttacgccaattatctcgttatcgacttgctttagttgatgaatgttccgattggaaacgcaagtgtattgctcttttagatcaagtttttcctgaatactccaaacttttttcagattcctttggagtaacttctagagaacttctctctaaatatcctactcctgaggatatgttatctgttaatactgatactcttgctgaacttttatcaaaagcaagtagaggtcgttttggtacatctaaagcttctgaaatacaagaatatgcttcaaatacttttggagttagttttgctaaagatgcatttgcatttcagattaaacaaattattgcacaaattaactttatcgaagaacaattagaagaactagaaatcaagatttcagagttattacataaaactaatcaagttatcacaactattacaggaattggtgatgtattaggcggaattataatcggagaaatcggtgatatttcacgctttgaaaccgcttctcaacttgttgcttatgctggtcttgatgtttctgtaaaacagtctggtgattttgttggtactcaaactaaaatttcaaaacgtggttctccttatcttcgtagagcaatttggttagctgctactgttgcagcttttaaagatccagcattatctgtatattatcaatcccttaaagcaagaggaaaacatcatttaactgctattggagcagttgctagaaaaatgtgtaacatcattttcgctgttcttcggaacaacaagccttatgtcccttatattaaataacaacaactcatttaactttgtcttcaccctaaactttggtatctccaatttaggtttatttgttttgcctaattttacatataaatttattacatgctctgtcataatttctataatcacaaaggcaaaataagttgaattatctattgacatttaatagctggt

SEQ ID NO: 7359 - DNA, 1377 bp, unidentified
  source 1..1377: mol_type = unassigned DNA; note = element_b68efc9
  misc_feature 1..2: note = core
  misc_feature 3..90: note = LE
  misc_feature 91..1107: note = CDS
  misc_feature 1108..1377: note = RE
  misc_feature 1138..1375: note = bridgeRNA
cgatgagatggtctcctccccttctatatcggcgtcgtaatgcgccatgatggagatgctaacaaccatcagagaagaaaggaggagaccatgaacaagcttacgagaattggactggacttggcaaagaatgtttttcacctggtcgcttttgatgcgcagggcaaggagatcaaaaagaagatgctgcggcgttcacaggtactgagcgactttgcgcaattgccaccctgcctggtcggcatggaggcctgtgccagtgcgcactactgggcgcgtgagatggagctactgggccacaccgtgcggttgattccgccacagcacgtcaagccctacctgcgcggcaacaaaaacgactataacgatgcccgcgccattgccgaggcggtgacccggccggggatccattttgtcgccatcaaaacaccgcaacaacaagacatccaggccctgcaccggcagcgccagggggccatcgccgaccgcaccgccttgtgcaaccgtctgcgcggcctgctaggggagcgtggcctggtgtttcccaaaggcctgagcgcactgcgccgacgcctgccggcgatactggaagacgccgacaatggcctgagcgatacctgccgccgcctgctggcccgggactaccaacgcctccaggagctggatgaccacatcgacgcctacacccaggaactgcgcctccacagccaacaaagcgacgcctgccagcgcctgcaaagcatccccggttttgggcccatcgtcgccagcgtctttcatagccaggtgggggatggtcgcgcctatcgccgcggccgcgatgtcgccgcctcaataggcctcgtacccaaacaacacagcagcggcggcaaaaacgtcctactgggcatcagcaaacgtggcgaccgttacctgcgcagcctgctcgtccacggcgcccgcgccgtggttatccaggccgcccacaaggatgaccggctcagccgctggatcaacaagctcagagcggaacggggttacaacaaagccaccgtcgccctggccaacaaaatggcccgcatcggctgggcggtactggccaacaacacggtttaccggaccgcctaacggcggattgaaacgataacaaaacgcgagaaccccacccacgattgcgaagacattgtggcaaacgatgacacaacaggtcagaccggcgcagtgaaaacctgatcattccggaggcgactgaaaaagccgttacgccgaaaaggactctgcgcgcgcatttcatcgaggccaggagcacaagctccaccaacaggccggatatacggaagcaaccctgtccctgtcatcagaaacacaaagtcttgcaataggggaggtggccatata

SEQ ID NO: 7360 - DNA, 1474 bp, unidentified
  source 1..1474: mol_type = unassigned DNA; note = element_b6937b9
  misc_feature 1..6: note = core
  misc_feature 7..596: note = LE
  misc_feature 597..1460: note = CDS
  misc_feature 1461..1474: note = RE
  misc_feature 31..246: note = bridgeRNA
gtccttaagttcgtaggtgcagttacttcgtgttgtccaggcagttacgttgggactgtgacccgggtgggtcgggtgtggctgtcatgtgtgttgccggccctgtggtgcggcttgaaaggactggccgcccggcctgcctggacttctctggccgctgattgagatctgcgatgtgatcgcttgtttaaggaaatgctggcggggttgtccgtggggatcatgttggcagacaagcgaaaagaggtgcgcatggcggcgagccaggtgtgggtcggagtggatgtcggtaaagagcatcactgggtatgtgtggtcgacgacagcgggaaggtggtgttgtcgcgccggctggtcaacgacgagcaaccgatccgtgagctcgtggctgacgtcgatgagctggccacgcgcgtggtgtggaccgtggacctgacgacggtgtatgtcaccctgttgttgacggtgctggccgacgccggcaaagaggttcggtatctggccggccgggcggtgtggcaggcctcggcgacctatcgcggtgggaggccaaaaccgacgccaaagacgcccgggtcatcgccgatcaatcgcggatgcgtgagaccgatctgccagttttgcatcctcacgatgctgtgatagccgagctgcgcatgctcaccggccatcgcgcggacctggtcgctgaccgcacccgcaccatcaaccgactgcgccagcaactcgtggcggtgtgcccggcgctcgagcgggtggcgcaggtgagccaggaccggggctgggtggtgctgttgtctcgctatcagcggcccaaggccattcgccacagcggagtttcgcggatcaccaggatcttgaccgaggccggggtgcgcaacgcagcttcgctcgccgaggctgcggtcaccgcggcgaagacccagacggtgcgtctgcccggcgacgacgttgccgccgggttggtcgccgaactggcgcgggaggtgatttccctcgatgaccgcatcaaagccacagacgctgacatcgagggtcgatttcgccgccatcgcctcgccgaggtgatcaccagcatgcccggcatcggctttcggctcggcgccgaatttctcgccgccgtcggtgatcctgcactgatcggatcggctgaccaactcgcggcgtgggccggcttggcgccggtgtctcgagactccggcaagcgcaccggacgactgcatacccccaagcgctacagtcgtcggctgcgccgagtgatgtacatgtcggcgttgactgcgatccgttgcgatcccgattccaggtcctactaccagcgcaaacgagacgaaggcaagcgaccgatccccgccaccatctgcttggcgagacggcgtaccaacgtcctctacgccctcattcgagacaaccgcgcctggcaacccgactcaccccacatcaccgaatcggcggcttgacatcctcattgaga

SEQ ID NO: 7361 - DNA, 1378 bp, unidentified
  source 1..1378: mol_type = unassigned DNA; note = element_b6a621b
  misc_feature 1: note = core
  misc_feature 2..89: note = LE
  misc_feature 90..1109: note = CDS
  misc_feature 1110..1378: note = RE
  misc_feature 1147..1372: note = bridgeRNA
gaatgagatggactccccctatctcaacggcatcgcaatgtgccaaagtggagtttctacacaaacacttaacgataggggaagtccgaatgaatattacaacgattggtatcgatttggcgaagacaagtttcagcctggtgggggcaaacaagtacgggaaggttgtgctccggaaaacggtgagtcgcggtaaattaccttccgtcattgcccagtgccctccctgtttgatcggtctcgaagcctgcagtggcgctcactattgggcgcgtgaattcgagaagctcgggcacgaggtcaaaatcatcgcggccaagttcatcgaaccataccgcaaaggtggcaaaaatgacaacaacgatgccgaggccatctgcgaagcggttcgccggccgaatatctggtttgtgcccataaaatcagccgatcagcaggcggcgctttgcgtgcaccgggtgcgccagggcgtggtgcgtgatcgcaccgcctgggttaaccggttgcgcggcctgttatccgagttcggtattgtgatgccgaaaggccgatatgcggcccagtcagcagtgcccaccatacttgctgacccggacaacgggttaccggggcttgcgcgacagatgatccacgatttgtggttgtcgattcaacaggcgaacgaacaggtcctgagttatgaccgggcgctatcgcaattagcgaaagaagacgaagtcgccaaacgattactgaccattccaggcgttggtgaacagacagccactggcgtggtggcgagtgtgccggatccgaggttgttcaagaacagccggcagttttcggcctggctggggttggtgccacgccaatatacaacgggtggcaagatccggctggggcgaattaccaaacgcggagacaagtatctgcgcatgtgcctggtgcatggcgccagagcagtgatcgccaagctgggcgacaagcaggatcatgtcagctgctggatccgcggggtgattgagcgtcgtggttatttgcgagccgtggtggcactggctgcccgaaatgcgcgattgatctggaccctgatgatgaagcgagaagattatcgcgccattgatgcctgattgaaatgacataaagccattacagttttactaaacgaggtacccaccgagtctgcgaagatgtgaagatgaccaatcggtcagaccgaggaaacgaaagcctgctgatgcgagggatctgaaaagatcgtctaacgaatgaggccgtttccagcgaatactcatcctggtccgggcactgaaagcccaacagtagaccgcatgtagagttgcagtctaatgccgttgatctacagcgtctttgcttgacagtagggggagtccatgta

SEQ ID NO: 7362 - DNA, 1581 bp, unidentified
  source 1..1581: mol_type = unassigned DNA; note = element_b6a71ae
  misc_feature 1..3: note = core
  misc_feature 4..249: note = LE
  misc_feature 250..1452: note = CDS
  misc_feature 1453..1581: note = RE
  misc_feature 8..225: note = bridgeRNA
tttcgtattataaggttaaccagtttttactggttgaccttttttatataggacctattatatcagtagccagggtaggacgaacgggtgcgtgggacactgatcccgtcaactaaactgtccgccccctactcatagaaacatgtttgaggctggttgagacaacgatctcgaataacaagcgaagctatgatactaggagatggattaggggttactggtaagtaaacaggagaggaagagatagaaatgaatccagtaattggtctggatgtttcaaaaggggaaagtgaagttcaagcctttctagataagagaaaaccttataaaaaaagctttagtgtactgcataacaataaaggactggagactctactccactttatgtcagagattgaagaagaaaccggagttagaccaacagtaattttcgaatcgacaggacattatcacacatcaattgttcagttcctagaggagaataattatctgtatattatggttaatcctttattatcctatcaagcaaaaaaatctagtttaaggaaagtcaaaactgatgcggtagatgcttttaatttatgtgagcttttctataaagaagagctagagccttataaacagagaggtattcagcttttggacctacggaatctaacaaggcagcacgaaacagtgacaggtatctatgtacagacaaaattacaatttcattctatattggatcaagtatttccagagtatagaggggtgttcggagatttatattcaaaggtctccttaaaaacattattggaatttagtacatcagaggcaattttaaaggttgggatagatcaactcacagataagatagcttgtgaatgcataaccagatcagagcattgggcaagggatagagctcaaaagttaatcgaagcagctcaacgaaacccatttaagagcacgttgtatcaaagtcatttatttagtcttcaaatgtatattcaaatgcttcttcaataccaagagcatctttcagagttagacgaccaaatagatgccttggcagaagagctagaagaatataagataatccaatcgatccccggaattggaggaaaaatcgctgccacgattgtttctgaaattggtgagatcgaaaggtttagtcaccctaaaaaactggtagccttttcagggattgatccaagtgttcattcgtctggaaaattcacagcaacaataaaccgaattagtaagagaggttcaagccagttacgccatgccttatatatggcagctctatgtggtattcggagttctcgcaataaaaagctaaaagagttttatgatcgaaaacgagaagagggtaaaccctttaaagtagccatgattgcatgtactaataaacttattcattggatatatacccttttaaaacgaaaagagaatttcctagacttagcttaaacaacaaagataagtaatcaatccaataccttccatttatgtaaaggaaggttatttggcatgagcatttttagtatatcattatatgtagaagttttttaatgaaaaatattgacttctattagctgg

SEQ ID NO: 7363 - DNA, 1399 bp, unidentified
  source 1..1399: mol_type = unassigned DNA; note = element_b6a84e5
  misc_feature 1..2: note = core
  misc_feature 3..76: note = LE
  misc_feature 77..1123: note = CDS
  misc_feature 1124..1399: note = RE
  misc_feature 1121..1386: note = bridgeRNA
tgttggggtggacgacccccgacggcatcgtgtgccagactgaggttgttgaacgctcagtcaaaggagatcgtccgtggagcagattaccagaattgggatggacacgtcgaagcacgtctttcagcttcacggggtgagtgcgggcgaggagccgatcctgcgccggcaactgcggcgcaaggagatggtggcgttctttcagaagcttactccgacagtgatcgccattgaggcgtgcggcgcgtcgcatcagtgggcgcggttgctcagctcgttcggccatgaggtgaagctgatcgccccgcagttggtgaagccctacgtcaaacgagcgaagaacgacgccgccgacgctgaagccctgtgcgaggcgatgagccggcccacgatgcggttcgtgcccgtcaagaccgctgaacagcaggcggcgttgatgctggtgggcgtgcgcgaccgtttgatccgcaatcgaacgcagctctcgaactcgatcagggggttcgcggctgagtttgggttttccgccgccaaggggatggctcacctgattcccctgctcgagcgtatcagagaggacgagggcgtgccgcccctggcgcgggggctcttcgcctcccaggcgaaggagtatgcccagctgcaggcgcgcattgcggaggtcgatgcgcagctggtcgcctggcataaggccgatgcgcaaagccagcgcctggccgatatcccgggcatcggtccgatcggcgcgtcgttgctgacgatgaagaccccggcgccggaaggctttcgatcgggccggcagttcgccgcttggattggcctgacgccgaaagatcattccacggctggcagacagcggcttggcgggatcaccagagctggcgacgaagccttgcgctgcgtgctggtcgccggggccactgccatcatccagcaggtgcgaaccggcaaacgtcgaaccgggctggccccatggctggtggagcttctcaagcgcaagccgccgaaggtggctgcagtggctcttgccaataagttggcgcggatcgcttggaaaatgatggtgtcgggcaaggcctacactgaaagatctccggacgccgctgtagtggtcgcggcctagaaatctgccggtagggagtggtatttatccgctgcctgctggtcgatgcctgaacttgcaagcaatgagcagatggtgcgatcgatcgatccaaagacgcgaaacagcccgatagtccccttggctttacgagccgatcacatgttggggcctcgcgtcgcggaaaccagcttggccagtggtcatccaacaccacaaacaaaggccggacatatggcagcaagcgatcagatcaaacgctactcggcgccttgcagggatggggtcgtccacata

SEQ ID NO: 7364 - DNA, 1374 bp, unidentified
  source 1..1374: mol_type = unassigned DNA; note = element_b6a963f
  misc_feature 1: note = core
  misc_feature 2..77: note = LE
  misc_feature 78..1109: note = CDS
  misc_feature 1110..1374: note = RE
  misc_feature 1148..1365: note = bridgeRNA
tactgagatggtccgccgcttgaacttcacagaaggtgtggaggatcttgtaggcaggttcaaggaggatcatcgacatgcagattcgttcagttggcattgaccttggcaagacgacatttcatctcgtagcgcttggcgataacggcaagattctgttgaggaagaagtttacgcagaagcagctcatcaccttcaccgccaacgtgcagacctgcctgatcgggatggaggcatgctctggtgcccatttcctggggcgtacgctccgcgaacagggtcacgacgtgaagctcattccagcccagttcgtgaagccgttcgtgaagtcgaacaagaacgacttcctcgatgcggaagcgattgcggaagcggtcgatcgccataacatgcgcttcgtgccgatcaagacggatgatcagcttgatctccaggccctgcaccgggtacgtgaccggctgatcacacggcgcacctccgtgatcaaccagctccgcgcttttttacttgagcgcggcctggtgttcgccaagagtccagcgaagcttcgagagcggatgccacagctgctggagaacgatgcggaggacctcacgccgcggatgcggaacctgctcgccctgctctggaacgagtggaaggatcttgagcaacaagtgattgatctcaaccttgaagtggaacagatcgcgtcgagcgacgcagcctgcaccaggctcaggcagatccccgggataggacccctgatcgcgacagcgatcgtagccgcgatcggcaacggggcagccttccgtaaggggcgcgagttcgcggcctggatgggcctggtgccgaagcagtactcgaccggcggcagggcgaagctctctggcatcagcaagcgcggcaacagttacttacgtaaaatcctcatccacggagcacgtgcggttgtcttacgctgcaagcgagatagactgacgatcggcccatggatgacggcgctcgaagcaagggctccacgcaacgtgctgatcgttgcggcagccaacaagctggcacggatcgcatgggcggttctctcaaccggaaaagagtatcgcggtatacctgcggccatagccgcgtaatcggctccgccgcaacccacgacgaaaagctcacgtttacccaccgaggtctgcaccggacaagcaggatgaaagaacagtcaaaacggcggacctgaaccctgatcccgcaaatggccatcatcggccggccgacttagcaggacaggtacgcgcgtatctcatcatggccaggagactcaacctccaacaaaggccggatacattgacgcagactttccttcaccctcaactttttccttgcattccggcggcggaccataca

SEQ ID NO: 7365 - DNA, 1235 bp, unidentified
  source 1..1235: mol_type = unassigned DNA; note = element_b6ab4a5
  misc_feature 1..2: note = core
  misc_feature 3..73: note = LE
  misc_feature 74..985: note = CDS
  misc_feature 986..1235: note = RE
  misc_feature 1012..1205: note = bridgeRNA
ttatggaatggacgccccttgcacccaagccgataatcttcggcaaacatagcaagcagaaggagttcacagaatgcagttacttgcgattgatttgggcaaacagtccttccacatccatgggattagcagtgagggcgaggtgatctcgaagaaggtgaccagatcaaaactcgaagccgttgttcaggaacttgcgccggccattgttgccatggaggcttgcgccagcgcgcatcattggggccgacagttcgaggcgctggggtattccgtacgcctcattcacccgcggttcgtgccggtgaagacgacggagcaacaggatttacagatgctgcatcgaacacgcgaccggctcattacgcaacgaaccggactgataaatcacattcgcggcctcctgggagaatatggcgtagtcattccggtcggtgcctttcggttccgcaaagatatcaggaccgccatctctgaagccagcctatcaactctggcaaaacaaagcttcaacgcactcatcgccgagttcgaagcgctggacaaacgtattaacgagatcgaccgaaagctcgttgcgatctgccgaaccgatgaacggtgcaaacgcctggcaactcttcccggcgtcgggccggtaatcgctaccgccttgattgccgctgtcgatgatggacaacacttctcgtcaggcagggctcttgcggcttggatagggctggttcccaggcaatatacgacgggaggcaaacctcggcttggtggcatcggcaaaagagggaaccaatacttacgccgccagctcatccacggtgccaggtcggtgttgatcaggatatccgcgcgcagtgaccggcgtgccaaatgggcccaagaactacttgttcgcgcgggtcacaacaaaacgctcgtggcaattgccaacaaaacagcacgcatggcctgggcggtgttgcgcagcggagaaagctacaaagcggcatagctggggcgcagggcgcttcggctttcaagaatgcgaggtggatgacgatggtgtaacggcaggggccgcctattcacagcctgtaaggagcgatggccttcaaaggccggtcatcttaaaaggcaatgaaatcagcggatcccatcgaggccagaagcgaaggtgcttcaaagaaaggccggatagattcacgcatccaatgccgtcaatgctatcgtgaaaaagaccttgcgcaggaggcgtccataga

SEQ ID NO: 7366 - DNA, 1581 bp, unidentified
  source 1..1581: mol_type = unassigned DNA; note = element_b6c15c2
  misc_feature 1..4: note = core
  misc_feature 5..285: note = LE
  misc_feature 286..1461: note = CDS
  misc_feature 1462..1581: note = RE
tcacgtataatccaattatcttagatggtaattggatttttcctttctcccagaatctactgggtattttaatccatctctgatatattttgaaatggcactgtggatctgtacctataaaattacggctttgactgtttggaggtgactcagaccacagcttttcgtctattactgttaatcagtttgttaacgcatcgacgtttgtatttacgtgattacacagccgaattctctgtggaagacaacagtgctcaaaattttttatcaggaggtatatcttcaatgtccatgtactttgttggaattgatatttccaagtacaaacacgattgctgcatcctatctgcagctgagcaaaaagttgtttcaaaatttactatcaagaatgataaatccggatttgctcaacttcttactatctttaactccctctccaatcctgaagacataagaatagggtttgaatcaactgcccactatgccctcaatcttgaacttttcctcgaaaatgccaaccacagctttatggaagttaatccagtccttatcaaggaatacaagaaatcaacaacattaaggcgtacaaaaaccgactctgttgactgcgaatcaatagctcgttggttaatgactgttgagtacaaaccccattcaaaaggattttaccacgcttattctttaaagtcattaactcgtttacgcgataagttcattcgtcagcgttctttctatcttgtaaagattaccaatgtactggatcacacgtttcctgaatttaaacctttcttcaatgaacgcttatctaaaaccgctctctatctgcttgaaaactatggttccgcagaaaagatggcaagaatgaattctacttcgtacgagaagcttcgttccgtatccagaggaaagttttctcctcaacaattcctgcgattaaaggaacttgctgctaatactgtaggtgtcaacaattctatatttgatgttgaattaaacagcttgctgactttatataaatcccttgtcaaagagattgatactcttgagaatgagatttataaactcattgaagaagtacatcctcattacatgtctgttcctggtattggtccgttatcagctgctgttatctattctgaatatggagatataactaatttctctaatcccggacagatgcttgcttttgccggaattgaacccggtattaatgaatcaggaaccgaatcacacggaggtcgaatggtaaaacgtggttcgtctcagctccgttatacactgattaattgctgccttcctttgatccgtttcgatatgacatttgctgcttactatgccaggaaacgcggagaaggcaagcctcatcgggtagccattactcatgtagcaaagaagcttattagagtcatctacgcattggagagacaagatatggactttaatatccagaggcttcgttaatatccgatctttgaaagttttgttccatctgaaatacggtgtattcagatggcttattaaagtaacccttttttacataatcaaaaaatcttcaaaaatcacttgactgtttatagtttg

SEQ ID NO: 7367 - DNA, 1543 bp, unidentified
  source 1..1543: mol_type = unassigned DNA; note = element_b6c88bc
  misc_feature 1..2: note = core
  misc_feature 3..108: note = LE
  misc_feature 109..1227: note = CDS
  misc_feature 1228..1543: note = RE
  misc_feature 1238..1494: note = bridgeRNA
agaccgtatgttcggtctgcgacggtagcccgcccccgtagtaagcaggaaacggggattgcgccggatgggccggcacctagccccatgcttaagcgagggcggaccatggaaaaggatagcgaacttttcgtcggacttgatacatcaaaattgaaaatttcggtcgcggttgccgatggcgagcggaatggtgaagtccggtttttcggcgacatctcggcagagtcggcatctgtagcgtcgatggtagcgaagctcgggaaacgcggcgccaaactccacttctgctacgaggcgggcccgtccggttacgagctttaccggcagatcattgggcttggtcattgttgctcggtggtggcaccatcgctcattcccaggcgtccgggcgaccgggtcaagaccaaccgtcgcgacgctgtgagcctggcccggctccatcgagctggtgagctgacgtcggtatgggtgccagatgaaacgcatgaagccgttcgcgatctcgtacgcgcgcgcgaagttgcaaacgatgggttgagaaaagcgcgacagcatcttcagtcttttcttctgaggcatggtcgcatttatgcgggtcgggcgccctggacgcgggtgcatagtcggtggctggcgatccagagttttgaacaccccgcgcaaaacattgtgttggccgaatatatacaggcaattgaggacgccgcggttcgcttggacaggctcacaaaacaggtctccgaggcaatgtcgtcgtggtcaatgggcccggtcgttgaggcctatcaggcgatgcgcggcgtcgcgctcattacggctgttacctttgttgtcgagatcggcgatgtcaggcgcttcgacagtgctccacagctgatggcgtatcttggccttgtgccgtctgaaagctcgaccggggatcgggtgcggcgtggcggcatcaccaaggctggtaacgtgcgagcgcgtcgcgtgctgatcgaaggggcatggacctatcgctttccagcccgggtgagccgggagatcgaggcgcgtctggacgggctaccaaggtcggttcgcgagatcgcatggaaggcccagatccggctatgtgcgcgctatcgaaagctcgtcatggcaggcaagaccaagaccgtcgccgtcactgcaatcgcgcgagagatggccgcctttttgtgggcgattggacaggaggtcgcccccgcaaaggcggcgtgaaacgtcatcgtcgatcaactgcaaaaggagaatcccgaatccataccttctgctgatgtgcaatattgggggcagggccccggtggagaaccctcgtggcagctttgtggcaggccaaaagcccacgcccgaccgaaagaccgaggcagctccagacgaacctacggaaatgcggtagccaacccgcgcataagagtatgtcaaccgtcgtcgaaagccctgcctccaactttgcacatcagcttcaagcgatttgcttcatcaatgctgatgagaggatactggcatgcccaaagcccttgtaaacgaacataag

SEQ ID NO: 7368 - DNA, 1806 bp, unidentified
  source 1..1806: mol_type = unassigned DNA; note = element_b6d064a
  misc_feature 1: note = core
  misc_feature 2..359: note = LE
  misc_feature 360..1676: note = CDS
  misc_feature 1677..1806: note = RE
  misc_feature 111..290: note = bridgeRNA
tagtataataatggtgtagtcaatcaagactacgtggttaataagtttctataaaccagataacagaagaagggattcttccttcatcagatgttatcttaaataattatcttgtctgacggttcctgatagacaccagcgaaaacataaggtattatctcttaggataggataaataatgaatcactccttgggaagcagttcatttctgctgatacctacaattaagtcaattagtccattcgacagggttttatgttttagctggttgggagccggaaggccatacccgtataacgtgctaggttgtgtacctgccagattggaaatggattcctatcagaaaggagctatcgctcatgtcaaacaaatttatttttaatcttgatgatttattcatctctgttggtattgatgttggtgctgacttctcctggatgtctattgcacttccaaaccaacagtttgtaggaaaaccttataaaatcctgcatagtgatatgaattcccttacaactgctgtttctaaaataaaagaagcagaagagctgtattctttggaaagtcgcattttcctagaatccacgggaatttatcattatccactcttctgctatcttcgtgataagggttttaactgctcggttattaatcctatcattactaagaatagcacaaatatcaacattcgaaaagtacataatgatcgttttgattcaaaaaaagcggcattggttggtttgaaaccggatttaaaggtttctcttatgccatctgaccttgctctgaattgtcgtaatctctgtcgtgaatactacgacttaatggataatcgaagtgcttacgtgaacaaacttcagggtgaactgcgtatggcatttccgcagtaccttggcattttctccaaggttacaatcaatacatctcttgcattattggaaacttatacctctccatctgcctttattaatgcagacaaacaagagattcttgataccatcagatcaacagcacgtttcggacttacatatgctcagaacaagtataatgccattattcaggctgcaaatgaagcgagtgaatttggatatatcattgatagcaatatcaaacgtattcgcttatatattagtttcatccgtaagtatgatgaagaaatcaacaacatacttgatgccttgcatgaacttgttgatgctaacgaggataccgattttgtaaaacaaattcatttaattgaaacatttaaaggcgcaggctttttatctgcggtttctcttatgggtgaaatcggtgatttctctgcatttggaaaaccgaaacaacttttcgcttactttggtcttgatccggcagtaaaacaatccggtaaatttgaaggaaccaaggtacaaatgtccaaaagaggctctgctatagccagacgggtaattcacacactgacactgcaaagcattagtacttcccgcacaggagaagcaaaaaatccggtactccgtaagtattacctcaaaaaatgtgaatcaaaaccaaaactcgtagcaatgggggcagtttctcataaagtatgcaacatgatatttgcaatactcagggacaacaaaccttttgtaatcattacaccacaggagcataacaaacaatacaatgctgctaaatgcgacttagttgcttaaaatactgaattccttgaatgaatatttttaaaaaatgatattttcaccaagggggaagtgcgtccttttttagtcagaaaataaaatcaacatttttttcatttttctattgacatttattagctggact

SEQ ID NO: 7369 - DNA, 1349 bp, unidentified
  source 1..1349: mol_type = unassigned DNA; note = element_b6d9218
  misc_feature 1..2: note = core
  misc_feature 3..83: note = LE
  misc_feature 84..1103: note = CDS
  misc_feature 1104..1349: note = RE
  misc_feature 1121..1335: note = bridgeRNA
gatggagtggatggctcctgctcccggcgtcgcaatgcgccatactgtagatgtcatcgtctgctgcaaaaggagccatccgcatgaaggttacaacagtcggcctggatttagccaagaatgtctttcaggttcatgggatcaccgatgaaggccatgtcgtcttcaacaagccgctgcgccgggctcagctgcttgcctttttcgagcgcctggccccttgcctgatcggcatggaagcctgttcggcgagtcactactgggctcgggaactgtctaggctcggtcacgaggtgcggctgatcccaccgatctacgtcaaaccctacgtgaaacggggcaagtcggatgctgtcgatgcagaagcgatctgcgaagccgttacccgcccgaccatgcgattcgttcaggtcaaatccgtagagcagcaggccatgctgagcctgcaccgaacgcgtgagcttgtcgtgcggcagaggacgcagctggtgaacatgctccgcggacttctggcggaattcggggtcgtcctgccgcaaggtctcgacaaggcgaccggctttgcgaggggcgtcttggaaggagctgtcccggatattcccgagatcgggcaagacgttattcgcgttctttgtcggcagctcctgtcgaccgactgtctcgtgcgttggcatgatcttcggttgcaggtcgtggcgcgggccgaccctcggatgaagctgctgcggaccattcccggcgtcggaccggttacagcctcggcgatcgtcgcgaccatcggcagcggtcgtcagttccgcaatggacgtgaatttgccgcatggctgggactgacaccaaggaacaattccagcggaggcaaggaaaggctgggcagtatcacgaagatgggggatcagtatcttcgaaaactcctcgtggccggcatgacttcccgcgccatccaggtgaaggtccgacctgacaagggggacccgtggttgagacaactgctggagagaaagccgttccgactggcaactatagccatggccaacaagaccgccaggatcatctgggccgtccttacacggggggagacctggacgccaagacatgcctgatgcggcaagccccgcatatagaatagcaagaccgaagagatgatggagacacccacagccgtaaaaccgggagaccccgccgcaagtccggggcatcatcgcccgcaaacccgagagggacccggtacgcggaagtcatcagggccagcggtcgaaacgccgcgcaaacaggccggacacacgaccgcttctgaatgggtgaattaaagtcatttcccgcttgctatgcaggagccatccacacag

SEQ ID NO: 7370 - DNA, 1624 bp, unidentified
  source 1..1624: mol_type = unassigned DNA; note = element_b6df760
  misc_feature 1..2: note = core
  misc_feature 3..270: note = LE
  misc_feature 271..1497: note = CDS
  misc_feature 1498..1624: note = RE
  misc_feature 14..290: note = bridgeRNA
ctcctacaataataattacggtttaaggcgcggcagccagccgcgtcttttcccatctcaaagccgaagctgttagaatgggagagtaaatggcctgacatagctcaccttgggccaacacgcccgtaaatgagtccgtcagccgcctctctcgttcgcagcattcgatttgcgcaggtagagccaccatgtgcgctcgtgtcacccaggagattgaacaggcaatgaggaaagggcgggaagccatatccaatcacaaggaggaactaaatgaacgcagtagggatcgatgtttccaaagggaaaagcatggtggctgccctgcggccaatgggtgaagtggcgttgctgccacaggaatttctccacaccgaggtcggtctggagcagatggcctacgccatcatcgcgctgggggaagatacccgcgtcatcatggaggccaccggacgctaccacgagccggtcgcggcggcgttgcatgagtacggcatttatgtctgcgtcctgaatccgctgttcatcaagcagagcgggggcggctcaatccgcaaggtcaagaccgacaaggcggacgccatgaagatcgccaagtatggccttgacaattgggtagatctgcgggaatatactcccatggacacggtaagacaacaactgaagctgtgcagccgccagtacaacctctacatgaaaacggtggtatcgctgcaaaacaatctcatttcgctggccgacaagacctttcccggcgtgaacgaactgttctccagcccggagcgtgcggatggccaccagaaatgggtggattttgtcatgaccttctggcactgtgactgcgtctgccgcgtcagcgagaaggcattcaccgagcgctatcagaagtggtgcaagcgcaagggctaccattacagcgcagagaaggcgttggacatctacgcgggaagctgtggccatttcaccacgctgccgaagaatgacaacacaaagctgctgattacgactgctgcccagcagttgcttgcaggcaagatgacgctggccgctttgcgcgccgagatggcacgccttgcgcggcaactgccagagtacgatacagtgcatgccatgtacggcgttggcgaaatcactgccgcgcagcttatggccgagattggcgatgtgcgccgttttccgcgccgcagctccattgtgggatttgcgggtgtcgatccggctgtaaaccagtctggcaagcatgcggcgcaaagcacacctacgaccaaacgcggctccccgcatctacggaaaacgctgtaccaaatcgtctgtacatatctgagaaaagctccagaggacgaaccggtgtaccagttcctcgataagaaacgcgcggagggcaagccttattttgtctacatgacagccgcgcagaacaagttcctgcgcatctactatgctcgtgtgaaagagtgccttgaggatttcgacgcgcagcagaactccgcacagagttaagctaactgccaattccatcccggctggcgatacatcttttctccagcctgttttgctatgccctttttcggtctcgcaaattttgcgggacttttttctttttggctattgacttttgtttgcagga

SEQ ID NO: 7371 - DNA, 1433 bp, unidentified
  source 1..1433: mol_type = unassigned DNA; note = element_b6e3100
  misc_feature 1: note = core
  misc_feature 2..229: note = LE
  misc_feature 230..1420: note = CDS
  misc_feature 1421..1433: note = RE
  misc_feature 14..244: note = bridgeRNA
ctacttgttctattgcctcatgaccggggcctggcgaggctcggtctaggtgcccgggtcgtcgctctcacatcggctgccctcgattcgtcgtgtggctctcatttggcctgcgtgacccgggtgccgacctatgagcgggagaggctcaagaggggtttgctcagctcgaagtagctgtgccctcccggctcgacaaccacatcggatcgagtgctgggagaacggcatggagcaagatggacagcgggtcgtgatcgggatggacccgcacaagaggtcggtgacgatcgaggtcatgacgggcgaggagaccgtggtcggtggcggccggttcggcaccgacatcgccggctaccgctcgatgctggaggtggtgcggcgctggccggaccgggtctgggcggtcgagggctgcaggggtatcggccgccatgtcgcgctgcggctgctggccgacgggcaggaggtcgtcgacgtcccgccgaagctgtcggcgcgggccagagtcttctcgaccggtcagggccgcaagaccgatgccaccgacgcgcactcgatcgcgctcgtcggcacccggatggccggactgcgcccggtggtcgatgaccagcagctcacggtgctgcgggtcctgggcgaccggcgccggtccctgggtgaggaccacacccggatggtgagccagctgcaccacctgctgctcgagctgatcccgggcggagcgaagaaggacctgtccgcggcgcaggccaaggcgttgttggccaaggttcgaccacgggatgccgctggcaaaacgcgacgccgggtggccgcggagctcatcgcggacctggaacggatctacgtccggaagaaggccgcggacaaggagctcaaggaactggtcgcagcgaccgggaccagcctgatggacctcaacggcatcggaccgtccggggcggccaggctgttggtcgaggtcggtgacatcacccggttccccgaccgtgaccacttcgcgtcctggaacggcaccgcacccatcgacgcctcatccggtgaccaggtccggcaccggttgtcgaggcaagggaaccgtcagatcaaccggaccctgcacatcatggccaccgtccagctacgcaacccgaccgagggccgggcctactacgaccgacgcaaggccgacgggaagacctcgatggaagccatgcgcgcgctaaagagacggctgtcgaacatcgtctatcggaccatgctcgacgacgccatcgcgcaagcagcaaacggcatgaggacgggcccgggagggcaaacgggacacgactccgactccagcgcgaccggctcacatcccaacgccggctcttcggacaagccacttcccggacccgtcaccacgaatcctagaaccccactcccggctgcttcttgacacagaggggtgc

SEQ ID NO: 7372 - DNA, 1557 bp, unidentified
  source 1..1557: mol_type = unassigned DNA; note = element_b6fd7c8
  misc_feature 1..2: note = core
  misc_feature 3..270: note = LE
  misc_feature 271..1437: note = CDS
  misc_feature 1438..1557: note = RE
  misc_feature 3..247: note = bridgeRNA
cttgtatgattagttagaagctaaatcatactctcctttccatttttgctgtttgtgtcataatgcattcagatactgtggacttttgattaattccctgtagcattgactacttgataggagtgtattgccgctacattatctgaaatgttcattagctggatgttgccgggagctgcgcttccgagtactcatatcgatcaagtttacgaaggataatcgtaaggtggacctgacagtatcaaatctcttagaaaggaggcgttttcaatgatctatgttggcattgatatcgccaaactcaatcactgtgcctcggccatcgattctgatggtcaggtactcatcgagccgtttgaattcttgaatgacaatgatggcttctacatgctgttttccagactcagttctttcgagaaggacagcctcatcattggtcttgaatcgactgctcactatggcaacaacctgatgtatttccttgtctctaaaggtttcagcgtctgcctgatcaacccgatccagacggccgccatgcggaagaacaatatccgcaaaaccaagactgacagggtcgatgctctggtgatcgccaaaaccattgccacgatggatgacctcagattcgttaccctgtatgacatcgctctcatgcagctcaagaatctgggacgattccggatgaaactggtcaagcagcgtacccgtaccaagatacagctgacttcctatctggatcaggtcttccctgaactccagtacttcttcaaatccggcatccatcagaaaactgtatacgctatccttaaagaggccccctctgctaaccagatcgcttccatgcatctgactcatctcaagaaccttcttgtgtctaattccatgggacacttcaagaaggaaacggccttagaattaagagttctggcacagaagtctgttggcactgccgacagatctctatccgttcagatcacccaatctatcgcccagatcgagcttctggatagccaaatcgctgcggtcgagtctgagatcacagacattgtctcttccctcgactctgtcatcatgaccataccgggcatcggtcccatcaacggcgggatgatcctcggtgagatcggtgacattgaccgcttttcaaaacctcgcaaactgcttgcctttgcgggtctcgacccttccgtttaccagtccggaaacttctctgcgaagaagaccaggatgtccaagcggggatcttctgcccttcgttatgctcttatgaatgctgcgcataacgccgtgaagtacaacaaaacattcagagagtactacgattccaagagagctgaaggtcgcggtcattacaatgccctggggcattgtgccggcaagctcgtccgcgtcatctacaagatgctcaaggacgatgtggaatttaatttagattagattccacaggaatacttttttcgaggcttccttttgggggtctttttaggttgcgcaattttctgcaactgacactattctaatttcctctgattatttccttgacttttcatagctggt

SEQ ID NO: 7373 - DNA, 1350 bp, unidentified
  source 1..1350: mol_type = unassigned DNA; note = element_b6fed16
  misc_feature 1..2: note = core
  misc_feature 3..83: note = LE
  misc_feature 84..1088: note = CDS
  misc_feature 1089..1350: note = RE
  misc_feature 1122..1337: note = bridgeRNA
tgatggagtggatggctcccgctcccggcatcgcaatgtgccacattgggtgctgtcactctgacccatgaagggagccatccatgaagcagattaccactgttggcctcgatctggccaagaacgtgttccagattcacgcagtcgatgccgcgggggcggttttggtccgacggcagatccggcgggcgcaggtgctgctgttcttctcgcgccttccaccgtgcctgatcggcatggaagcgtgtgccggagcgcatcactgggggcgggagttggtgaagcttgggcatgaggtgcgcctgatcccaccgtcctacgtcaaaccctttgtcaagcgcggcaagaccgatgcggccgatgccgaggctatctgcacggccgtgacccagccgacgatgcgcttcgtgccgatcaagaccgaggcgcaacaggcggtgctgatgcagcaccggacgcgagacttccttgtccgccagttgacccaaatcgccaacgcgatccgcgcccatctgggcgaattcggcctgattgtgccgaaaggcgttcacaacatgaaccgcctcgttaccgaagcccaggcggctgatctgccaactgaagcccggatgccgctcgacctgcttgttggccagttcaccgacacgaagacgcgcatcgatgccgtcaccgccgatctgcgccgcaccgcggaggcggacgagactgcgcggcggctgcaaacgatgccggggatcgggccgatcacagcgagtgtcttggcggccacgcttcccgatgtatcggccttccgctcggcccgcgacctgtcggcctggctgggcctgacgccaaagccgcattcgagcggcggcaagggacgattgggatcgatctcgaagatgggcaaccggtatatccggcggctgctctacctcggcgccatgggggtgatctcgacccgcaaacgcaccgacccgggcgacgactggctgggaggccagatcaagacgaagccgttgaaggtcgtcgccatcgcactcgccaaccgcatggcgcgagccatctgggccatgctgcgaaccggcgaggcttggcggggggcttgaacacaacgaactcggggccataacgggcctgaccgaactggcgagggcaaagtgagatgatggcacactgacggaaaagaggctgggacaccccgttcggaccggagcgcctcgagcgcgggccattgatagggacctgacctcacgcggacgttcatcagggcgcgcgggtatcaccgcaagcgagacgccgaatacatggccgcacccgaccagtgccgaagatcaccgccccccttgccacgcgggagccatccataca

SEQ ID NO: 7374 - DNA, 1229 bp, unidentified
  source 1..1229: mol_type = unassigned DNA; note = element_b7148d4
  misc_feature 1..2: note = core
  misc_feature 3..242: note = LE
  misc_feature 243..1214: note = CDS
  misc_feature 1215..1229: note = RE
  misc_feature 6..213: note = bridgeRNA
cttgtatctggacatagcgctcctatggcgttatgtcttccgactgatcatcggaggaggtgcgggaagtccagtcgctcctgaagcttcgagcttgtgctgtagatcggctcgcgccctccacatgctggcccatcggtgtccgaacggtatccagagtccgcccttggcgtgaactcgcatccacaaggcaggaccgggcgcagcgatgatcgccttcaccctacgatggaggattcttcatgctcctagtcgtcggtatcgacgtcgccaaatgcagtttcgacctggccatcgaactggccaacggcaagcaccgcaccaaggccaagctccccaacgagcagaagggctttcaggcactgcagacgtggctacagacccatgcgcaggccgatagctggatcgtgatggaggccaccggcgtttaccacgaggccctggcggagttcgtgtatgcgctcggctaccgcgtctgtgtcctcaacccagcgcaaacggcgctgtatgcgcgcagccagctgacccgggtcaagaccgaccgcagcgatgccaagctgatcgccagctacggcgcacgccaccaagagcagctacggccctggcagcccgatccgccgacactcaagcagctcaaggcgctggtacgccgtcgcggcgatctgcagcagatgctgcagatggagcgcaaccgtctggacgtggccgggtccgccgtgcaggactccttgcacacgcatattgccgatctgcaggtccgcattgccgagatcgaacgggcgatcgaggaccatatcgaccaggatccgaccttgcgcggacagcgcgaactgctggtgagcatcgacggcattgccgacaccagcgcggcattgatgctggccgagctgggcgatgtggcccgcttcgccgatgccgcggcggtgacggcgtttgcgggcctgaacccgcgactgcaggagtcgggcaagcgccagggccaggtctgcatctcccgcaccggctcacctcgcctgcgtgccggactctacatgcccgcgctggtcgccatgacccacaatccgattgtccgggcgctcaagcaacgcctgcgcgagcgcggcaaagccaacaagcagatcatctgcgccgccatgcgcaagctgctgcatatcgcctacggcgtcctcaaatcacggacgcacttcgatcctgaaaaggctcttgcctgttagcagggaagacggtat

SEQ ID NO: 7375 - DNA, 1612 bp, unidentified
  source 1..1612: mol_type = unassigned DNA; note = element_b71d62b
  misc_feature 1..3: note = core
  misc_feature 4..301: note = LE
  misc_feature 302..1480: note = CDS
  misc_feature 1481..1612: note = RE
  misc_feature 8..224: note = bridgeRNA
gttcgtattataaggtcagccagatatttctggttgacctttttttatttggttttattataacggtagcctgggtagaacggaagcacccgtggggcttagatcccgtcaactaaacagttcgccccctacttgtagaaacatgattgaggctggttgggactttgatctcgtataacaagcgaagctatgatactgcaagaaggattaggggtaccggtaattttattttggaggagataaataatgaatccagtggttggtctggatgtagcaaaaggaaagtcaggttcaagctttcttggataaaaaaatcccatacaaaggaagttttaaagtagcacatacccttgagggactagataccttacaccaatttcttaaagaagtagaaagcgtaacagggatacgacctccggtcgttttagaatctacgggacattatcatacacctgttgtacagtattttgaggatagaggttatttacttattatcgttaacccacttatttcttatcgggcaaagagctcaagcttacgaaaggtaaagacagatgtaatcgatgcgaatcatctttgccagctgtactataaagaggagttagaaccatataaaaaacgtgggattcaactcttaaaccttcgtaatctaacaagacaacacgaaaatataacaggtatttatgtacaaacgaaacttcaatttcaagcagtgcttgatcaagtattccctgaatatcgaggagtttttggggacttatattcagtggtttctttacttactttattagaatatcctacttctgaagatgtcttagcagttagtgaagaaacaatagccactaagattgacgaactatgtaaaagtcgttctagtaaatggactaatacaaaggcaaaggaacttatagctgccgcagttcaaaatccctttcagaaaaccctgtatcagagccatattctaaccctagaaatgtatatagagatgcttctagaataccaaaagcacctatctaagcttgaagacgagatagatgctctggcaaaagaaattgaagaatataagattattcaatcaatcccaggtatcggagaaaaaatcgcggcaacgattttttctgaaattagtgagattgatcggtttaatcacccaaaaaagctcgttgcatttgcaggaattgacccaagtatctttgaatctggtagattcaaaggaacggttaacaggataactaaaagaggatcaagtagattacggcatgccctatatatggctgttcgatgtgccattcgtgattgtcgcaaaaagaaaacgactgatgatatcatcccgcgtaataagaggttacgtgggttctatgagaagaaacgtgaggaaggaaagccctataaagtagctgtaatagcatgtgctaataagctcttacaatggatatatgcacttttaaaaaataatacaactttccaagatttagcctaaatgaaaaatatatttaaataacacaaaaccttccaaaagtataaataaggaaggttatttggcatgcacatatttagtatagcatgaaatattataagtttttattgaaaaatgttgacaaactattagctg

SEQ ID NO: 7376 - DNA, 1587 bp, unidentified
  source 1..1587: mol_type = unassigned DNA; note = element_b721984
  misc_feature 1..2: note = core
  misc_feature 3..280: note = LE
  misc_feature 281..1450: note = CDS
  misc_feature 1451..1587: note = RE
  misc_feature 35..257: note = bridgeRNA
acgtataatccaattatcctctttttgaggaaaatggattattctcctttctctcaatctagttgggtaattttgaattttccattataataattaagcactgtggatttgtttctatattattacagctttgactgttcaggagtgactcaaaccacagtctttcgtctttactggtaatcagctagttaacgctttgacgtttttatttacgtgataacacagtcgagattcttgtggaaaacaacagtgcaaatattattcttaggaggtttttaccatgtatcttgtcggaatcgacatttccaagtacaaacacgactgtttcatccttaaagaaacgggtgaggttgtcttaaatcctttttccatctcgaataatcaagatggtttccaaagcttacttactgtccttaattctcttaatcctcatgaagaaataagaatagggtttgaagctacctctcattattcccttaatctgaaattattccttgaaaaagcccaccacagcttcatggaatttaaccctctacttcttgcgaagtttaataagtctcaaacattaaggcgaaccaaaaccgatgccatcgattccatttcgattgcccgttggttaatgactgtagattacaaaccctatcctgtaggattttaccatatttattccttaaagtcattaactcgtctcagagattctcttgtaaaacagagaagtttttatattgtcaagttaactaatgttcttgaccacaccttccccgaattcaaaccattctttgcaaaccgtttcagtaaaactgctttatatttacttgaaacttatggctctgccgaaaatatggcacaaatgaatccatcttcctatgagaacctcagaaaaatttccagaggtaagttttctatgcaaaaattcattaaactgaaagaattagctgcaaacactgtcggtgcggataatgaaatcttctctttacaacttcaaagccttttaacactttacaaccaatgtgccaaagaagtagagcgtctagaagaacagattatttctttaatcaccaatattcaacccaaatctatgacgatacccggcatcggtcctttatctgctgctgtaatctattcagaatatggcgatattcaaaaatttcattcgccatctgctatgctttcttttgcgggtttagagccgggctattatcagtccggaacttccgaacacgctggtcgcatggtcaaacatggttcctctaagcttcgctttactcttatgaatctctgcattcctctcattcaatataatatggtattcgctgaattctatgctaaaaaacggagcgaagggaagcctcatagagtagcctgttctcacattatcaaaaaattgattcgaatcatttatcatctcgaaaaagaaaacattgatttcgattcttcaaaactacgctgattgagtggtggcaatcggcaataatacatctgcttttcgaaaatgatttttggaaaggcttattaaggttacccttttttattcccgattttttttttacttttttcaaaataactattgacatttaatagctagtc

SEQ ID NO: 7377 - DNA, 1430 bp, unidentified
  source 1..1430: mol_type = unassigned DNA; note = element_b728bc4
  misc_feature 1..4: note = core
  misc_feature 5..210: note = LE
  misc_feature 211..1416: note = CDS
  misc_feature 1417..1430: note = RE
  misc_feature 1..195: note = bridgeRNA
ttccgtaagactgtgcgtggcccgggagggccgggtgtggctgaggtcgccttgcgctgtggtcgctaactgggaatgtccgcccgtccctccggggcgccctggctgctgattgagatctgcgttctggtcgctgcttacggatgcgctggcggggtgttccacgggccgctgtcagcaaatcttggatcaagggacggagacgcgcgtatggcggcacagcgggacagggcatgggccgggatcgacgtcggcaaaaggcaccactgggtgtgcgcggtggacgccgacggcacgaggctgctgtcggtaaagatcgccaacgacgaggcggagatctgcacgctcgtcgcgaccgtaggcgagctggcgcggcaggtgacctgggcggtggacatcatcggcgcgccgtcggcgctgctgttggctctgctggccgcagccggccagcaggtgcggtatgcctgtgggcgggtggtggcggcgatgagcagtgcctatgccggcgaaggcaagaccgactccaaggacgcctacgtgatcgccgagaccgctcgcatccgccgcgacttgcccatcattgaccgggacaccgacctggtccgcaacctcgcggtgctgaccgggcaccgggccgatctcatcgccgaccgggtgcggatgatcaaccggttgcgggacctgatgaccagcgtcttccccggcctggagcgggaattcgacttttcctgccacaagggcgcgctggtgttgctcaccggctatgccagccccgaccggatccgccggaccggccgaacgagactggccagctggctgcggacccggagagtgcgggactacgccggcgtggccgctcgcgccgtcgccgcggcccaggcgcagtcagtcgtgctccccggccaagacctgtccggaagcattattgccgaactggccggcaacatcctcgccctcgacgcccgtctgaaagagctcgacgcccagatcgaggacgcctttgagcagcatccgcaggccgcgatcatccagtccatgcccggcttcggcccgttcctcggcgcctgcctgctggtcggcgctggtgatctgcgcgccttccccagcgccggccacctcgccgcagccgccgggctcgtgcctgtcccagacgactccggccgccgcaccggcaacctgcaccgcccggatcgttatagccgcccgctgcggcacgtgttctacctctcggcgcagaccagcatgatgcgcgccggacccaaccgcgactactaccggaagaagcgcgtgcacggtgccacccacagccaggccgtcatcgccctagcccgccgtcgcatcgacgttctctgggcgctgctgcgtgacggccgaacctggagcgcagaaccgcccgcacccgctcaagcggcttgacaacaccattgaga

SEQ ID NO: 7378 - DNA, 1577 bp, unidentified
  source 1..1577: mol_type = unassigned DNA; note = element_b72bb39
  misc_feature 1..2: note = core
  misc_feature 3..100: note = LE
  misc_feature 101..1228: note = CDS
  misc_feature 1229..1577: note = RE
  misc_feature 1332..1535: note = bridgeRNA
agacataatgtattaaacctgtcctaccttaatgcacgtgggttaagctataagttgggaaaaaccaatggctcagagccacaattaaggaggacaggttatgtatcagtataccacgaagtatgtagggttggatgtgcacaaagagacgatagcggtagcaatagcacaggaagggcgaggcgagcctgtttattatggcgagatactcaatagtgctggcgcgataaggaagctggtaaagaaagtggcctctaacggagagaaggtatcattctgttatgaggcgggtccgtgcggttatgacgtatatcgtcaattgatcgaccttggtcagaggtgcgatgtggtagctccgtcactgattcctaaaaaatcaggggatcgcgttaagacagatcggcgggatgcaaccacactgactcgtttatatcgagcaggtgagttgacgccggtgtgggtaccggacaaagagcaggaagcgataagggatctcactcgtgcccgagaagatatgaaggccatagaagggcatgccaaacaacggcttggagcatttctgttgcggcatgggaagaaattctctggaaggagcaaatggacacaagcgtattttagatggctggaagggataacgtttgagacgccggcccagcagattgttttgcaggagtatgtggacacggtcaaacacatgaagggacgcgtggaagcgttggaagaggaaatgcgtcaggcaatgcaggggtggtctttggctccggtagtaaccggcctgatggccctcaggggagtagagctcattaccgccatgactacggtagccgaactgggcgatatgagtcgctttgactctggtcgtcagatcatggctcatctgggcttagttcccagtgagcattcaagtggaaatcgccagcaacgagggggaataaccaaaacaggtaacgggcacgccagacgtgtgcttatagaagcttcgtggtgttatcgactgccggcacgcaagagtgctcaactgcagcggcgtgctgagaagaccagcgaaacggtacaggcgatagcatggaaagcgcaaaaacggctctgcaagaggtattggtacttggtcaataaagggaagcgtccggttgaagcatgtaccgcggtggcacgtgaattgagcggctttatctgggcgattgcatgtgaggtaatggggaagaccggtcctggcgttactgtatagggacaaaacaaattgatgacagaacgaaactatcggtgttgtcttacggggctccgaaaaagatgtaacgtttcttcgccccttcagacaacgttatctagcgggaaactgtgggcttcggccagggcagcagtcggttgggagaatcctcgtaccgactatgaggcacccgcattgaggatgaccctcgcggttagacagaggcagctccacgacgaagataagtcatgcggtatccaacccgcgtatatcagagtgatctaccgtcgtttattactgctgctctgctcgaagtccacatttaaaggaggttaaataaaatacccacttgacaggtttaatacatatc

SEQ ID NO: 7379 - DNA, 1235 bp, unidentified
  source 1..1235: mol_type = unassigned DNA; note = element_b733294
  misc_feature 1..2: note = core
  misc_feature 3..242: note = LE
  misc_feature 243..1220: note = CDS
  misc_feature 1221..1235: note = RE
  misc_feature 6..212: note = bridgeRNA
cttgtatctcgactaccgacctttttgaggcgatagtccccgactgatcatcgggggaagggagtgcaagacgcgaccgccctagggcttcgagcctgcgacgtagagagttctgcctccttccacactcatccgccaagtccgaacggtatccagggcctgcccgtggcgtgagctcgcataagcaaggttggaccggatgcagtgatgatcctgtcatcgtttcattccaggagttcaacatggtcgccgttgtgggcatcgacgttgccaaacacaccttcgatatcgccaccctccagcccaacggcaagtaccgcacacgcagcaggctggccaacgatcccagcggctttgcccagttgtgcgagtggctggagaaacacgccggacccgatgcctggaccgtcatggaggcgaccggcatttaccacgaggcattagccacctgcctgttcgagcggggctatcgcgtcagcgtggtcaatccgacgcagaccgccgcctatgccaagactcagctgtcgcggggcaagaccgacaagacggatgccaagctgattgccggcttcggtcaggaccaactggccaaatcgcggctgcgactctggcaacctgaaccgccggcccagaagcgcctgcgtgcgctggtgcgccgtctggcggacctgcgcgagatggaacagatggagcgcaatcgcctggagagcgccgacgcgaatattcaggactcgatccacaccgtgctgcgccacatcgaggaggaaatccgccgcaccctgaaggccatcgaggatcacatcgacaacgatccggacctgcgccaacgcaaggagctgctgaccagcatcaagggcttcggcgaccagacagccgccctgctactgggcgaactgggggatccgctggcgtttcgcagcgccaaggccgtggcggcctttgccgggctgacgccccggccagaccaatcgggggagtatcaagggccgacgcccatctcgcgcatcggctcgggcttcctgcgcagccggctgtacatgccggccatctcggccatgcagcacaaccccgccatcaaggccctggcggagcgcctgaggagccgtggcaagcgcggcaaacagatcgtctgcgcggcgatgcgcaagctgctgcacatcgcctatggagtactcaaatccggccagcccttcgaccccaaactggcgcttgcgcggtagggagcaagacggtat

SEQ ID NO: 7380 - DNA, 1566 bp, unidentified
  source 1..1566: mol_type = unassigned DNA; note = element_b73753b
  misc_feature 1..3: note = core
  misc_feature 4..246: note = LE
  misc_feature 247..1440: note = CDS
  misc_feature 1441..1566: note = RE
  misc_feature 7..266: note = bridgeRNA
attcttaatatataaggcgagggttttaatagccttcgcttttcactatgatgaaggtgattggctaacgtaacttccgagtgggcttccacgcccggcgacaaatgtgttagccagccttcatcgttctacattcaattaagcaagttgggcagccatagtgttctcccgtttaactatagaatatgtttgaactgtgaagagctggaaccaatcaattctaatctcgcaaaggaggtacactaaatgattgctgttgggattgacatctctaaaggtaaaagtatggttgctatcctgaaccatgacggctctgtacgtgcccagccttatgaaatgcatcactccaagccagaactcgacgctttgattaaatatatcaagaccgtcgatgatcaccccgtggtattaatggaggcaactggccactatcattaccctgtgctgaatgctttccttagagccgacattgctccttctctaatcaatccatacctgatgaagaagtatggcgataatgagttgagaaaggcaaaaaccgacaagaaagacgctctgcgtattgcgcactatgcattggaaaagtggtattctctgatcccgtattcccctatggatcaaaaatatgaggacctgagatttctgtcatcacagtataggcaacggatcgccatggttaccaaaagcaagaaccaactaatcaatctgcttgatgaagcaatgcccggaataaccaatatcctggcgttaaaaagcagaacgcccgaaaagtgtatgcttcttcagtttatcaagcgtttccactcatttgattacatcaatgagattggcaaaacccgtttcatgaatagttatgccactttagcccgtaaggtcggtgagcggaacgctgcggcaaaaagcttgtctatttatgaattgtcacgatccagtattaccacgcgaagcaataacgactatatggctgccgctctggatcaatgcgtagatatcctgtccggtgcacaatgtgcggctgatgacatcatacttcagatgcagaatatcgctgaaacgattcccgaatataaagtcctcaggtctatgcacggtgttggagataggcttggccctgtaatactggcggaaatcggagatgttcgccgtttccatagtggcaaggcactcaatgcctacgcaggcaacgatgctcctccttatcaatccggacaatttgagagccgaaatcgtcacatctccaaacgcggcaactcagctctcaggaaagcttgtttcgaggttatgcaggctctcaaactgacaaaacctcaggacgatcctgtttacctttttctgctcaaaaaggaacaggaagggaaaccgtataacgtagctaagatggctgccgttaataagttcctacggatctactacgctcgtgcgatggagttgtataagtaaatccgtctgctttcattataaccattattcaacggtctgcaatagcaggtcttgtttggattacactttttttgttttcaaagatccaatattttatcccaaaaacacttgacaaacattagcaag

SEQ ID NO: 7381 - DNA, 1585 bp, unidentified
  source 1..1585: mol_type = unassigned DNA; note = element_b73e2b6
  misc_feature 1: note = core
  misc_feature 2..251: note = LE
  misc_feature 252..1454: note = CDS
  misc_feature 1455..1585: note = RE
  misc_feature 6..226: note = bridgeRNA
tcgtattatatggtcagccggtcattgaactggttgacctattttttataggtttcatatgcttgaggaagtcgggggaggacgctggcgcccgtgggactcgatcccgtccgcaatactgtccaccccttccttgtagaaacatgtttgaggctggttgggacatgatcccgtataacaagcgaagctatgaaactacaagggatgtgaggggcgcaccgacgaatctatcaaaggagttgtgattacctatgaatcctgtcatcggcctggatgtcgccaaaggggaaagccaggtccaagcttttttaaaaaggaaaaaaccatataaaaaaagctttaaatttgaacaccatctacaaggacttcacgctttttatcagttttatcaggaagtggaacaggtttccggacaacctccggctgtcatctttgaatccaccgggcactatcatgaacctgtgcttcaatttcttgaagatcaagctataacttattatgttatcaatccggtcatttcctatgaggctcgaaaaacaagcctgcgtaaggtgaaaacggacaaaatcgatgccttccatctgggggagttgtattacaaagaagatctggaagtgtttcagaggaaaaacgaacaatacctgaatctgcggcaattaaccagacaacacagcgctttaacggacagctacgttgaaatcaaacttcagtttcaggctgctgtggatcatactttcccggaatatcatagcgtttttagtgatctttgtggcaaattgtccctgaacaccttactgcattatccgacttctgcggctattcaagaagtctctcaacagacgttggctatggagatgcatcaattcggagcgaagcgttcctacgcatggtttctggacaaagcagcccaactgaaagccgcggcggatcgtaatccctttcaacatcctgtttgtcatggtcacgttgtcagtatacaaatgtatatccagatgctttttcaataccaggagcacctatcccaattacaaaaagaaatagatgccctggctaagacctttgaagactatgacttggtccaatcggttcctggtatcggagaaaagattggggcaacaatcatctccgaagtcgggggaatcgatcagtttgaacgcccaaaacaactagctgcctatgcggggctagacccgagtgtttttgagtcaggcaaatataaagcatccatcaaccgcatcacgaaaagagggtcatcaagattgcgtcaagccctttattcagctgtgcaatgcggtctggccaaaaatcggaacaaaaaacttataggtttttatgatcgcaaaagaaacgagggcaagccacacaaggtcgctgtcattgcctgtgccaacaaacttgttcactggatccatgccatgttaaaacgtcaggaagcctttgtagatcaatcataagatgcatttaaattgccaatgctttgaaaccttatcgattcaacggtaaggctatttggtatgcctaattttagtgtaacatgtttttttaaacttttttacctttaattgttggcagctattggctggta

SEQ ID NO: 7382 - DNA, 1375 bp, unidentified
  source 1..1375: mol_type = unassigned DNA; note = element_b742056
  misc_feature 1: note = core
  misc_feature 2..81: note = LE
  misc_feature 82..1110: note = CDS
  misc_feature 1111..1375: note = RE
  misc_feature 1136..1372: note = bridgeRNA
taatgtgatggtcagcctgattcaacagccctgcaggcgtaagctggcagggctgtttttctttcgatacaggagaccatcatggcaaccgtcaccctcatcggcatcgatatcggcaaacaccatttccacctcgtcgcgcacgacaccaagggccatgtgttgctcaagcgccaattcggccgtcacgtgctgatcgactttctcgctcgtcactccgcctgccgcatcgtgatggaagcttgctgtggcgcccattggctggcgcgcaaactggccggcttcggccataccgtgcaattgattgctccgcagtacgtccgtcccttcgttcagggcaataagaacgatttcctcgatgcccaagccatctgtgaagccgcttcccgccccaccatgcgctatgtcgccgccaagtcgccggaacagcaggcgctggcggcgctgcaccggctgcgcgaggcgcgaatcggtgaacgcgtgcagacgggcaaccagatccatgccttactgctggagttcggcatcgcgctgcctcagggggcgcagggtctgcaacaggcgcgtctgctgctgcgggagcgcgaggttgcgctaccgccgattgcctggcgggtactggaggcccagctgtcgcaccatgatcagttgcagcaacaaatcgatgattgggactgccagatcacggtactggcgaaacaggacgacgtggcgcggcggctgatgacggtaccgggcatcggcccgatcacggccagccagctggctgccgatgccggccaggccaagggctatcattgcgcccgcgacttcgcggcttcgttgggcttggtgccgcggcagcattcgactggcggcaaatcgacgttgctgggcatcagcaaacgaggcgataaagcgttgcgccgcttattggtgcaatgcgcgcatgtgatcatgatgagtgccagacgctggcacagtgcgatggcggagtggacggcgaagctgatgttgcgccggcatggcaatgtggtggcgtgtgcggtggcgaacaaactggcacgggtggtgtgggcgatcctggcgcacggtggcgagtaccgcccctatccggagacggggaagtaaaaaccgccgggatgtgacccggcggtaggagcaagcctgcttttgcgacgacagacgctgatgacgacaaacggcctaaggcccgacgacgaacctggaatgaaaaacagtctgtgagactgtgggcgttttaaggtccgtcgggtgcgactcacatcatggaccgggcgagtatgcccaccaagagtccggatagattagagcaagcctaccttgtcagtatcgctcagtattctggggttgcaaaactcgggctgaccataga

SEQ ID NO: 7383 - DNA, 1362 bp, unidentified
  source 1..1362: mol_type = unassigned DNA; note = element_b742889
  misc_feature 1..2: note = core
  misc_feature 3..83: note = LE
  misc_feature 84..1106: note = CDS
  misc_feature 1107..1362: note = RE
  misc_feature 1080..1349: note = bridgeRNA
tgatggggtggatgcccccgcccggcggcatcgcaatgtgccatggtgatgatgcagtcgtcatcgaaggaagggaggcatccatggaagaagttagcatcatcggcgtggacctggcaaagcaggtcattcaggtgcacggggccggggccgattgccgggcactgttccgcaagaagctctcccgtccgcagttcgcgaagttcatggcgtcccacagcccctgcatcgtggcgatggaggcctgcggcacggcccattactggggtcgggagttgtcgcggctcggacacgacgtgcgcctaatcccgccgacttacgtgaagccattcgtgaagcggcacaagaatgacgccgccgatgcagaagcggtcgccgaggcggcccagcgaccgagcatgcggaccgtccccgtgaagagcgcggaacagcaggcacggtcgatgctgttccggacgcggagcctgctggtcggccagcgcacgcagctggtgaatgccttgaggggccatctcgccgagcacgggatggtcgtggggagaggtgtcggcaacgtcgccagactggccgcgatgctcgaggaagccgaggtgccggcgctggtgcaggagatgtctgagctctacgtggcgcaaatcgagcggatcggggcagaggtcgccgcgctcgaccggcggatcgcggcgacagcgaagaccagccaggacatgcgccgcctgcagaccgcgccgggtatcgggccggtctgcgccatggcaatcacgaccttcgcgcccgacatgcgcgcgttccggagcggccgcgactttgccgcctggctcggcctggtcccgcggcaactctcgagcggcggccggcagaagctgggtcgaacgtcgaagatgggtcagcgcgacataaggcgcctgctgatcgcgggcgccatgtcgattgtccactggcgcggacgggatggtggtcggccggggtcctggctgtcgcgcatgctcgcgaagaagccgcgtatgctggtcgccgtcgcgctcgccaacaagatggcgcgcatggtctgggccatgctggtccgcaacgaggattaccgggatccggccggggcggtctgctgaccgcgcctgccggtgcgtcggcgatgtgaggaggacggcgacacgtatgggcaaccgatcggatgatcggaaccgggagaaccagtggcgtccaacgagccttgagcgcgcccttttgatctggacccggtccgcgcatcaccataccggcccgcggcataagatggccgcacctgagaggcctgaaacatgaccgctaccgatcacgcgctcagaccgtcgaagaaatccttgcatcgaagggggcatccaaaca

SEQ ID NO: 7384 - DNA, 1465 bp, unidentified
  source 1..1465: mol_type = unassigned DNA; note = element_b757708
  misc_feature 1: note = core
  misc_feature 2..72: note = LE
  misc_feature 73..1191: note = CDS
  misc_feature 1192..1465: note = RE
  misc_feature 1248..1459: note = bridgeRNA
taatgagatggtccgccgcagcgtcctcgattacgcgacgatgcgggaatgaaacccacccaggagcctctcatgaatgtcattggtatcgatcttggcaagatggttttccatctcgtcaccatggatcaagacggaaagatcacagaccgaaagaagttgtcgcggccacagttgctgaagcacctggcaacagcaccgtgcagcctagtaggaatggaggccagctgcggcgctcaccaccttgggcgtctgttcagagagcagggtcacgaagtacgactgatcccggcgcagttcgtacgcccgttcgtgaagtcgcagaagaacgactatgttgatgccgaggccatcagcgaagctgtgcagcgccctaggatgcgcttcgtcccgattaagaccgaagaccaacttgacctacaggcgattcaccgagtgcgtgatcggctcgtgctccggcgcaccagtttggttaatcagctccgagcttttttcctcgagcgggggatcgcactacgaaccggccggccgcgtctacgccgaatgctaccagctctgttggccgacgctgagcaacacctgagcccgcgcatgtatcgtttactgtgcctggtcgcagaagaatggcgctcggttgaagaagagatcgagcagctcgatcaagaaatcgaaacgatcgcgtcccaagactcggcatgtcagcggttgatcaccgtgcccggcatcggggtgctgatcgctacggccattgtcgccgcgattggaaacggcgcggcattctctcgcggacgggagttcgcggcttggctcggactcattccgaagcagtgttcgacaggcggcaagccgaagcttctcgggatcagcaaaaccggcaacgaatatcttcgaagactgctcattcacgggggtcgttccatccaacatcgagtggcccgggatcgtcatgcgtttggcccatggctcactgagctcgaagcgcgagccaataccaatgtggttgcggtcgcgatggccaacaagctcgcccgcatcgcatgggtggtgttgaaccgtcagcaggaatatcggcggggcttgccggcagcggaacaggctggcttcggccccgagattccgaatgaaccagtctcatccgccggtcaaggctctccgataaactcgctgcgctcggccttgaccggcgcctgagactggctcctgaatcagcgatcaggccgaagcctgcttgcgaatccgaactctccttggttttgcgaagcaagaaaaagatgacagaacggtcaaccggcgcgtccgcagcctgagcaaaaaaccggtctccgcaagaccgtagccgttatgaggccgaacgcgcgcgcatactcatcgtggccagggctttttgcccacaaagtaggccggatacatttacgcagaccctcttcatccaacttgctcttgcaatcctgcggcggaccataca

SEQ ID NO: 7385 - DNA, 1620 bp, unidentified
  source 1..1620: mol_type = unassigned DNA; note = element_b758d0d
  misc_feature 1..2: note = core
  misc_feature 3..336: note = LE
  misc_feature 337..1500: note = CDS
  misc_feature 1501..1620: note = RE
  misc_feature 90..314: note = bridgeRNA
cttgtatgatacagtcagtgactgttcatactcctccttcttgtatatttcgctcacttattgtttgttttaattcaaggaaaggagcgtatgggttgaaccttgaatcttttatgtccttatcttttagagattcagacagtataattgttttgacactgtggactttttattttgatttatagctctgactattaaaaggagtgtattgccacagtcttatcttaaatgtttatagttggataagtctttgaactttcatatcaagcaagtttacgaggataagaccaagtggaccaaaacagttgtcatattttattgaaaggatgtgatcttatgatttacaccggcattgatattgccaaagacaaacacttttgcgccatcgctgattctgatggcgaagtactggaaaagccattcggattcgataataaccgtgcgggctattccttgcttttatccaagctgaaacctttcagcaaggaatctgtccttatcggtatagagtcgaccgcgcactacggcagcaacctcttatgctttcttcatgataacgggtacagaatagcggtcatcaatcccatacagactgcaactctgcgcaagaccggaatcaggaagaccaagacagatgcggtcgattccttgctcattatcaagtccctgatggtcaacaatcataaacccttcgacaagcaggatatcgcttatctgaggctgaagaacctgtgcagattcagaagtaagcagaaaaagtctatcgcaaggctcaaaatccagctggtatctttcgtggatatctcatttcccgagctacagactttctttaagtcaggaatccatggtaaagcctgttatgagttgcttaagaattgcccagccaaagatgatataactgccttacaccttactcgtctaggtaaccttctctcaaaaagctctcatgggcgattcgggaaagaagaagctatagctttgaaaagtcttgctaaatcatctgttggcactagcgacacttccatctcttaccaaatagttacgactatagagcagatagaattgcttgaaaagcagattgcttcgctagacaacctaattatatcacaagtatcggatttagactccgttctcttatccgtcccgggcatgagccatatcatctgtgctatgatattgggagagataggcgatattaaaagattctctgagccctgtaagcttcttgcctttgccgggctagacccgaccgttaaccagtcaggaaagttcaaagccaaaagcacaaagatgtccaaacggggatcttatctcttacgctatgcattggtattcgctgcatggaatgtatgccgcaacaacaatacgttcaatgcgtattacgagcttaagaggtcccagggccatggccattactcggcattaggacatgtggctcataagctggtaagagtgatttttaagatgctgaaagacaatgttgcttttagcttagactaaacactattcacatttcaaggtccatcgggctttttttgtcatgcccttttttttcttacttatatactttctatgaatcatcaatattcgttatttctctgttgacttttcatagttggt

SEQ ID NO: 7386 - DNA, 1497 bp, unidentified
  source 1..1497: mol_type = unassigned DNA; note = element_b75d163
  misc_feature 1..2: note = core
  misc_feature 3..238: note = LE
  misc_feature 239..1477: note = CDS
  misc_feature 1478..1497: note = RE
  misc_feature 6..238: note = bridgeRNA
ctaatggcatttaccgggcctctttggcaggctcggttccggtagcggccggcgggtcagcactctcctcttctgaccctgcaggtcttgcggcagaccgtgcgcccgctggtcgtgaggaggcgaaaccgctgctgggatgacgtgccccgtgtgtttgcggtgagcacttgaccattagatcgccggctgtctcctccacgctgctgaccgtgtccgaatcgaaactggaggcgcgatgttgttcgtgggagatgactgggccgaggaccatcacgacgtcgagatcgtcgatgacaccggccaggtgctggcacggcggcggttacccgaagggctggacggggtcacccggctgcatgccctgatcggcgaacacgcaccagtcgagtgggccgacctggaacccgaccgggccgcggccatggtcaaggtcgggatcgagaccgatcgtggaccgtgggtggcggcgttggccgctgccggttacgaggtgttcgcgatcaatccgatgtcggtggcccggtatcgggagcgtcactccacctcgggtgcgaagtccgatgcggctgatgcgcacctgctcgctgagatcgtccgggtggaccgggcccatcatcgaccgttggccggcgacagcgccggtggtgaggcgatcaagttgaccgcccgggctcatcagagtctggtgtgggaccgcacccggcatgtcttgcgtcttcgttcggcgttgcgtgacttctttcccgctgcgttgaaggcttttcgcgacttggacgcccccgacacgctcgagctactcgccagggcacccggccccgacaaggcggcccggctgaccaaatcgcgaatcgaggccacgctcaagcgggcccgccgccaccacgtggagaccaaggccaccgagctcgcctcgatcctgggcgaagatcagctccgacaaccgcccccgatccagagcgcctacgaggccgtcgtgagcagcgaggtcgccatcatcgccgcgctgaacacccaaattgaccagctgggcacggtggtggccgcgcattttggccagcacccggacgctgagatctacgccagccaacccggcctgggtacgatcctcgccgcccgggtcctgggagagttcggcgacgacccccaccgctacgccgatgccaaagcccggaagaactacgccggcacctcacccatcacccgggcctccggcaccaggaaagtcgtgctcgcccgttacgcacgcaaccggcgactggccgacgcactccaacaatgggccttctccgcgatgcgcggatcaccgggcgccaagacgtactaccagcagctgcgggccaggaacatcggccaccaagccgcgctacgacaactggcgaaccgcctcgttggcatccttcacggctgcctgaaaacccacacccgctacgacgaacacaccgcctgggcccacctcacaacagctgccgcttgacttcaaagaacctgggatgt

SEQ ID NO: 7387 - DNA, 1548 bp, unidentified
  source 1..1548: mol_type = unassigned DNA; note = element_b7605d6
  misc_feature 1..4: note = core
  misc_feature 5..265: note = LE
  misc_feature 266..1453: note = CDS
  misc_feature 1454..1548: note = RE
atcacgtataatgttgaacataaagatttcaagtttaaaattttgatttctttatgttttttgttattataacaaacatcggtaaagacggattatatcaggtacttcgagtacgtttttatgaatgtctgccatataattatttattaattcggttgtagataatggaaactaattttaacattagagttcggatgattaagcgtgtaggaatataggtaattcaatatggtgttaaccgaaatatttatgaaaggagaaattgatgaaacatattttaagttttgatattgctaaaggtaaaagtgtttattgttttattgatgaattgaaaaatacaattattgatgccactttaattgaacataacaaaaatgaatttgataaattatataattcaattaaaaattattctaacctaattgttattatggaatcaacttctatttatcatttacccattgaaaattattttagatctaaagctattgatactattgttattaatcctaaattagttaaacaatttaaagatacattaaataaatctaaaactgataaacttgattgttttaaaattgctagatgttatttaggtactattgataatttttattttaaaaatgatgaatactttatgtataatccactagctcatcaatattggtcattagttgaaggccaaacaagattaaaaaatagatataaacaattaattgaaattgtttttcctgaatttaaccttatttttaatgatttgtatagcgatttagctttgaattttatacatgattttcctcatcctagtttatttgttaatagaagaattgattatctaatgaactatttaaaagagaaaaacggaacaactcaagcttttagatttaaaaacaaagttttaaaaatgaaagaacttgcttctaattcattatgttttgttgcctttgattctttacaagttcaaaatttagttcaaacaatcgaaatgattcaatatcataagtctgagataaataaaattaaaaatcaattaatcaatgaaatgaaaaataaaaaactatttaaaattattaattctattcctggatttggtgaattttcaaccgctttatttttggcagaagttggagatataacaagatttgatgataaatatcaatttatctcttttatcggaatttattcagtaacatcacaatctggtgtttctgcttatcatggtcctatttctaaaactggatgtaaatttggtagaacgattcttttcaatattgtaactactattattcaaataagtgcacacaccaataaatcaaacccaatttatttgttttttagaaaaaaacaatctgaaggaaaacaccattataaatgcataatcgcctgcgaaacgaaactgtgtaaaatcatttataaattatgtacttcagattgtctatacgaaaacaaatagactaatttaccaaaatttttaaaaattgaggaaactcagttctttttgtcgtgattataatatcatatttttaataatttgacaaaacttagata

SEQ ID NO: 7388 - DNA, 1564 bp, unidentified
  source 1..1564: mol_type = unassigned DNA; note = element_b76223c
  misc_feature 1..2: note = core
  misc_feature 3..267: note = LE
  misc_feature 268..1434: note = CDS
  misc_feature 1435..1564: note = RE
  misc_feature 3..243: note = bridgeRNA
cttgtatgatgtttacagaagcaaaacatcataacttcctttctttttaatatcgtggttataatacattcagatactgtggacttttaattttttacctgtagctttgactactcaacaggagtgtattgccgctacctttatctgaattgtttattagctggatgtaccaagtttcatttagagtacttatttcaatcaagtctacgatgataatcgttggtggatatcacggtatcagacctttagaaagggaggtacaacctcatgatttacgttggcattgatattgctaagctcaaccattttgcctcagccatatcttctgatggcgaaattctcatcgagccgttcaaatttacaaatgacgctgatggtttccaacttctcgtttccaaactcaattctcttgagtctgacgacatcatcatcggtcttgaatcgacggcacactatggtgacaacctcgttcgataccttgttgccagttccttccatgtgtgtgtgttgaaccccattaaaacgtcttccatgcgtaagaacaacattcgtaaaaccaagacggacaaggtcgacacttacattattgctaaaactttaatgatgcaggactcctttagatttgtttcctattatgatttggatctgatggatttaaagacacttggtcgttttcgtcaaaagaccattaagcagcggacacggttaaaaattcagctgacttcttatgtcgatcaagtgtttccggaactgcagtatctctttaaatccggactgcatcaaaaatctgtctatgctcttttaaaagaggctccaacaccaaaggacattgcttccatgcatatgactcatcttgctcacctgcttttagtttcctcccatggtcacttcagcaaagaaaaggcaaaagaattaagagttctcgcacagaagtccgtcggtgctaacgacagtgctctatctattcagataacccactccattgcacagattgagttattagatagacaattggatcgggtggaatctgagatggcagatatcatgaaattccatgattctgtcatcatgaccattccaggtatcggatacataaacggtggaatgatcctcggtgaaaccggtgatattcaccgtttctccagcccttgtaaactgcttgcatttgcaggcttagatccttctgtttaccaatcaggtaactttagtgccaagcacaccagaatgtctaaacggggatcaagagtccttcgatatgctcttattaatgcagctcacaatgttgtaaaaaacaatgccaccttcgaggcctattataataccaagatggctgaaggccggacacactataatgccttagggcactgtgccggcaaacttgtcagaatcatctggaagatgctcactgacgaagtagaatttaatctcaattaagaggtctgtgtaccaatatcgatagattttttaaaatgcaccttagggagctttattaaagttacccttttttaccaccggtaataaaaagtatttttttctaatttatacttgacttttcatagctggt

SEQ ID NO: 7389 - DNA, 1382 bp, unidentified
  source 1..1382: mol_type = unassigned DNA; note = element_b76cce5
  misc_feature 1: note = core
  misc_feature 2..87: note = LE
  misc_feature 88..1113: note = CDS
  misc_feature 1114..1382: note = RE
  misc_feature 1143..1374: note = bridgeRNA
taatgggatggtcgcccctacccaaaacggcatctgaagtgccaaagtggcgaatgtacgttcgcactgatgagagaggcgaccaccatgaaggctacgacaatcggcatagatttggcaaaagaggtattccagattcacggggtggacgagcacggtaagcggttgttcaacaagcaactcaagcgttcacaaatagcctccttttttaccaatattccaccctgcttgatcggcatggaggcctgtgcctctgcccacttctgggccaataagctgcaagggctgggacataccgtcaaactgatggcgcctcagttcgtcaagccctatgtcaaaaccaacaagcatgatgctgctgatgcagaagctatctgcgaagccgtcactcgacccaatatgcggtttgtgcctatcaaaagtcctgaacagcaagccgttctggcacttcatcggagccgccaaggattcatcaagcagcggaccgcacaagctaatcaaatcaggggattattagctgaatttggcattgtcatgcctatcgggatccaccaactactgcgacggttacctgagatcctggaggacgcagagaaccagttacccagcctgtttcgtgttcaactgagtttgctacagaaatatattgagtatttgtttgatgtcgtgtcgacgctcgacaaacagatagagcagtaccatcagcaaaacgcgctatgccagcgtattggtaagatcccgggcatcggccccatcaccgccagagcgttgattgcgaccatcgacaacgccaacaatttcgagaatggcagacaacttgctgcctggcttggcttagtgccacgccagcattccagtggaggtaaacaagtgctgcttgggataagcaaacgtggagatacctatttgaggaccttgcttatccatggcgccagggctgtcttacagtccgtcaaacgtaaatatgataccgtatcgggttgggccagtaggctattggagcgccggaataacaacattgcctcggtagcgttggccaacaagaatgcacggatagtgtgggccttattggccaaagatcaggaatactgcgcgccagtgatgaacgcttaatattcggagtcagcaagagagggataacaccaccgattgcccaggcaagcatgaagtgatggcaagacaggtcagaccgtgatggggaaaacccggtttaggcaaggctcttgaaagagcgcgttgttgattgaggcctctatcggcggatcccatcagggacagaggcgttttattacctcagtacagtctggatctatggctgcaattgatgacctgagtaaagccaccacaacatatttcgcttggcaaacgggagcgaccatcta

SEQ ID NO: 7390 - DNA, 1601 bp, unidentified
  source 1..1601: mol_type = unassigned DNA; note = element_b76ec54
  misc_feature 1..5: note = core
  misc_feature 6..470: note = LE
  misc_feature 471..1475: note = CDS
  misc_feature 1476..1601: note = RE
  misc_feature 28..294: note = bridgeRNA
tttttagtaccataaaagtgtaagtgttaaacacatcattagtgctaaaacatttgcacttatttctttataataaagggagtagttggtctggcgtggcctattttggatttatacatccgtcacaaaaaccgtcaaccaccccttattataagcattcgattaagcaggttgaaactcataaatgagctttcgtgtaacgaactaaaatgaattgtaataagtgtggatggtaacaactacaaatattttttgatttggagggatggagtcaatgattagtgttggaattgatatttcaaaaggaaagagtacggtttgtattttaaaaccatatggagagttgatttgttcaccgtttgaaatagaacatacagagcaaggattatctgaattgtcatctatgctttttaagatttaatgaagacgttaaagttgtaattgaggcaacaggaatctatcatcttccggtgtttgattttctgcaagaacgagggatttttgtagctgtaataaacccatttgaaatgaaacagtacagaagtcaaggacttagggcaataaaaacagataagcaggactccattgcaatagcaaattacggaattgattactggtttcgcctcaaaaaatacgaaatgtccgaaggtatttatcaagaacttaaaatattgggcagacagtattcacattatatgagaatgagaatagagagtgtacagtccttgacacatttgttggactatacaatgcctggtataaaaaaattgttgaagggatggcaagattcaactggtaaagacaaattatcagattttgtagagatgtattggcatttcgataatataacaaaactgtcagagatagatttcattaataattatttagcgtgggcaaaagaaaaaggataccatcagaaccataataaagccgtcaagatttattccctggcacaagatggtatccctacattgcctgctgaaatggaatcaactcagattatgattcagcaggcagttggtgtattgaggcaagtcaatactaccttgaagactattttaacacggatgaaagaactcgccaagcagttgccagaatattctgtagtaaggtcaatggggggagttggagatgtattagcaccaaaattaatagcagaaattggtgatattcgtagatttcatagcagcagggctttgattgcatttgcaggaatagatgctccaccataccaatcagggcaatttataggaacgaatcgtaaaataagcaagcgaggttcctcgacgctaagaaaaatcggatatgaagtgatgagggtcttaaagacacacagtgcaccagcagacagctctgtttattggtatattttgaaaaaagaatctgaaggcaaagctaagaaattggcaaaaattgcaggtctcaataaatttctgcggatatactatgcacgagtaaaagaagtatatcaataaaatcaaatctagtattagaagactggctgaatgaatccagtctttttagtcatgtgtgaaaaaagatggtttataaaaaaggaaacctgctagaagtcaaattaactattgacttttcttagcagg

SEQ ID NO: 7391 - DNA, 1351 bp, unidentified
  source 1..1351: mol_type = unassigned DNA; note = element_b76f27e
  misc_feature 1..2: note = core
  misc_feature 3..74: note = LE
  misc_feature 75..1100: note = CDS
  misc_feature 1101..1351: note = RE
  misc_feature 1119..1335: note = bridgeRNA
tgttggggtggacggccccacggcatcgcgtgccagtgtttggttgtcatcacccaaacaaggagccgcccgccatggagcttaagcgcatcgccatcgacacgtccaaacacgtcttcaccctgcacggggttgatccccaggatcgcgtggtcctgcgtcgcgagctgaagcgcgcgcagttggagccgttcttccgtaagctgcttcccaccgaggtggtgctggaagcgtgcggcggctcccaccactggggccgctttctgtccgagctcggtcacacggtgaagttgatcccgccgcaatacgtcaaacccttcgtcaaacgcggcaagaacgaccgcaacgacgcggaggcgatcaacgaggccgcgtctcgtccgacgatgcgcttcgtgccggtgaaaagtgccgtccaacaggccgggatcatgatcctgaagacgcgggatctgctggtgcgccagcgcacgcaactgatcaacgcggtgcgcggccacgccggcgagttcggcgtgatcgcggccacaggcaccgcccgggtcgaggccttgctggaacgcgtggccggcgacgaaaccctgcccgaggcggcacgtgacatgatcgccctgctgggcgaacagatcaaagatctcgacatccgcatcacggcgttggagacgcggatgaagcaggcgcacaaggccaacccggttagtcagttgctggaaaccatccccggcgtcggcccgatcggcgcgttgagcctggcgctgacggtcgatccggcgcagttccgctccgcccgtcacttcgccgcctggctgggattgacgcccagggaacgctcgaccggcggcaaacagcgcatgggcggcatcagccgcgccggtgacgagcggttgcgccatttgctggtcaccggcgccaccgccgtgatccgccatgtgaagccgggcagccgaaacgcctcggcgtggcttttgtctttgctggggcgtcggccgcggaaagtcgcggcggtggctctggccaacaagatggcccgcgtggcgtgggccatgatgacgagcggagaagcttaccgaggcacgccggccgtgcccgtgtcggcctgacccgctcgccggtgccgcggagacaagaggcttgagagcaacgagatgacaatcggtcgaaccgacgaaccaggcaccccgttgattgcaacggcgcatcgatgccgtccctttgtttggggctggttcgcggatcccatctgggccagcggtcacatgccgcgtcaacaggccggacacatgaccgcactcgaaccggtggtcggattttgttgcacatggcctcttgcatccgaggggccgtccacaca

SEQ ID NO: 7392 - DNA, 1387 bp, unidentified
  source 1..1387: mol_type = unassigned DNA; note = element_b76f333
  misc_feature 1..2: note = core
  misc_feature 3..85: note = LE
  misc_feature 86..1114: note = CDS
  misc_feature 1115..1387: note = RE
  misc_feature 1158..1374: note = bridgeRNA
tgatgtggtggacggcgcccgctcccggcatcgaagtgccatagagtgatcgtcgcagacgaatcacatgaggggagccgtccagatgcaaattaccacgatcggtttagatatcgccaagaacgtatttcaggttcacgggatcgacgccaaggagaaggtagttgcgaggaagcaactccggcgcagccaggtgattacgtttttcaaggcattgccgccgtgcctgatcggcatggaagcctgtgccacggcgcattattgggcgcgcgagctgacgaagctcggccacgaggtgcgcctgatgccggcgaaggatgtgaaggcctacgttaagcgcaacaaaaacgatgcggctgacgccgaggcgatctgcgaagcggttcggcgaccgaccatgcgcttcgtgcggatcaaatcggccgaacagcagggtcagttgatgcagcatcgcacgcgcgatgtgctgatacgccagcgcacccagatcatcaacgcgttgcgggcgcatctggccgagctcggggtcgtggcggcgcagggcaacgccggggtcaacgaattgcgcgcgatcgtgacggacgaacaggacacgcggttgccgatcgatgcacgggccagcgtcatcgtgctggctgcgcagcttgaggcgttggagagtgtcatcggagcgatcgaaaagcggatcaagatgcagcatcgctcgagcgaggcgagccagcgggttgaggccatcccgggcatcggggttatcggggcgactgcgatcgtggcgacggtggcagacccgactatcttccggtcgggacgcgatttcgcggcctggatcgggctggtgccgcggcaggattcgaccgggggcaagcagaagctcggaccgatctccaaacagggcgaccgctacttgcggcgcattctcgtcgtcggggcgatcgccgtattgcggcgcgcccaggagaatcccgggaagtatccctggctcacgcaactcctggcgcggcgacccttcaaggtcgtggcggtggcgctcgccaacaagatggcgcgcatggcctgggcactgctggcccatggtggcacctatcgggcgcctgagcttgctgaaactgcctaaaggggctcggcgaggaagagaagaggagatgtaaccgcgttcacgaactgcaggggtgatgaagacattgatgcgaaacggtcgagaccgtcgatcggaaaacccgtttttgggtcatgcgaggaaagaacgcgtgagtctgtttgggaccgatcagcggatcacatcagggccagcggccacacggctgcactcaaaggccgaatacatgaccgcacccgaacgcttcgctgatagtcagattcctcttgcaccgcgggcgccgtccataca

SEQ ID NO: 7393 - DNA, 1427 bp, unidentified
  source 1..1427: mol_type = unassigned DNA; note = element_b770457
  misc_feature 1..3: note = core
  misc_feature 4..119: note = LE
  misc_feature 120..872: note = CDS
  misc_feature 873..1427: note = RE
  misc_feature 1180..1380: note = bridgeRNA
agatgggatattcggcttgtgcccatcgttggagggatgcaggaggtgctgcgcttcgagctgatgatagaacgtggtctgtttggaacagccacaagcatcaggaagggaagcgcagcatgaaacattatgccggattggacgtctcggtgaaagagacgtcgatatgcatcgtggacgaaacgggtgcgatctgccgcgagatgaaagtccccagccaccccgaagacctcgtccaggctttgcgcaatcccgcgtggcggcttgttcggatcgggctcgaagccggcccgttgtcgcaatggctgttcagcggattggcggagacgggcttaccggcgatctgcatagagacccgacatgcgaaagcattcctgaaagctcaggtgaacaagaccgatcgcaacgatgcgcgcggtatcgcgcagatgatgcgtgtgaatctgttccggccagtgcatgtaaaaacgctgacgagccagaagcgtcgcgccctgctaacggcccgcaagctactgcaggaaaaggcgatcgccatcgagaacgatatccatggtctattgcgcaactttgggctcaaggtcggtatcgttggaacgatcgggttcgatgatcgcatccgcgagctttccgatggtatgccggacgtaggcgagatcatgaagcctttgctggcggcacggcaaaagatgcgggagacaatcatggaactccgccgcaagctgctatctatcgtccgtgacgacgagccctgccgacgattgatgacgatccccggtgtcggtcctgttacgtcgctagccttcaccagcaccatcgatgttccggcccgcttcagcaactcccggccgtcggcccggcgttggggttgaccccggtgctcaaccaatcgggggaaagccatcgcgtcggccgcgtgtccctgtgcggtgacgaaatgatgcgggccctgctttacgaagcagcccaggtcatgttgagccgagtgaagaaatggtcctggctgaaagcctgggcgatgaacgtcgcaaagcgtcacggacggcagaaagctatcgtcgcgctcgcacgccggctggcggtgatcatgcatcgcatgtggagcgacggcaccgaattccgctggacaagggaaagcatactggcaaccgtttgatcgactgccgggaaggagatgataaagttccgcctgccggtggagagacgtccttcgcgggacgatggatgaggtaagctcgcttggggtcttgtgccgatcgcagcatcgcgatcaggacgcgcgtcagattgggtcgcctcattctactgctcccatactgggagggccaaagagccgatcccgaagagaagcgagggcccgcgaatgacgtcaatgccggtgcatcggaaagctcaaaagcgcttgacctcaacacgccgaatagaga

SEQ ID NO: 7394 - DNA, 1186 bp, unidentified
  source 1..1186: mol_type = unassigned DNA; note = element_b7771ec
  misc_feature 1..2: note = core
  misc_feature 3..208: note = LE
  misc_feature 209..1171: note = CDS
  misc_feature 1172..1186: note = RE
  misc_feature 6..213: note = bridgeRNA
cttgtatgctcaccccagacccgtgcggtaaagtctaaacgccgttgaggcgggcagaccggcccgtgcagtttggtagccgctggggcgtcagagcccgtgactgagtacagaacgcacggccaccgtgctggtcttcctgaagcccgaacggttacgcgcgccgggttgtccgagcgcgcatgcacaagcaagggatccgaagaccatgtctgcttcctcagtggtggtgggcatcgacgtggccaaggcgcacctcgatgtctcggtgctgggcgccaagctcgacgcccaacggttcgacaaccaggccgagggccgctcggcgttgacggcggccttgaagccgctggacgtggcgctggtggtcatggaggccaccggcggctacgagaccgagctggcctgtgcgctgcaagccgccggcttggccgtcgcggtggtcaacccgcaccaggcgcgcgactttgccaagtcgatggggcgtctggccaagaccgacgcggtggatgcgcgcatgctggcggagttcgctgcggtactgctgcggcgtgaggatcttgcgcgcttcctgcgtccgctggccgacccacagcagcagtggctggccgcgctggtcacgcgccgacgccagttgctgaccatgctgcacagcgagcggcagcgcctgcagatcacgcccaagggcctgcatccgagcatcgaggccatcgtaacggccatcaaggcgcagctggacgacatcgagggccagatggtcggtcacgtgcgcgagcacttcagcgaactcgaccggctgctgcaatcggccagcggtatcggcccggtgaccagcgccacgatgatcgcccagttgcccgagttgggacgcctgaaccgccgcgagatcgccgccctggtcggtgtcgcccccatggccaacgattccggatcgagtcggggccgacgacgcatccagggcgggcgattcgacgtgcgccgcgtgctctacatggccgcactcaccgccagtcgccgcaacccggtcatcaaacccttctacgagcgactgatcgccgctggcaagctgcccaaggttgctttggtcgcctgcatgcgcaagctactgaccacgctcaacgctatggttcgcaccaaacagccttgggacaacttgcttcacggcgcttgactgcgaagacggtta

SEQ ID NO: 7395 - DNA, 1167 bp, unidentified
  source 1..1167: mol_type = unassigned DNA; note = element_b77d1bf
  misc_feature 1..2: note = core
  misc_feature 3..179: note = LE
  misc_feature 180..1148: note = CDS
  misc_feature 1149..1167: note = RE
  misc_feature 33..200: note = bridgeRNA
cttgtatctcaaaagtggattactatgagctggcttggatttgacaaggtctgtgtagtccgattcctcccggggttatttaagcccgtagcatagcgaccgacgcacagactgagtcgttcatctgaagcccgaacagttgtctgaacttcaaatcgtatttgcaaggaggggtatagatgagcgtgtcaaatcagtgttgcgccggtattgatgtttcgaaaggtactctggatatggcaatcagcagcactgcctgtcagttaactgtgccaaatgaagcagacggatttaaaataatactcaaagagttaaaacagaatggcatgcagctgatcctgatggaagccactggtggtcttgagtccaatgttgcatgctttcttcagtcagaaggctttgatgtggtcgtcattaatccccgacaggcacgagattttgcccgtgcaatgggttatctggctaagacagacagaatcgatgccagggttttacttcagatggctgaggttattaacttgcatccggaacgagaaaaatatattcgcccgatcccggacgagcggaggaagcttctggcagccatggtggtgagacgtagacagttaacaatcatgcttacatcagagcggaaccgattacatccttctcattcgcagaatcatgaaagtatcagatttatcatttcagtattaaaaagtgaattaacccgcattaatggcgaaatggccggctatatctcagaaaatttcagcgagttatctgcgctgctgagtgcagtgaagggtgttggggcagcgaccgtcgccgtgctactggcggaagttcctgagcttggttcgctgacacgacgtgaaataagtgcgctcattggcgtcgcgcctatcaacagggattccggcacaatgcgtggccgcagaacagtatttggtgggcgggcctcagtacgaacagctctctacatggctgccctggttgcgacaagacacaaccctgttattagggatttttacactcgactggttgctgtcggaaaacctaaaaaagtagcattaaccgcctgcatcagaaaactgctgactattctgaatgcgatgctgaaaaagaatgaagcatgggatcccttatatcacagtcatgcttcataaatgggtctcaagacagttg

SEQ ID NO: 7396 - DNA, 1342 bp, unidentified
  source 1..1342: mol_type = unassigned DNA; note = element_b77f117
  misc_feature 1..2: note = core
  misc_feature 3..65: note = LE
  misc_feature 66..1094: note = CDS
  misc_feature 1095..1342: note = RE
  misc_feature 1109..1330: note = bridgeRNA
tgatgctgtggacggctctccaccaacccgccagcctgtagaggttggcaatatggaggagagccgtggaaacagcggtaacaatcggattggacttggggaagtcggtttttcaggtgcactgcgttgatgctggagggacggttgtcgtccagcggcggctgacgcggagcaagctgctggggttctttgcgaagcaggaaccctgtctggtcgggatggaagcctgcgcggcggcccaccattggggaagagaactcagcaagctgggacatagggtgcggttgatgccgccccggtatgtaaagccgtacgtcaaacgtcagaagaacgatgcggcggatgctgaggcgatctgtgaggcggtgacccggcctaccatgcgctttgtcgagatcaagacctgcgagcagcagggaacgctggtcctgcaccgtgtgcggctgatgctgatgcgccagcgcgttcaactgtcgaacgcgatccggggccacatggcagagtacggcctagtggccccggtaggccgcaatggccttcagcgattgatcgccatcctgggcaacccggatgatgagcgtgtgccggccgtggcccgtgcctcactggcgccgctggtctctcagttcgggctggtgaatgaccaggtgctggagaacgaccggcgggtcagagcaagcgcccggtccacggaactgggccgccgcctgatggaggtacccggcgtcggccccgtgctggccagcgccatggtcgctacggtgccggaccccacagccttcaagtctggcagaaacctggctgcctggatcgggcttgtcccgcgacagaactccagcggcggcaaggagaagctgggcggcatcaccaagcagggtgaccgctatctgcggcaactgctggtggctggggctctggcggtcatccgttacgctcagaggcatggaaccaagcggccctggctggtgcatctgctcgcccgccgcacgcccaagattgcggcggtcgcgctggccaacaagatggcaaggatgatctgggccatgatgatgaccggagaacgatatagagaacctacggtggctgcggcctaggcagcagcacccggcagagtttgggaagggcaatcgcgatgtaatgcaccatcggtcgacaccgagaacgggaaaacccatttgcgccaaggcgcctagagcgcgtgcttttgatcgggacccgtcttagcggaaggcattatggccagcggcctctgtgtgccgcatcaacaggccgcacacatggccgcaccgaccgaaggacagaacatcaagaaagctcttgccaacgaggagccgtccacaca

SEQ ID NO: 7397 - DNA, 1383 bp, unidentified
  source 1..1383: mol_type = unassigned DNA; note = element_b786b30
  misc_feature 1..2: note = core
  misc_feature 3..92: note = LE
  misc_feature 93..1109: note = CDS
  misc_feature 1110..1383: note = RE
  misc_feature 1149..1381: note = bridgeRNA
cgatgagatggtctcctcccccctttaatcggcgtcacaatgcgccatgatggagatgttatcaaccatcaaaacaaggtgaggagaagaccatggctaagattacgacgattggactggatttggcaaaaaatgtatttcacatggtgtgctgcgacaggcatggcaagattatcaagaggaagatgctgcgacgttcggggctgttgacctggttcgccaacctgccagcctgtctgatcgggatggagtcttgtgccagtgcccaccattgggcacgtgccctgcaggcccagggtcatcgagtgaagctgattccggcgcagcacgttaagccctttgtgcggggcaacaagaacgactacaacgatgcgctggccatcgcggaggcggtgacacgacctgagatgcgctttgtatcaataaagacaccacaacagcaggatattcaggccttgcaccggttgcgggaacggcgtttgcgggaccgcacggccttgtgtaatcaattgcgtggattaatcggtgagtacggaattgttttctccagaggcgtcaatgtactgcgcaagcgtattccagagatcctggaagatagcgagaacgggctgagtgatctattccgcagcctgctatcccagggttatcagcagttgacggagcttgacgcccacatcgatgcctatactgaggcgctcgatgcccatagcaagcgtgatgatgcctgtgtgcggttgcaaaagatacccgggtatgggccgattatatcgagcgcgttttatagtgctgtgggtaacggtgaggcctaccggcgtggccgggatgtatcggcatcactggggctggtgccaagacaacacagcagtggcgacaaacaggtcttgctgggtatcagcaagcgtggcgaccggtatttgcgcagcctgttgattcacggcgcccggtcagtggtgatccaggcagccaacaaggaggatgcgctgagtcgctggatcaacaagacccgggcggcccggggttttaacaaggccgttgtggcactggccaacaagctggcgaggattggctgggcggtgctggccaacaacacggtctatcaggccagataaccatttgctgaagcaaccgagtacgatttaacagaggaacctgccaacgattgcaaagattttgcagcccaagatgacaccacaggtcagaccggcgtattgaaaacctgctaaattcgaaggccattgaggccgtagggccgattaggacgatacgcacgcatttcatcgaggccaggggcataaccccccatcaataggccggatatacgaaagcaaccctgtccctgttattaatgctgcacagtcttgcaaaacgggaggagaccatata

SEQ ID NO: 7398 - DNA, 1410 bp, unidentified
  source 1..1410: mol_type = unassigned DNA; note = element_b78aa66
  misc_feature 1: note = core
  misc_feature 2..197: note = LE
  misc_feature 198..1130: note = CDS
  misc_feature 1131..1410: note = RE
  misc_feature 1174..1405: note = bridgeRNA
taatggaatggacgcccactttctgtcacggcatcaaagtgccaaagtggtgatggtttctaccactcaacaagaaaggggcatccaaggtgaagattacgacaatcggtattgatttggcaaaggccatatttcaaattcacggggttgataaatgcggcaatgtggcgttgcgcagacaactaaggcgtgctgagatgatgaaatattttgcgaacctggaaccgtgcttgattggcatggaagcctgcggtggcgcccattattgggcgagaaaactcgcaggatgtggacataccgtgaagctgatggcgccgcagttcgtcaaaccctatgtcaaaaccaacaagaacgatgtagccgatgccgaggcgatctgtgaggcggtaagccggccgaacatgcggtttgtcacggtgaagacggtagagcagcaggcgatcctgtcggtgcaccgtgcccggcagggatttgtgaaggcaaggacagcgcaaggcaatcagatccggggattgctgagtgaattcggaatcatcatcccccagggaatacgctcgatcctgaaacaggtgccgacgatcgtggaagatggcgagaacggtctgcccggcacgatgcgggacttgctggcgcggctgagttcgaacctgaaggagatggatcgtcaggcgaaggaactggagaaacaaatcctgatgtggcaccgggacaacgaggcgagccggaagctggaagccattccgggtattgggccgatgacggccagtgcgatggtggcgaccatcggcaacgccagtgaattcaagaacggccggcagctggcggcatggatgggattggtgcctaggcagcattcgagcggagggaagcagaatttgctgggcatcagcaggcgcggtgatacctacttgcgcacgctgatgatccacggcgcacgggcggttatccggttcgcggaaaataaggcgcatgaagagggctggctgcgcaagctgatggcgcggcggaacaagaacgtggcggcagtcgccctggcgaataagaacgcgcgcatcgtctgggccttactcgcgcacgagcgtacgttccggcccgattactcgccagccactgcgggtgctgcagtgtaagtcagggcgatcaactaaaaccgagtacaacgcgttacgtaaggagatccaccgattgcacaggcgatcaagacatgatggcgagacaggtcagaccgtgagcggtgtaacctgagatggcacagcactttgagtgcgcggcagtgataaggtgccgctcagcggattccatcagggacagaagcgaagcgcttcacacaaagtccggatgtatgactgcaatctttacctgctcaacatcatcattcgagagcttggcaaacaagtgggcgtccatgta

SEQ ID NO: 7399 - DNA, 1459 bp, unidentified
  source 1..1459: mol_type = unassigned DNA; note = element_b78b044
  misc_feature 1: note = core
  misc_feature 2..452: note = LE
  misc_feature 453..1445: note = CDS
  misc_feature 1446..1459: note = RE
  misc_feature 15..237: note = bridgeRNA
ctgattgagacttggtgcaggcgttgcgccttggtcgtagcgttcagaggtccgatgggctggctctctaaccgcctgccggccgtttacggtctggctttcgaacgacgtgccagcctgtcgggtctcgccgtggcgtggctcaaaagaggcgcgaacgcgggccgatccgcaatcaggcatgcccgccacggtccttccccgatgatgacgaaggagcggttgatggcggcagtgatgataggtgttgacccgcataagggctcccataccgcggtggcgatcggcgcggccgaggagccgctgggcgagctgcgggtgcggtcgtcggcggcccaggccgagcggctcgtgtcctgggcagcggcctggccggagcggacctgggagtcgagggcgccagcgggctcggctacctcctggcccagcagctggtggccgcaggtgagctcgtgctcgacgtgcagcccaagctgggcgcccgggtgcggctgctggcgaccggcgcgacgaacaagaacgaccccaacgacgcccggtcggtcgctattgcggcgctgcggtcggccaccccgcggagggtgacagcggagaaccacgcagcggtgctgaagttgtggtccaagcgccaccgtgacctcggccgggccaggacccaggtcgcctgccggctccacgccgtgctctgcgagctggtcccgggcggcatctccaagcagatcaccgcagctcaggccaccatcttccttgagcagatcgagccgccagaggccgttgccctggcccgctgcgagctcgccaccgagttcctggaagacctgcgccgcattgatgcccagctgcgcgacaccaagaagagactgacagtggcggtccgggcatcgggcaccaccatcaccgaggtcttcggcgtcggcccggtcatcgccgcaaccatgatcggctacgtcgccgacgcgtcccgcttccccaccagggatcgcttcgccgcctacaacggcaccgcccccatcgaagtatcgtcggggaaccggaaaatccaccggctgtcccggcgcgggaaccggcgcctcaaccacgccatccacatggccgcggtcacccagatccgccagccccatagcgacggccgcgcctattacgaccgaaaaatagccgagggcaagacgcgcaaagaggcgctccgctgcctcaagcggcgcgtcagcgacgccatctacgcccacctgcaggccgacgcccgccgggccgcggcagcggtgaggacggcaggcccgggagggcaaccggggagcgactctgtcgccagcgcggccggctcacaccccgaaaaccggctcttcggccaagccactcccggacccgacaccaccctacgacccctgagcggacgcacacctgcccgtacgccagcagccctgaagaaaacccgaaaaggcccttgacaacaaagaggctt

SEQ ID NO: 7400 - DNA, 1201 bp, unidentified
  source 1..1201: mol_type = unassigned DNA; note = element_b78c093
  misc_feature 1: note = core
  misc_feature 2..210: note = LE
  misc_feature 211..1077: note = CDS
  misc_feature 1078..1201: note = RE
  misc_feature 36..201: note = bridgeRNA
tcttaagtttgattcttattaaatttataatctaaatcagaaagaacaaagagaggattaaggttatgatatacggtgaagcgttagacttcgacaacattgataatccctctctttatctacctaaatttcgttcagttctgtgagacctagatctcgattttaagttgttgaaagtaaagtaaactattctttccaaatacagttattatgaataaagatataaaaatttatggtattgacattagtaaggatgtctttgatgtgtactaccaaactaccggtcaccttcaattaaagaatgatgaaaaagggtttaaaggtttattgaaattattgccaaaagatgccttggtagttatggaagctacaggatattatcattacaggttagcacagtttttatataacaacgatgtagcagtatctgtagtcaatcccttgtcggttaaacgttttatacagatgaaactgggcaaggtaaaaacagacaagagtgatgcaaaagctatttgtgcctatggcacgatgaacgaattgccgatgtatagtgctttgacagatgtccaaactgaatgcttgcaactctttagattgttggacaactatttaaagaaacgtacacagaccaagaacaagcttcatggagaaatggcattgggagttccatcaaagtatgtttacaagtcattgcaacgagatttaaaacatttggataaagaggtgaaaggcatagaatcaaggttattggaacttgtgaaacaagatcagcaacagcaattgaccttgttaaagagcattcctggaatgggcgtaaaaaccgctttgtttttaatcgttgtaactgatggttttaagaagtttgaaaacgcatcacaactttgcagctatgtagggataaccccaacaattagagagtctggaagtagtgtaagaggtagaagcaggataagtaaagtaggaaacaaaaagttaagaaatcttttgtttttatgtgccttctcggcctgtaaacataacaaggcttgtagagagacttatgaacgaatgttgccaaagggaagagcaaaaaattagctttaatagcagtgtcaaacaagttacttaaacaagcttttgctattgcaaaatctggattaccatacgatgaaaactttgtttcaaaattagcttagaattgcttgctttttaattcagttct

SEQ ID NO: 7401 - DNA, 1587 bp, unidentified
  source 1..1587: mol_type = unassigned DNA; note = element_b78f45e
  misc_feature 1..2: note = core
  misc_feature 3..287: note = LE
  misc_feature 288..1457: note = CDS
  misc_feature 1458..1587: note = RE
  misc_feature 46..265: note = bridgeRNA
cacgtataatccaattaacctctttaatagagggggttggattatttctcctttctcccaaattatttggggattatctattactccgttattataatgataaagcactgtggatttgtttctattttgctacagctttgactgttttgaggtgactcagaccacagcttttcgtcttcactggtaattggttagttaacgctttgacgtttgtatttacgtgattacatggccggaaaccttgtggaaaacaacagtgctaaatattattaaaggaggtatttctaatgttctatgtcggaatcgacatctctaagttcaaacacgactgtttcattgttactgaagcaggcgaggttgtttgtgattctttttctatcaagaacgattctgatggatttacagaactcttatctgttctagattctcttgatcctaaagagaatgtaagaatagggtttgaatctactggtcattatgctttaaacctgaagttgttcctcgaaaaagcccactacagcttcatggaatttaaccctgttcttctctcaaagtttaacaagtctcagtctttaaggcgtaccaaaacggatgcaattgattccatatccattgcccgctggcttatgacggttgattacaaaccctatccaataggattttatcatacctatgcgcttaagtcattaactcgtcttcgtgactctcttgttaaacagagaagcttttacatggtcaagattacaaatgtccttgatcacgtctttcctgagtttaagccatttttcaataatcggtttagcaagactgctatctaccttttagataattatggttctgccaaaagtattgctaatatgaatactaggtcctatgatgctttacgcagtatttccagaggaaaattctctatgcaaaaatttataaagctaaaagaattggccaagaataccgttggctgcgatcatgaactttttacttgccaattgaatagtctgctatctttgtataaacaattagcaaatgaggtagactctcttgaaagtcaaattgaatctttaatcgttgaaattgatcccaaaactttatctatacctgggattggccctctgtcagcagctgttatatatgctgaatatggtgatttatctaaatttaattcccctgctcagatgctttcttttgctgggcttgaaccaggttattatcaatcagggacgtcggaacatggtggaggtatggttaaaagaggttcttctcatcttcgctacaccttgatgaatctgtgtattccattgattcaatacaacatgacatttgctgagtactaccacaaaaagcgtaatgaaggtaaatcacaccgtgtggcatgttctcatcttgtcaagaaattgattcgagtcatctttactcttgaaaagaatggaattgattttgatccaacaaaacttcgctgattgtgtagtggcgatcagtaacactaaagtctgattgctttttgaaatgatctatcaaaaggcttatttggtatgcccatttttgtttcatcatatttctaaaaaaaatcattgacttttaatagttagt

SEQ ID NO: 7402 - DNA, 1402 bp, unidentified
  source 1..1402: mol_type = unassigned DNA; note = element_b791d6e
  misc_feature 1..2: note = core
  misc_feature 3..84: note = LE
  misc_feature 85..1128: note = CDS
  misc_feature 1129..1402: note = RE
  misc_feature 1149..1390: note = bridgeRNA
tgatgtggtggaacggcccgctccgacagcatcaaagtgctaaacgtggtcgttgttcgaacgccacaaaggagggaccgttccatgaagcatgctagcataatcgggctggatttggccaaaaacgttttccaggttcacggtgcggacgccggaggctcgcccgtgttcaaccggaaactgcgacgcggcgaagtactgcgcttcttcgagaaattgccttcatgcctggtcggaatagaagcctgtggcagcgctcactattgggcccgcgagatcgcagctcttggccatgacgtacggctcattccaccggcttatgtcaaacccttcgtcaagcgcggtaaaacggatgcggcggacgctgaggccatcagcgaggccgtaatccgcaagaccatgcggttcgttccgatcaaaacggctgagcaacaagccgaagcgatgatgctaaagagccgcggccttctcgtgaaacaacaaacgcaagcggttaacgccctgcgttcgcatctggctgagttgggcatcatcaccgccgccggcctggcaaaggtcgcgacgttggtcgcgatcgtgcgggatgagacagatccccgcctgccttctgcagcacgcttcgccctaatggcaattgccgatcagatcgaagccttgatggaccagattgacaggctcgagcgcgccatcgttgcagcggcgaggcgtgacgaggatatgcgtcgcctgaccaccatccccggtgttggcgccatcactgcggcgaccatcaaggcgcttgtaccggatcccaatggcttcaagtcggcccgtcactttgccgcttggctgggactgacgccacgaccgcactcaagcgggggcaaggagcggttggggcgcatctcaaagatgggaaatcccgaacttcgctgtctcctcgttctcggggcaacatcagtgctacggatcgcgcggaaggacgatcgggcgcggccgtggctgaaagcgctgctcgccagacgaccgttcaaggtcgccgcgatcgcgcttgccaacaagatggcgcgcattatttgggcgcttttgaacaagggcgggatttatcagcgcccggaaccgctgaccatgaccgcgagagccatctgacgaacgcggtgacgatcaaaacgatctgaccggcgagggccggcagagggcaaggtgcaataacagacgatgaacctatgggacgaaatcccgggacgagtgaggccgcagcgtcaatgcgcttaaagcgcgtctgattgattagcccctcgtttcgcggacttcatcaaggccagcggtcacgcaccgcgctatataggccggacatatgaccgcaccgttcccatatgtgaagcgactgaaaaagcccttgcaccgcgggccgttccacata

SEQ ID NO: 7403 - DNA, 1384 bp, unidentified
  source 1..1384: mol_type = unassigned DNA; note = element_b7994c6
  misc_feature 1..3: note = core
  misc_feature 4..117: note = LE
  misc_feature 118..1131: note = CDS
  misc_feature 1132..1384: note = RE
  misc_feature 1149..1382: note = bridgeRNA
agatggaatggtcgcctcccgccacagtgatcgtttcagctcctaaccgtactttccgggttcctggaacagatgtgcgacagtgccttgtccgttcttccgttcaggagagattccatggagcccacgacgatcgccatcgacctcgccaagcgcgttttccaaatccactttgtcgatccggacggcacgattcacagcaaggtgctcaagcgtgtccagatgctgccgttcttcgccaaccggcctgcggcccggatcgtcatggaggcttgcggcagcgctcatcattgggcccggcaactgacggcgcttgggcacgaagtacggctcattgctgcccagttcgtgcgcccattcgtcaagtcgaacaagaacgacgctgcggacgcggccgcgatctgggaggcgtctcagcgcccaggcatgcgctttgttgccgtcaaatcggcggaccaacaagcgatgctggcgctgcaccgaatgcgccagcaactggtccggatccgcgtcatgcaggtcaaccagttgcggggattactctatgaattcggcgttgtcttgccacaaggtcgacgcccatcgatccaggccgcgcaagtagcgatcgcaacgctagccgatcaactgccgggaatgctgatcgatagcttgcgggatcaactgtctcggcttcatctgctcgacgaccagatccagcgcatcgagcagcgcatcatcgaatggcgacgcggtgacgaagcctgccgaaggatctcggaaattccgggcgtgggcccgttgacggcaactgcagccgtgtcggtcatcggtgaagcgagaaccttccgatccggacgggaattcgcggcttacctgggccttgtgccgagacagaacggtaccggcggcaaagtaaagctcggcggaatcagcaaacgcggtgacgtttatctacggaccctgctgattcacggcgcacgagctgtgatatcgagttcgaagcatctgccgacgcacatgcgggatctgttggcacgacggccgacgaacgtcgtcgcagtcgccttggcgaacaagatggcacgcacgatctgggcattgctggcttacggccgaacttaccaaccagcggcggcgctaccgagctaacgacgcgataaacggacatcaaactcatccacggttgcactggtgatattgaacgatggcaagacaggttggaccgcgcaagggcaagcctgagacatttctcggacctcgagtccgttagttagattagggcccttgcggcgaaatccatcggggccggcaggcacgtcctgcgatcgagtccggatataagtccgcaaccaccctcctcgccacgatcaaaatcgccttgcaaatgggaggtgaccatata

SEQ ID NO: 7404 - DNA, 1388 bp, unidentified
  source 1..1388: mol_type = unassigned DNA; note = element_b7a3c3e
  misc_feature 1..2: note = core
  misc_feature 3..86: note = LE
  misc_feature 87..1127: note = CDS
  misc_feature 1128..1388: note = RE
  misc_feature 1133..1376: note = bridgeRNA
tgatgtggtggaacggccccgccgcttccggcatctgagtgccacggcgtgtccgttcgacatgctcacacaaacggagccgttccatggagcagattactaccatcggtctggacctggccaagcaggttttccaggttcatgccgccgacgccggtggcgtcccgattttcaaccgcaagctccggcgagctgaagtgctgcagtttttcgaaaagacgccggcctgtctggtcgggatggaggcttgcggcagcgcgcattactgggcgcgcgagatcagtgcgctggggcacgacgtgcggctgatcccgccggtctacgtgaagccgttcgtgaagcgcggcaagaccgacgcggcggatgccgaagcgatcagcgaggcggtgacccgcaagaccatgcgcttcgtgccggtaaaatccgctgtccagcaggcggctgccgttgtgctcaagacccgtgcccttctggtcaaccagcgcacccaggtgatcaacgcgctgcgtgcccacctgtcggagttcggcatcattgccgccgccggcacaacaaaggttgcggggctgatctcgatcgtgcgcgacgagacggatctgcgtcttccgaaggctgcccgtcatgccttgatggaagtcgccagccagatagaggcgttgaaggcgcagatcgagaagctcgagaaggtgatcgtcgcgaccgtcaagcgtgatgatgatgctcggcgactggtcaccatccccggtgttggcgccatcaccgctgcttccgtcagggcgcttgtccccgatcctggcggcttcgagtccggccggcacttcgcggcctggctgggcttgacgccgaaaccgcattccagcggcggcaaggagcggttggggcgcatatcgaagatgggcaatcccgcgttgcgctcgctcctggtggttggtgcgaccgcggtgctgaggcatgcgcggggcaatccaaacgcttccaggtggatcactgctctcctggcgcggcggccttacaaggtcgttgccgtcgcgctggccaacaagatggcccgcatcgtctgggcgctgctcgtcaagggcggcagataccaggagaatggcgcgaggaaccagatggcggccgcttgatcgatacgtccaaatagaccaacgcggaagctgacagaggcaggtgcaaagccagacgattccagtgggacgaaatcccgacgcgagacaggccgttatgttcaatgcgctcacagcgcgatcagttgatcagccactcgcgtctcggacttcatcgaggccagcggtcgatgaccgcgcaagtaggccggacatatgactgcaccgctcccgtttcgccatcgtttgaaaaagcacttgcctcaggggccgttccacata

SEQ ID NO: 7405 - DNA, 1518 bp, unidentified
  source 1..1518: mol_type = unassigned DNA; note = element_b7ace43
  misc_feature 1..2: note = core
  misc_feature 3..577: note = LE
  misc_feature 578..1501: note = CDS
  misc_feature 1502..1518: note = RE
tctaccattgtattttacacaggtgacgagcataccgttgtcaagtagaatatctacttgacgggggtgtggctcacggggtccgcaggcctgtaataaggcactgctcgctctgaattgccgcccccgtcttctgtttcattctagtgtctgttggaatgatgcgcatccgtaaggatggtcgctctgcgcagtagacgagaacaactggatgagctttcatcaacctttaaggaggttacagtgacagaccctgtagattcgtgtcggtattgatgttggttgtaaggcacatcgagtaggtatcgcaaatactaaaggtcagctactagaagagtttgacatctctcacacagatgctggtttccaggagttcttccgccggattgaagaacacaaagagaagttgaatcttcctgtagcggtagctatggaagggttcaacggctatgcccgtccattggatcggctgatccaggaacgcgggtatacattgtacaacgtcaacaacctgaaactagccctgtagaagtacaagtactaaagtcacttcacagggtaaacccggttcaaggaagtgtttcctggtgcagccaagaccgaccccatcgatacgagaaagatccttgagctgtttcacttaaaggatcacctgccattggccaaggatgcgctgcaggaggtggtatcaacgccaccggtcaacgacaagttgaagcgtcttagtcgccgccgcagacaactggtgaatgacaagatacgggttgtcaaccgaatacagtccgatcttcaggccgtttgcccggaactactcgccatcactaacaagctaagcaacctgtgcttcctacggtttctcacctgtcgtgatgagttgactcaattggcacgactacggcgctccaccttactcaaggttcgcggtattgggcagaagtacgcgtggaccattcaacagtggcagcgcaaggcaagcttctcttccgaggctagctatgtcggcccgatgatcatctccgatgcccggcggatcctcgagcttctcagccagattcacattctggatgaagcgttggctgaattagccgatcaatcagagtttgcttgccggatcgcttccataggaggctttggtaagacctcgattgctgagcttgctggtgagattggaacaatagagcggttcaccggtgaagggagtcttgccctctatctggggatgagtcctctttccaaagattcgggacaacatcacggtagcaagtgtccacgtcaggtcaatcaccgggccaagggagcgatgatgaccgctgtagctcgacatatcgaccatgtgtctgaatccaaggcttactacgataagaagcgagcagagggaaagaaacacaaccaagcggtgcgtgctcttggtcgccatcttgtacgggtgatctggtcaatggttaagaacgaaagggactacgaacttcgaaccccaggaggtgacaccaatgtgacttgaaaattcaagtggaatgt

SEQ ID NO: 7406 - DNA, 1375 bp, unidentified
  source 1..1375: mol_type = unassigned DNA; note = element_b7b2cab
  misc_feature 1: note = core
  misc_feature 2..80: note = LE
  misc_feature 81..1097: note = CDS
  misc_feature 1098..1375: note = RE
  misc_feature 1133..1370: note = bridgeRNA
caatgaaatggactcctccctcctacggcgtcaagcgccagactgatggtgtagccacaagtcccggagggggagtcagcatgaacattagtcgcgttggtctggatctggcaaagcaggtatttcaggtgcacggcgtcgatagccacgagcgcgtggtgtgccggcggcagctcaagcgggcgcagatgctggatttctttcgccagctggcaccctgcctggtggcgatggaggcctgcggcagtgcgcactattgggcgcgagagctgcaggggctggggcacgaggtccgcttgattgcaccgcagttcgtcaaaccttacgtcaagggtgacaaacacgatgcccacgatgccgaagcgatctgcgaggcggccagccgtccgagcatgcgctttgtgccggtgaagagtgcgcagcagcaggccgggcagtccgtgcatcgcattcgcagccgtctggtccgggcccgtacggcactgtgcaacgaaattcgcggcttgctcggcgaattcggcctggtcgccagccgacgcgggcgcgcggcgacggtcgaactgctcgagacggtcaccgctgccgagccggtgcccttgccggcgccgatgggcgagttgttgagcggcttgaaagaggagttgcaggcgctggatgcccgcatcgagcgactggagcgagtgatcaagcgcagtgcgcgcgaggatgcgcgcatccagcgcctgctggccgtggaaggcatcggcccgctcaccgccagcgcggtggtggcagcggtcggcgatgcccggcaattccgcacggcgcgtcagttcgcggcctggctgggcctggtgccacggcaacactccacgggcgggcagcagcgcctgggcgggatcaccaagcgtggcgatacctacctgcgcaccctgttcacccatggctcccgctcggtcgtacgctgttgcgccaacaagaccgatgctcgcagtcgctggctgcaaggcctgttgcaacgatgcaatgccaacgccgtcgccgttgccctggccaacaagaatgcccggatcgtctgggccctgctcagtcgggaaaccacctaccaacccgcctgagcgttaccggcaacaccgctgtagaaacgctccaccacgattgcacagtgaatggcattgatgacgaaccggtcgaaccggcctgtatgaaacctgggttatccgcgggctccctgctgccgtgaagcaaagccgttagggcgatcagacatacaggcgcgcatttcatcagggctcgggagctgccacaccgctccatgaagccggatatacggacgcagtcgtacctaggttcgaaatccccgccaaacactggcaaaccgggaggagtccatata

SEQ ID NO: 7407 - DNA, 1884 bp, unidentified
  source 1..1884: mol_type = unassigned DNA; note = element_b7bc76f
  misc_feature 1: note = core
  misc_feature 2..219: note = LE
  misc_feature 220..1305: note = CDS
  misc_feature 1306..1884: note = RE
  misc_feature 14..228: note = bridgeRNA
ctgattgatgattggtaggtcgttgcggtggttccgtagcgtctcgaagatccggtcggtgggctcttagatgtcctgctgcctctcggggttggctttcaatcgaactgccgctgaccggttctttgatccgtggtgtggctcgaaagaggctagatcaatcgaccccaaatcaggagtgcccacctcggttcaccaccaacgaggaggcaatccaaaatgatcatgatcggtatcgatccccacaagtcgacgcacactgctgtcgccattgatgacaaggaggtggtgctcgccgaatacaaagtgcgggcgtcatcgagacagcttgaacggctgcaggaatgggcgagcgacttcgacgatcgtcattgggccgtcgagtctgcgggcgggcttggatacctgctggcccagcagctggtcggcgacggtgaggtcgtgttcgacgtgccgccaatgcttgctgcaagggttcgattgcttggcactggtcgctcacagaagagtgatcccaacgacgctcgctcagtcgcgattgccgcgttgagatcggaaaggctcacgagggtgtcgtcagagaatcacgtccaggtgctgcggatgctggcgaaacgccaccgcgatatgtcacgaacgagggcgaaatcgaagacccgattgcatgcagtcatgctggagctgcgggctggagggctggcctcgaagatgtcggtgaacaaggccgaagtattcctcgagacggtcaccgtgacagatgctgttgtgcgccaccgaatgctcatcgcccaagaactggtggccgagatcgcagagatggatcaacggttgaaggcctcaaacaagcggcttgccgaggccgtgagggcatcgggcagcaccgtgacagacgtggtcgggataggcccgttctgcgcggccaccatcattggatacaccggcgacatcggcaggttcccaacgaaaaaccattatgcgacctacaacgcaaccgctccaatcgaagcatcatcaggcgacaacgcacgccaccggctcaacccgggaggcaatcgttacatcaaccatgccatccacatcgcagcggtcagccagctcagctatgacagcgaaggccgccgttactacgaccgcaaactcgccgaaggaaagaacccgaaagaggcagttcggtgtctcaagcgcagaatctcagacgccgtctaccgtcgcctcaaaactgaccgtgtagcgaccagcagtcacgctgattgcgcgctagctgagtccgctagcgctgggccagcaccgagggtttcatgctgagtcgaatccgttgcccatcagggtgatgatcgagaacccgagcctgcacgaccgccccgactgctggccattcagacgcggtcagcggccgttgctcgtcgatgatggacacgacttcgatctggcccgccagcctctcacccagcgtgatccagacgcccatgggcaagtgcgccaacaccgtctcttcgacgagcgagccgattgcgaatcgttgctttgcctcgacccactcctcatcagacaaccccctgccgacgtgatcacgaatcggttgccaacgctcatcaggaatcggggccatcaacgacaagtattgcactcaccatcaaattctcgctcgcgcgatttgccctgaaccaagaccaaattccagcttggctagatgggcccgggaggacacccaggaacgactctgtctccagcgtggccggctcaacatcctgatacgccgactctttggacaagtcacttcccggacccgcccacaacttagaaccccaaatcgccgcacgccagcgcggtcaacatcgacgcgccctcactccgccgaaacaaagccttgacacaaagaggctt

SEQ ID NO: 7408 - DNA, 1220 bp, unidentified
  source 1..1220: mol_type = unassigned DNA; note = element_b7d07cb
  misc_feature 1..2: note = core
  misc_feature 3..218: note = LE
  misc_feature 219..1205: note = CDS
  misc_feature 1206..1220: note = RE
  misc_feature 12..195: note = bridgeRNA
cttgtatcttgaatcttgggatggttagctaccattccaagagagacaggtgagtttctgcggctccataggtgcagagcctgttctgaagactaaacccctgtctctcacctctgacgccatcgcggacactggacggtagcctagggctggttgaccctgcatgcacaaggtaagtgggcgcagttggcatacttctttattgaggggtatgaaccatgatctatctgggcattgatgtctccaagctgaagctggactgcacgttgctgctggacccagacaacgacaagcgcaagacgaaagttgtggctaatagccgggatggggtgcgagaactgatccggtggtgcgtcaagcacggggtggacgccggccaggtccacgccgttctggaagccacaggcccgtatcacgagcaggccgcgaccactttgcatgacaacggtgtcgcggtatcgatcgccaacccggccaatgtgcgcgatttcagtcgggcgctggccatgcgttccaagacggatgcgctcgacagcgtggtcctggctcgctacggtgtagcgatgcggccagcggcatggcagccgccacccccacatgtgcgcgaactacgtgccttgattacccaactggaggcgctatccaaggaccgcctgcgcacgatcaaccgccaggagaagattgaggttagcgcggtctcggagcttgtggagcgttcgatcagcgacaccttggacttctatgacagggagatcgcccgtctaacgaaggcgatcgaagaccacattgaccgccaccccgacctgaaggaagacaccaggttgttgtcctccattcctggggtaggccccaaggtggctcgaacgatcctcagagtgatccgcacacaccagttcaagtgcgcagaagatctggccgcttatctgggcttggttcctgttcaacgccaatcaggatcgtcgctacgaggacgcagtcgtatgtccaaagcgggcccggctgacgtccgggcgatcgtttacatggctggcatcgttgcctcgaaacacaatccccatgtccgtgcgatgtatcaacgactgttggccgcgggcaagaccaagatgtcggccattggcgcctgcatgcgcaaagtggttcatctgtgctttggcgtgctgaagacgcggcaggtttataggccggactacgcattttctacttgacgaccaagacggtat

SEQ ID NO: 7409 - DNA, 1404 bp, unidentified
  source 1..1404: mol_type = unassigned DNA; note = element_b7d7d91
  misc_feature 1: note = core
  misc_feature 2..87: note = LE
  misc_feature 88..1122: note = CDS
  misc_feature 1123..1404: note = RE
  misc_feature 1167..1402: note = bridgeRNA
taatggaatggtccgtcccgcttcttaaacggcatcacaatgtgccaggatattagttaccacacttttatccaaaggagacggaccatgacgcagactatatcaaacgcagaagtgcataccctagcaattgatttggcgaaaacgagttttcatatacatgcggctgatcgatcaggggtgaagatacattcaaagccggtaaatcgatcgaagcttattcaatacgtatcgaacttacagccttgcacagtagttatggaagcttgtggtggagcaaatcattttgctcggaagttcacagctatggggcatacggtaaagctaatcgctccccagtttgttaagccgtttgtaaagtcgaacaagaatgatgcgtttgatgcccaggcaatatgtgaagcatcgcaacggccggatatgcgttttgtatcgcctaaagatacagcacaacaagatattcagagtattcatcgagcgcgtagcctagttgtcgctcatcgcacggctctgtcgaaccagataagaggtttacttactgaatacggtattgtgcttccgcaaggtatatcgatcttgcgaagaagtttgccgtccattatcgatagcgataacagagagctttcaattttatttagagaactacttcagaatctctacagtgcactgatcacggtagatcagcaggtagagagctttaatcaaaagattgagttattagccagacaggatgaacgatgtgttcgtttgcaaaccatacccggtattggacccatggctgcaactgcattagtggcgaccttaggtgacggaagtgcatttaaagatgggcgtgaggcttcagcgtatctagggttggtaccaagacagaactcaaccggtggcagatcgacgctattaggtatcagtaaacgtggtgatcaatatttacgatcgttgtcgatacatggtggtagagcggtagtcaggacatcgcctaagcataacgactaccgcagtaactggattacagaccttgcacgacgtcgaaatgtgaatgtggcatctgtagcggtggccaataagaatgttagaactgcttggaaaatattgcaggatggcaataactacctagcggcctaaaacagaagttcgactgagctttaaagtactcagtctaaccaattaacgttaatctcgagttgctaagagaaaagtagatagatggcaaataggtaagacctatacttccaacagcttggcgaggtctatggctcaacgaagccgcaagtctgattaagcaggaagtatgcagaatccattggggctaggagaaatagatcttcatcaaaagccggatatatgactgcagctcaccttaaccattgatacttttatcttgcataacgcgggacggaccatata

SEQ ID NO: 7410 - DNA, 1440 bp, unidentified
  source 1..1440: mol_type = unassigned DNA; note = element_b7ec3dc
  misc_feature 1: note = core
  misc_feature 2..232: note = LE
  misc_feature 233..1273: note = CDS
  misc_feature 1274..1440: note = RE
  misc_feature 15..244: note = bridgeRNA
ctgattgatgattggggtggtgctgcgggtgttttgtctcgtagcgtcaggggtctcgacgggtttggctctcgaagtgcctgacgtcgataggcgtctttggaacgaactgtcggcccgtcgggatccgggccatggtgtggctcgaaagaggcgaacgccagaggcaacgttgttgtgatcaggagtgcccaccgtggtcgtcacgtgacctcgataaggaggtttgctgatggtcacaacgattgggattgatccacacaaggcgacccatacggcggttgctattgatgaggctgagatggtggtgggtgagatcaccgtcccggccgaccggcgtcagcttggtcggctgatcgactgggcagggaaggtcaacggtgaccgcagccgagtatgggcggtggaggctgctggtgggctcggctacttgttgtcccagcagctggttgcccacggtgaacacgtcatcgatgtgccggcggtgttggcttcccgggttcgggtgctctcgtcgggaaagtcggacaagaacgaccccaacgacgcccggtcggtggcgatcgccgctttgcgccaacccggtctggcagtcgtacgccgggaggaccacgttcaggtgttgcggatgctggccaaacgccacctcgagctcaccagtttgcggacccaggcggtgtgccggttacacgcaatcctggtgctgttgaagccgggcgggatgaaacgacggctatcagccaaacaggccagccggatgctgcaaggactccgtaccttcgatccggtcggggaacaacgccggctcatggcgaggacccatctggccgacattcggagactggaccgggacatccacgccaacaaagcgacgatcaggcgggcggtggccacctcaggaacgacagtgaccgatatctacggagtcggcccaatcgtggccgcgttcctgatcggctacaccggtgatcccacccggttcgccaccgccgaccactacgccgcctacaacggcaccgcccccatcgaagtgtcatccggtggcaagaagcggtatcggctcagcctgcgaggcaaccggaaactcaaccacgccatccacatggtcgccgtcacccagatccggttcccaaccccaggacgggtctactacgaccgcaaactcaccgaaggcaaaaccaaaaaggaagccctccgttcgttgaaacgacacgtctccgacgccgtctaccgacagctcctcgtcgactaccagcgccacaacaccagatagggcccgggggacacccaggaacgtctcatcgctagcgtggccggcctcgcatcctgatcaccggctcttcagctcagtcaccccgggccacccccaaacctacaccccagccggttcacccggcccatccgacgcgcccaaaacacccccttgacacaaagaggctt

SEQ ID NO: 7411 - DNA, 1405 bp, unidentified
  source 1..1405: mol_type = unassigned DNA; note = element_b7f792e
  misc_feature 1: note = core
  misc_feature 2..303: note = LE
  misc_feature 304..1365: note = CDS
  misc_feature 1366..1405: note = RE
ctttaactttgcagccagaaataagagttctcaaaactcttaaaataaaaaacgttcaatacacgaagaaaagacgagatatgcgagttattccttacctttgttgtagaaaggaaggattgactgccggaggtcaccctaattgcccttgaaagccatgagctcaagccctgtggcaggccctccggatttccagctgcaaatgccaaataggaaggtaggctcggagcctaattaaagtaatagtcacagacagctttccttcagtcaatcgcttcctgtaattaagaacggtgcaaaggtatgaaaaaaatcatcatcggcatcgatatttccaaagaaaagatcgatgcaagcgcaattgacgtgcagaatgcgatgcagggcgtccagaaactgggctacgaaacattcgagaaccgcccgatgggcttccgccgtatgcttgtgtgggcgcgtcacctgataaaaggggtgacgctggatgatgtcctgttctgctgcgagaccacgggcggatacgaccgctgcctgtgcgactacatctatgccaaggatcttgacatctggcgcgagagtgcactgcagatcaagcgcagcatgggcgtgcgaaagggtaaggatgacaagtccgactcgctgatgattgccgagtatgccatgcggcacatggacaaggccgtcatctacgagacaacctgcgacaccgtgcgcgagttgaaggcgatgctgcagtaccgccacaagctggtacaggagaagacggagaagaaggtccgcatgtcgcatctgggtgacacggcggccaaaagcaagtccgtgagcttcatcctgcgagatgcccgcaagagcatcagggcgctcgaaaagagcatcaaggagtgtgaacggcagattctcgaactgatcaagggggacgaggaactggcctggaactacaggcatatcacatctgtcagcggaatgggaatcgtcaacgccacggcgctcatcgcctacagtaacaacttcaaggggattactacggcaaacaggatggcatcctactacggcatcgcagccttcagggacacatcaggaaccagcgtggacaaaaaggcatacgtcaaatgctattccaactcagtgctcaaggcttacctcacacaggcggctgaatggacgatcagggaaaatggtatataccacccctactacctcagattgaaagacaagggaaagccatacggcatcatcatcaacaatgcaaggaacaagctcatacacctcgtcttctcactcattcataacgacatggattatgaacaggatcatgagtacatcagaacgatgggaagagctatgacggagattcaattgaattaatgattattaactaaaaatgtttggatagaatcataggaag

SEQ ID NO: 7412 - DNA, 1367 bp, unidentified
  source 1..1367: mol_type = unassigned DNA; note = element_b7fb078
  misc_feature 1: note = core
  misc_feature 2..88: note = LE
  misc_feature 89..943: note = CDS
  misc_feature 944..1367: note = RE
  misc_feature 1132..1361: note = bridgeRNA
gaatgatatggactccccctgctcccacggcatccatgtgccacattgagggtgtagtcagacttcaatcagaagaggaggagtcctcatgaatgttacaaccattggcatcgatttggcgaaaactgtgatcagtattcatggcactaaccaacacggcgaggtcgtggttcgcaaacggctgaatcgtcccaagctgttggcgttcttcgcccaacttccaccgtgcctgactggcatggaagcctgttccggggcgcactattgggccagggagttgaccaagctcggccacgacgcctggatcattgcaccccgctttgtcgcgcctaatcgcaagagcagtaagaacgacgacaatgatgctgaggccatctgcgaagccgccagtcggcctaacatgcgctttgttcccatcaaaactcaagaccagcaagccgttctgagcctgcatcgcattcgccgtgggctaatcaaagaacgcactgcccagatcaatcagattcgggggctgttggctaagttcggattgatcatgcctctgggtcgctaccacgctcgccgccggattccagaaatcctcgaggatgccgaaaacggcttacccatactggcgcggcgtctacttagcaacatcaaccagcgcattctccaactcgacgaggaaatcctggcttacgaccgagagatcgaagccatggcccggcgcgacgagcaggtcaaacggctgatggccattcctggcattgggccccaaactgcaaccgcgatactggccagcgcacccgatcccagacagttcaaaagtgggcgtcactttgccgcttggctaggattggtgccccgacaatactcaaccgggggcaagccgagactggcagaatcactaaacgcggggacaaatatctgcgaaccctgctcatccatgacacccgagcggtgatcgccaagctcgccgacaagaacgacagactcagtgagagctggtggagcgtcgcgggtacaagagagccgccgtggcattggccgccaagaatgcccgcatcatctgggcacttctgatgaaccaaaccgagtttaaaacgcagcctgttgagggctaaaaccgagtaataacgacaggcggaacacgcctgccagccgagtcctgcaacggcaagcgatgacggaacggtcagaccgagagtggtagagcctgttaagctttgcggctagcaaaagccgactaacgaatgaggccatcactcacacgcatcatcatcctggcccggacagaaacgcccacaaagaggccgaatgtagagctgcagtctcaaaaccgcttcggaatcaaatgacgttgcttgaccgcagggggagtccatgta

SEQ ID NO: 7413 - DNA, 1726 bp, unidentified
  source 1..1726: mol_type = unassigned DNA; note = element_b7fc59a
  misc_feature 1..2: note = core
  misc_feature 3..352: note = LE
  misc_feature 353..1579: note = CDS
  misc_feature 1580..1726: note = RE
  misc_feature 46..319: note = bridgeRNA
ctcgtattctataaataaatctttatggattttgcaactaacaacttgttttctgaccatcgcatgatagtctctaattatcattggctttggctaactggtataggttactctctcctgtagttctaactacttaattagtctgccgcccaggcaatcttctaatgtacgaactcacatgttgtaccgattaatacttactatctagtctgagtaggactagaagcagcttggtaactactaaccaatgagtactgatcctgcgaggctgtatttagagattgtaattagggattatcatacggtggccagattaagaccagtaaatcaataaagaaaggaggccacaccaatgaaactatttatcggtattgacgtaagctccactgatttagaaactgtaatgatctcttcagaagacaatgagattatctttcaaggaaagtttgctaatgatataactggtgctagcgagatcaaggatcaaattttaaaacttgctcaacccgctcgctttgaccaaatcgttattggtatggaatctacttcaatttacagctttcatccggcattcttcttcaaaaatgatgctgagttagcgaaattcaacgtccaagtagtagtcatcaatcctcgtcaaacaaaacgttatcatgacatttttgaggacaataagaacgatcatattgatgcgttctacattgctgactatcttcgtgtaggccgttataccgttggcatcgttcgacaggaaaactattcagctctgcaacgcttaaccagaactcgttatgaactaactcaaagcttagttcgcgctaaacagcactttctgcacaacctttactacaaggctaacaatcttgcgattggaaagcagaaaacttctgtctttggcgcaacgatgatggatctgctcattgaagatatgacgcttgatgaaatcgtaaacacgccaactgaagctttagctgattatttgtctcataagggacgtggtcgctttgccgatccgcaaggattggcaaaggacattcaaaaagcagtccgcagttcctatcgtttaggaaaggttatgaatgattctgttgatacggtcctagccgtttatgcaaaagaaatcaaaaccttccaaaaaatgattaaagaacttgatgatgccattgctcagatagtagacgttattccagaagaacaaatcttacagtcaattccaggtatcggcccagtctatgctgctggaatcatcgctgaaattggtcaaattgaccgttttgaagatgaaaccaagcttgctaaatacgctgggctaacctggaaacaaaatcagtcaggtaaatttgaaagtacgacaactccattattacgaactggtgactcttatttgcgctattacttgattgaagctgccaatcgggtaagacgtgaagacagcgtcttcaaagagtactacagtcgtaaatatcaagaagttcaacgtacaccaaccaaacgagccctcgtccttactgctagaaaactaattagggtgattttctatctactcaagaatcaccaaatctacaaaccaaaggagtgattggtataggtgcataaagttttcgctgcataagatttttaaaacgcctccctttcaaggcttatttaagtgcgcctaatttctggtcaaaacaggtttagaaaagtcatttaagtaataaatttatcttgacttattaccacatga

SEQ ID NO: 7414 - DNA, 1423 bp, unidentified
  source 1..1423: mol_type = unassigned DNA; note = element_b803d9f
  misc_feature 1: note = core
  misc_feature 2..87: note = LE
  misc_feature 88..1131: note = CDS
  misc_feature 1132..1423: note = RE
  misc_feature 1190..1415: note = bridgeRNA
taatggcatggacgcccctgcttttaacggcatcagttgttccaaagtggaagtgtcaagcaaccacttaaatcagcaggagcgtccatgaggaacattacgacggttgggattgatttggcaaagttggtttttcaggtgcacgggattgatgcgcgcggcagggtgacattgcgcaaacaattgaaacggtcgcaagttgtcacgtttttcgctcagctggcgccgtgtctcattggaatggaggcctgcgccggcgcccatttctggtcgcgcaagctggtggaatttgggcacacggtaaagctcatcgcgccgcagttcgtcaagccctacgtaaagactaacaaaaacgatgcggcggatgcggaggcgatctgcgaggcggttgggcggccaaacatgcggtttgtgccgattaagaacaccgaacagcaggccttgctgggattgcatcgagcacgtcaggggtttgtcggcgcacgcaccgctcaagccaatcaggtgcgcggattgctcgctgagtttgggctggtgatgcccgcaggtatccgctgcattgaacgtaagctgcccgaggtcctccaagatgctgacaacgggctatcggatgcaagccgcgcgctgtttgctcggttgctggaacatttccgcgtgctcgatcgccaagtcgaggagctggagcgagaaattggtgcctggcaccgtgaggatagcgccagtcggcgccttgaagcgattccgggaattgggcccatcacggcgagtgcgctggtggcgagtgtcggggatgcgaaagtattccacaacggccgccaattcgccgcgtggctcggactcgtacctcgccagcgctcctcgggcggtaagacgaatctgcagggtatcagcaaacgaggcgacacgtacttacgaacgctgttaattcacggagcgcgctcagtacttttgagtttgaagcgtgatccagctcgggccgatggctggctagcgcacgtggcaaatcggcgtaatcccaatatcgctgcagtggcattggcgaacaaaaatgcgcgcaccgtttgggcgctactggcgcatggccgcgaataccaggccggttacccttcggcaaacgcgatgaccgcataggcaaaaaacgcctttacaaaccacgtcgatagcaaaatcttgacaccactttctcaccaccgattgcacaggcgtttctcaaagtgatggcatcacaggtcagaccaggattgactcaacctaatttcgaacagggacctcaacagtccggcgtagtgatcaggcgtcaatcagcacattccatcagggcccgcgacttcacgtcgcatacagaggccgaatgtatggctgcaatctattcctgtgaaccaaaccgaaaagaagcgcttggcatagagggggcgtccatgta

SEQ ID NO: 7415 - DNA, 1186 bp, unidentified
  source 1..1186: mol_type = unassigned DNA; note = element_b80f42f
  misc_feature 1..2: note = core
  misc_feature 3..217: note = LE
  misc_feature 218..1171: note = CDS
  misc_feature 1172..1186: note = RE
  misc_feature 27..196: note = bridgeRNA
cttgtatggtaaaggttaagagaatcggggagactttggttgtcgggatggagggacatcgacaagcatctgctaagacagacctcactgagaaatcatcccatcgcgtcttccagagtcgatgaagaatctagcggttagaccgccgatttgtgcacaagcttactcggcagacgcaccaccccgactctcttatttttcaacaggtggaggacgtatgacaagcgaaatgttgatcggtatcgatgtagcaaaagatgaactggtgatagattcagagcagggtttgttgacgcttgccaatacggcagaggccatcaatgcctggctgaagacgttaccgaccgggagttatattggcctggaagccaccagcgattatcatcaactcatggcagagcaagcggtattgatgggcatggtcgtctatgtgctgaacccacgggatatgcgccattatgccctgggtttgggcagacggggcaagacggatcgagtggacgcccaaatgatccggcgatttatcaccgctgaacggggtcatttacgtccctatcaacctgcttcggcgatgcagcaccaagtgactttactgcaacggcgccgtgcgacggtcgtcaagcatcgtcaagctctgcaaaaagccttgcgaagcgtgaaggaacttgaagcgccactcattgataccgtggtcgccttggacggattgctcaagcatatcgatcagcaactggatgacttattaactttgcagcctgcactgaaagccgaggcccgacgtcttgagagcataccgggtattggccggcaaacctcaacacagctggctgtcttgtttgatcgggtcccgttaagccgcagcgatgccgtagtagcctttgtcgggctggatccccgagcctgtgactcaggccaaaagcggggccgccgacgcgtatccaaacggggaccgggtgaactgagacggctgttatacaactgcgcccaggcagccgccaaaacggctgtgtggaaaccctattaccaagagttaagagccagagagttctcggcaactcaggcgctagtgattatcgccagaaaattattacgcatcgcattctcgctttggcaacaagccgatgcccgatttgacgctcagaaaattgcttgcctcaacaatgcagcttgacgaaaaccatagaat

SEQ ID NO: 7416 - DNA, 1440 bp, unidentified
  source 1..1440: mol_type = unassigned DNA; note = element_b816a80
  misc_feature 1..2: note = core
  misc_feature 3..303: note = LE
  misc_feature 304..1170: note = CDS
  misc_feature 1171..1440: note = RE
  misc_feature 1205..1426: note = bridgeRNA
gatggggtggatggctcccgcccacggcatctgagtgccaaggtgggttgctgtcaggcaaacccgagcgacggagccacccgcgatggacattacaacgatcggcatcgatctcgccaagcatgtcttccaggttcatgccgtggacgcggcgggtaaggtcatcgttcgcaaagcacttcggcgggcgcaggtgctgccgttcttcaccaagctctcgccctgcctagtcggcatggaggcgtgcggcacatcacatcattgggcggaggtgtccaaggttccgccagcgtagctggtggaatgacaccggaggggcgcgagctggtcgcacttgggcatacggtgaagatgatgccgccggcttacgtcaaagcctacgtcaagcgcggcaagaccgacgccgccgacgccgaagcgatctgcgaggcggtgacccggccgacaatgcggttcgtgccgattaagtcccgcgagcagcaagcggccctctcgatgcaccgagcacgcaatctcctggtcaagcagcgcacccagtcggtcaacatgatgcgcggactgctggccgaattcggcatcaacattcccgaaggcctcgaacgtgcgttgacgatggcgcgccaggtgctcgagggcgaggcgcccgacgtgcccgcggcggcggtcaagatcatctttgcgctctcgcagcaatcgctcgacacgcactcccacgtccgcgagatcgatcgggcgctcgcggctttgcaacgaagcgacgaaatggcacgccgcctggcaacgatccccggcattggcccgatcggcgcgacggcgctggcggcctccgtcaccgaccctggtcagttccgctcgggccgacagtttgcggcctggcttggcttgaccccgttgcagaactcgagcggtggcaaggagcggctcggacggatcagcaaaatgggcgacaaatatctgcgccgcctgctcgtgattggcgccaccgccctggtgcgatacgccaagagcaagccagagactgctcatccccacctgatcaatctgctggccagaaagcccgtgcgggtggcgaccgttgcgatggccaacaagatggcgcggatcatatgggcggtgatgacgcgcggcgaagtttaccagccagaccacgtgccggcactgtcggcataacgggccgataaagattagctgagggatcagcttcaggaggttgcgggcgcgacgagcagtgatggcgaaaccggtcaggccgggaacagggacaacccacggaatgtcgaaggcgtcattgcctgatgagcagaatgggacccggttcgcggaacccctcagggccagcagtccaaagtcgactgcatcaacaggccgaacagaagactgcacccgaccaacacgccagatcagcaaattgcgcttgcatcaagggagccatccacagaa

SEQ ID NO: 7417 - DNA, 1594 bp, unidentified
  source 1..1594: mol_type = unassigned DNA; note = element_b8194be
  misc_feature 1: note = core
  misc_feature 2..71: note = LE
  misc_feature 72..1142: note = CDS
  misc_feature 1143..1594: note = RE
  misc_feature 1348..1585: note = bridgeRNA
taatgggatggtccggccgcgctccccatcttctctgctgaggggggaaacaggagcaaggagccaatcccatgaaccgtctacccaaagcaaagcccgctgttatcgccacgctcggcgtcgacatcggcaagaacaccttccatctgatcggcctggacaagcgtggcgccatcgtgctgcgcgagcggctgtcccgggcccaaatcgaggcccgcttggccaacatggccccctgcctggtcggcatggaggcctgcgtcggcgcccatcacctgggccgccgccttgaggccctcggccacgacgtgcgactgatggcggccaagtacgtgcgcccgttctgccgcaagcagaagaatgacttcaacgatgcgcaggcgattgccgaggccgtgacacgcccgaccgtcagatacgtggcgctgaaaacacccgcgcagctcgatctgcaggccctccaccgtgtccgcgagcggctgatgtcgcaacgcaccggcgtcatcaaccagatccgcgccttcctgctcgagcgcggcatcgccatccgccagggttggcggtcgttgcgtgccgagctgccgcgcgcactcgccatgacggacaagctgacaccgcgcatggtgcatatcgtcgaggacctcgccggcgactggcgccgcctcgatgagcgcattgaagcggtatcggccgagatcgaggagctggcacacgctgacgagggcgccgtgcggctgatgagcgtgcctggaatcggcccgctcatctccagcgccacagtggcgggaattggcaagggcgatgtctttgacaaaggccgcgatttcgctgcctggcttggtctcgtgcccaaacagacctccaccggcggtcggccgatcttgggccgcatatccaaacgtgggaaccgctatctgcggcaattgttcgtgcaagcggcccgcgtcgtgctgctgaggccgcaaagctgggagcgttacggcctcaagcactggatcggggcggcggcgcaacggctccactacaacaagctcgccgtcgcgctcgccaacaagctcgcccgcattgcttggggcgtgctgcactccggccgtagtttccacatccgtaccgagaccagtcatgcgccccagcctgcctgatgttggcgaccgtgctcgacgccgtcgagacatggcctggaagcaccggcgcaagcggcaggcgttgcctgccggccagtctcgactgcgccctgcgcgcggcgcccagagcggcaggcaggccggggcgaaggaacggccgccctgaccgaactaaggaactggatggaaaacaaatgcccaacctgatccgtcactgatgttttcccgccgaggtctgcgagaggtaagagcaaggcatggaggaacggtcttcacggcgcattcgaaacctggtgacccgaattgtccatcgagacatgtccgctaacgagatcgaatgcgcgcgcatatccatggtggcccggagcagatgaaaatgccccacgttcgaggcctgatacattgatgcaagaccgcagcacccccagccgaactgtcatccctcttgcaacgcgcggccggaccataca

SEQ ID NO: 7418 - DNA, 1464 bp, unidentified
  source 1..1464: mol_type = unassigned DNA; note = element_b822688
  misc_feature 1: note = core
  misc_feature 2..505: note = LE
  misc_feature 506..1447: note = CDS
  misc_feature 1448..1464: note = RE
  misc_feature 9..236: note = bridgeRNA
cgttaccttttaggtagcactgttttccggcaggatatgcagtgtaggtaaccagctggttccggcatgatggttgcccccagtcgttgatgatcaggggggtgtagtcaccggaaccagtctggttcgttcggatcgctaatagaagcacgctccaaaattttgtgggtcttcgtaacgtggatgtgaacgcacgaaccaccggtcaccttgtttttattggaacgcacccaagaaggtgatcgatatggaaccccaagtattcgttggtatcgacgtcggaaagtctcagcatcacgccaccgcagtcaatcaggagggcggggtggtgcatgacaaaccgctgccacaatccgagcccaagattcaggaactcctgacagatcttgtcgccaaacacggcgagttgctggtcgtagtagaccagccgaaaactatcggtgcgctggttgtcgctgtagctcagcagatggatgctcaggtggcgtagttgccaggactgacgatgcgtcgagtcgctgatctgcatccgggtcaggcgaagacggatgcccgagatgcttacatcattgccgaaactgcccgcaccatgccacacacgctgcggggtatcaccgtggctgaagaacagatcgcggagttgtcaatgctgtgtggttttgatgatgacctggcagcccagctgactcaagtccgcaatcggctcagagggctgctgacgcagatccatccagcattagagcgcgtgctggggccacggttggcacacccagcagtcgttgatttactcggcaggtatccaactcctgcggggttgaaacgcgccggtcgaggccacgttcgagctcggctcaaaaagcttgcgccgcgcatggcagcacggttgaccgatgagatctttagggcattagccgagcaaacgactatcgtgaccggcactcatgctgctgagcatattattggtcgcttagctgcccaactacagcaactcacgcagcaacgcagtgatgttgaagctgaaattttgttggtggttgatgcgcaccctcttaccgaagtcctgacttccatgcccggtgttggagtcaggactgccgcacgcattctcaccgaagtggtcggtaaagacttcaaatccgcagctcatctagcatcttatgctggcatcgcaccggtcactcggcagtctggcacctcaatccgtggtgagagtccgtcccgacgcggcaacaaagtcctcaaacgcgtcctgttcttgtcagccttcgcctcgatcaaaggcgatcccgtgtcccgtgcctactacgatagaaaacgagccgaaggaaagcgccacaatcaagccatcatcgccctcgctcgacgcagatcagacgtgctcttcgcgatgctcagagacggcaccttctacgaatcccggcctactcaacttgcaacagcagcttgacgaaaactatagaagca

SEQ ID NO: 7419 - DNA, 1373 bp, unidentified
  source 1..1373: mol_type = unassigned DNA; note = element_b82a131
  misc_feature 1..3: note = core
  misc_feature 4..88: note = LE
  misc_feature 89..1111: note = CDS
  misc_feature 1112..1373: note = RE
  misc_feature 1114..1360: note = bridgeRNA
tgatggggtggacggccccaaccaacggcatcgcgatgtgccatgctgggtttgtcatgaaccaagcaacaggaaggaaccgtccactatgaccattaccacactcgggatcgatattgccaagtctgttttccagcttcacggcgtcgatcaggcgggcaccgtcattatcaggaagaagcttcgccggggcgccgtactcgacacgctaaggaagctggagccctgccttgtcggattggaggcgtgtgcgaccgcgcactactgggcgcgcgagatctcagcacttggacacgaagtaaagctgatgccgcccgcttatgtgaagccctatgtcaaacgccagaagaacgatatggcggatgctgaagcgatctgcgaagcggtgacgcgcccgacgatgcggtttgttccggtcaagagtgctgatcgtcaggcggttctggtgcttcaccgcacgcgggatctgctaatgcgtcagcgcaccatgctgctcaacgcggtcagaggccatctcgccgagtttgggatcatcgcgcctcagggaccgagcaaggcattggagctgatcgctcagctgcgggagggcgcacatgaagaccttccggatgtcgctcgcacagcgcttctggggatcggtgttcaactcgatgcgctcgggacgcagatacatgatctggaacgccatcttcttgcctggcatcgacaggatgagatcagccgcaggctggaaaccattcctggtgtcgggatcctcactgcgacggcgctcgcggccagtgtgccggacccgtcagtgttccggtcgggccggcagttcgcggccttcctgggtctcacgccgaggcagaactcatcgggtggcaaggacaagctcggccgtatctcgaagatgggggatgggtacctcaggcgccttctggtgaccggcgccacatctgtcatccgaagggcggatacaaatccgtccgcgacgggcgcatgggtcagagcgcttctggcacgcaagtcaaagcgactgacgaccgttgccatggctaacaaaaccgcaaggatcgcatgggctgtgatggcgcgcggtgaaatctatcgggcaccgataatggcataggaaacatgaattgcgacggcaggacgctgtcgctccagactgtaagggcagaatgtaagtgatgatgatcaatatagggccgttaccgggacactccgaggtgctgtcaggacataaagtccgatagactgaaaggaacccggaagcggacttcatcagggccagcggttacatgccgcgcaaacaggccggacacatgaccgcatccctcagatcagaattatctcaattttacccttgcactaccggggccgtccacaca

SEQ ID NO: 7420 - DNA, 1534 bp, unidentified
  source 1..1534: mol_type = unassigned DNA; note = element_b82dc47
  misc_feature 1..2: note = core
  misc_feature 3..243: note = LE
  misc_feature 244..1419: note = CDS
  misc_feature 1420..1534: note = RE
  misc_feature 3..219: note = bridgeRNA
ctcgtataataaagtagtagtttttattgtccctctccaaggacatatgctacactgtaaatggtgctgtggattggtattttttcctaccggatagacggtttatgaaaggctccaaccacagacctttgcagtattgttaatcagttagataccgcccgacggtttatttagaacgaggttacaagagcaaagtgccctgtggataacagcatcactaataaatctatcggaggtacttaaatgatttgtgttggaattgatgttgcaaaggacaaacacgactgtttcataatgaactcagaaggagaagtcctctacgatgtttttactgttcaaaacagtaaagaaggatttgaagctttgcttcaatcaatcgttacctgtacaggtaacggcgaaaaaataaaggtagggcttgaggcgaccggacattacagctacaatcttctcggttttcttcttgacaaaggtctacccacctatgtcataaaccccttgcataccaacctttttcgtaaaagccaaagccttagaaaaaccaagaccgaccgtgtggatgcaagaatgattgcctatatgctaatgtctgattcgagcctcaagccctacacaaacatagcataccataattctgaattaaagtcactaacaagatacagatttgataaagttaaagaacgagcaaaacttaaatcttctgtttcaagacttgtcaatatcttatttcctgaattagaaaagttattacctactgtgcataccacatcttcttatgctcttttaagtgaactgccaagtgcaaaacatatttccgaagttcatctttctcatctaataaatttgctttatgtggcttctaaaggtagatacaatagagataaagccattcaaattcgcgaaacagcaagaaactccattggcacatatatgccggcaaaatctttagagctgaaacatacgattaaacttatccgagaattagataacgaaattgctgaaattgaatccgccattaaaaagataatggatgagatagattctcctattacctctattcccggaattggtcttagcatggcggcaatgattattgctgaaattggtgatttttctaattttgattcacctgacaaagtattagctttttcaggtctttcgccatctacataccaatctggtaaacttaacaattgctatgcacacatggaaaaacgaggttctcgttatttgcgatacgctctttacaatgcaacaaaatatgtttgcttttggtgccctatatttgccgaatatcttaacaaaaaacgttcagagggcaaacattacaatgttgctatttcccatgctgctaaaaagttagttcgtttgatttttgcattgcaaaaatctggacaaccttatttagctaaattctaaagcctttaatcttttgaaatccgacatctttgacgtctgttttgttatgccttttttgccgtcttaaacttttttacatcaatccttaatttagacttgacttttaatagttagt

SEQ ID NO: 7421 - DNA, 1328 bp, unidentified
  source 1..1328: mol_type = unassigned DNA; note = element_b82ebeb
  misc_feature 1: note = core
  misc_feature 2..253: note = LE
  misc_feature 254..1312: note = CDS
  misc_feature 1313..1328: note = RE
  misc_feature 22..244: note = bridgeRNA
cagtgaagatgggccggtccccgatcatggtgatggtcctgccggttgggtctgaccctgaaccgccctgaccgtggtgtcatcccgggatctgtcggcttgcccggcagggccgcgtgaaggtgcacgcgaccggacgggcttgtgacctgatacgagcttgtgcgaccaagccccatcactggtgtgtccgcccgcccggccggtgcgtgcctgtcctggctcgtggctcgagcggaaaggcggtaccagcatgcccaagcgcaccagggttgtcatcggcggggtggacacccatggccgtacccatcacgccgccgtgatcgaccagcagggacggctgcttggcgaccgggagttcgctgccaccagtcacggctaccggcagctgctgggctggcttggtcggcacggacgcctggatgccgtgggggtcgaaggcaccggcagctacggcgccggcctgacccgctacctgctgggccagcacgtcgctgtggtggaggtcgaccggccagaccggcgcacccgccgccagcgtggcaagtccgacccgatcgacgccgaggccgccgcccgcgccgttctggccggtacggccaccgcgccggccaagcgacgcgacgggatcgtggaggccatccgcgcgcttcgggtggtacggagcggggccatcaaggcccggaccgcggcgatcaaccagctcaaagggctgctcgtcaccgcccccactccactgcgcgaggacctggaccagcgctcggtggccgcgttggtcgccacttgcgctcggctgcgcccggacgaggcggccctggccgatccggtccaggccatcaaggcggcgctgcgtgcggtcgcctggcgtatccaccagctcgacgaggagatcggcctcgccgaccagcgtctagccaagctggtcggccgggccgcacccaggctgctgaagctgcacgcgatcggcgtcgaccatgctgggcagctgctaaccaccgccggcgacaaccccgagcggctgcgcggagaggccgcgttcgcccacctgtgcgggaccgcccccgtcccggccagctccggcaagacgcaccgccatcggctgcaccggggtggtgaccgcgacgccaaccgggcgctgcacctggcggtcgtggtccgcatgcgctggtgcccgcgcactcgcgcctatgccgagcggcgcaccaaggacgggctctccaagccggagatcatgcgctgtgtgaagcgctacctggcccgcgaggtctaccacgccctcgtcgccgacttcgaggccctccacgcgacttgaccatctatacgagcat

SEQ ID NO: 7422 - DNA, 1452 bp, unidentified
  source 1..1452: mol_type = unassigned DNA; note = element_b835dbe
  misc_feature 1: note = core
  misc_feature 2..235: note = LE
  misc_feature 236..1435: note = CDS
  misc_feature 1436..1452: note = RE
  misc_feature 10..238: note = bridgeRNA
ccgttacattcattggtaggtcctcaccagaggatctggtcgctggccctggtatggctgtcttgccctgtcatcgatggtccggggggatgttgccgccaggagtccaggacacgcgttgactgctgatagggacgcggcccagcctcggttgaggtctcttcgtaacgtgggcgccagtatcgggtgtcatgacaccagcgaccagggatacaacaggacaagggagcctgtcatgacacccgaatacgccatcacgctgggactcgacgtcgggaagtccgcccatcacgggtgcgctctcacacccgagggccaacgggtctacgaccacgaactgccccaagacgagaccgcgctgcgcgcggtgatcactgatctgcaggaacacggtgcggtgctcgtcgtcgtggatcagccgaacatgatcggtgcactgccgatcgcggtagcccgcgacgtcggcgcggatgtcgcctacctgcccggcctggcaatgaggaaggccgccgacctgcaccccggtaggtcgaagaccgacgcccgggatgcgttaatcatcgccgacacagcccggacaatgccgcacaccctccgtgctgtcgaccgagattccgacgtgctgtcggcgttgaaggtgctgtccgggttcgacgaggacctggcaagggaatcgaccagagcgatcaaccggctgcggtccctcctggtccagatctacccctccttggagcgcgtcttcgcaggcgtcaccctcactcgagcgatcgtgttggagctgttcatccgctatcacgggcccgccgggctcaaggctgccggcagggctggtgtgaagcggtgggcgcggaaccacagccgcaaagatcccggcccgctcatcgaccaagccttcgcggcactggctgagcagaccgtcacggtgcccggcgccgacgcagtcgagctcgtcatcccaagagtcgccgcacagatcaaggagctcaagcatcagcggaacatcgtcgctggtgaagtcgagaaactggtcgatgacttccctctttcccaggtcttgacgtccatgccgggagtcggagtcaagaccgcagcgcagatcctcctggccgctggcgacatgtccgcgttccccaccccaggccacctggctgcctatgccgggatcgctccggtgaccagccggtcggggacctcgatccggggtgagttccccgcgagggctgggaacaagcggttgaagaacgcgttgttccggtccgcgtgggtcgcgtcgtgtcacgacccgcgatcgcaggcgtactacgagcggaaacgtggtgaggggaagcgtcacaacgctgcggtcatgtgcttagctcgtcgccgcctgaacgtcatgtacgcgatgatcaagactgggactctctatgagccccgcgtccccacggttgcttaacaacaaccatagggaca

SEQ ID NO: 7423 - DNA, 1415 bp, unidentified
  source 1..1415: mol_type = unassigned DNA; note = element_b837c8b
  misc_feature 1: note = core
  misc_feature 2..120: note = LE
  misc_feature 121..1140: note = CDS
  misc_feature 1141..1415: note = RE
  misc_feature 1181..1414: note = bridgeRNA
attgaaatgaacgcgccccacccgtgacctgcacaaggaaacatggagttccatgcgagcaacatcgatgcgccaatgggtggagaatgcgagcgttcccgacaagcggaggatcccaagatgaacagcacggtcgtgggtgtcgatatcgcgaagatggtctttcaggtgcatttcgttgaccaggactctggcgaaatcgtgaataagcagatcaaacggtcgaagtgtctcgagttcttcggaaaccgggctccttgccttattgggatggaagcgtgcggcggtgcacatcactgggcccggcggctcacgaagattggcaatcaggtgaagctgatgcccgccgaattcgttaaggcgttcaacatctgcagcaaaaacgatgctgcagatgcccgagcgatctggctggcagtgcagcagcccagcgagccggtagcgatcaaaaccgaaatgcagcaagctgtgctggcactgcaccggatgcgcgagcagcttgtaaagtttcgcacgatgcaaatcaacgcattgcgcggtctcctgaccgaatatggtgaggtgatgggtaaaggacgaaccgccctggataaggcgatgccggaagtgctttcccgagtcgctgagcgactgccggctgtactcgtcgatacgatgcgcgaacagtggaacgggctgattgcattggacgaacagatagccggaatcgaacggcgaatgcgagagtggaagaaggacgacccagcggtaaaggcaatcagcgagatcccgggcgttggactgctgacggcgacggcagcggtcgcaatgatgggcgatcccaaggctttccggtctggacgcgaattcgccgcttgggcaggtcttgtgccgaggcaaaccggttctggcggcaaggtccacttgcacggtatcagcaagatgggcgacgcgtatctgcgcaaattgctgattcatggcgcgcgcagcgttctgacccatgcgaaggaccctgggccgtggatcgatcagatcagcaaacgacgaccgccgaacgtagtaaccgtcgcgctagccaacaagatggcgcgtacgatctgggcgctgctggcccataacaggccttatcaaaaggactatctgagcgcgaagccggcgtaagccactgcgttcatacccgggaaccaacagttaatgtagtacgagcttcgaaggttgcacaggcgatcgtatgtgatgacaaacaggtaggaccgtggcccgccaagcctgaaagacatgaagagccttgagctcgcggagtgaatgaggcgcgggtcagcggatttcatagtgggccgcagcttagcagctgcaataagcccggatatagagctgcaaccgatcctgtcatgtcagagcctatgagcgtttgttcaaggggcgcgttcatatag

SEQ ID NO: 7424 - DNA, 1721 bp, unidentified
  source 1..1721: mol_type = unassigned DNA; note = element_b8381d7
  misc_feature 1..2: note = core
  misc_feature 3..323: note = LE
  misc_feature 324..1568: note = CDS
  misc_feature 1569..1721: note = RE
ctcatatactaattggtgttgagcagaggacttgttgagagaccaggaatctgcgagactgggaacatcagcgggagagccacggtaaccactcgtagcccgtctcgtacgcgagatggtgacttccaggaaaagacggctccccgcctgccagggtgacaaacgtcgattcggcttgtggtacgcgttgcgttctccgtgagaacccgatgacttccgatccaagatgagttcacgattgctctgcgtgggagggtgtcccgttgaaacagaggaaaacaatgcgcacagggaagtgatggtgagaagaaagcaggtgtgtgatggcagaagtatctccttctgtgctccttgacccgtcgtcgtttgcgtatgtcgtgggcattgatatcggcagcgaggactgctgcttgactgttctgactccccagaaacaggtggtgatcaaaccgactaagctggccaatgccgcctccggatttgcgctgctccaagaacggatggcccgtttaggcgtggaccctggtcagatcgtggtgggcctggaagccacctcgcgctacggggaaaatctctttcactttctccagcagcaaggatatcatctgtgtttgttgcatccacgacaaacacatgagtttgccaagcaacgaggattgcgggcgaagactgaccgattggacgccaccacgatagcacgagccctactcagtggagaggctcgcgtgggttatgtccccgatgagcagattgccagctatcgcgagttggtccgtttgcattcccacctcagcgatgagctcgcgcgggagaagaatgagatccaggccctgctggtcgtgctgtttcccgaattcagccaggtctttgccgacccgtgtcggcccaccgcaacctctgtgctgcgggcatatcccagtgccaaggccattcgcgaagcgggagtggatgccatcgcgtccgtcttgcaagcctcggctcctcaccgttacgggcgggagaccgcaagacagttagtgggggtagctgagcattcggtcagcagtgatctggccctcgatgtccgctcactcagcttgaaaatctggtgcgagcagttgcaacacaccctggcccacctggagcaaattgaagaggagatggagaaacggctctcccgcgatccaggggtcagagggctccaggaggtccccgaatttggcatgcaaacggtggcggtcctgcgcgctgaactgggagacgtggctcgcttccagcgtctcgatcaggtggtggcttatgcaggcatggatgtggaaatcaagcagagtggcaaatggcaaggtcaggccaagctctccaaacgcgggagcgggttagtccgacgcatgctctacatggctgccatgcgctgcacctctctccctggttcggcctttggagcctactatcatcgtctcctcgcacgaggattaggcaaaaaaacggcgctgatggcggtgatgcgcaagatgctgatgattgctgcctatttactcaggaccagggaggactatgatcctacctggggggcggggtcagcaggctaaccgctgcggttagcctgctgaccccgccccccaggtaggttacatccaggcgcttcgggcttgtcctcaagcgcaagggagagcgttgctttaccctttatcagatggattccttcggcttggcccacaaggacttgacagtttctatggctt

SEQ ID NO: 7425 - DNA, 1389 bp, unidentified
  source 1..1389: mol_type = unassigned DNA; note = element_b83cac2
  misc_feature 1..2: note = core
  misc_feature 3..213: note = LE
  misc_feature 214..1185: note = CDS
  misc_feature 1186..1389: note = RE
  misc_feature 41..219: note = bridgeRNA
cttgtattagcgtgatcccttatgctggcgtggttccgagaggaacgacccaacccgggtggccgcccgggctgggccgccgatcgatcggatcgcaacccaccgaagccttgagggctgtgtgtcgtagcaagatcgcggtcggtacttcatcgggacccgaatggttgaacgaactcaaggttcgcattcacaagggagggatcgacgaagatggccaagcataccacgatctgtgccgggatcgataccggcaaacggaagctcgatgtggcgcttgaggggagccgcgagcagttacaggtaaagaacacgccggaaggccatacggtgttgctggcatggctgcgacggcatcgcgtcaaacgtgtcgggatcgaagcgagtggcggttacgagcagccggtcgtcgccgaactgcggcacaagcggtttgtggtcgtggtgttccagccggcccaggtccgggcctatgccagatttcacctgcaacgggccaagaacgacaagatcgacgccgctctcatcgcagcctgcactgcggctgtccgcaagatccacgccgcacccgatgcccggctgcggccgtttgccgagcaactgaccatgatcgatcagatcgccgaggatatcgcgcgcctcaagaatcggatcgagagctgccgcaatgcgcggattaaagcggtctggaaggaggatatcgcccgcctggagaggcgggagaaggtcgagctcaaggctttgattacgtcgatctgcaagcactccgacctggccaagcggctcgatctgatcaacagcatcgacggcattgggctgccgacggccgtcaccgtcctggtgcgcatgcccgagatcggccagatcactcgggaacaagctgccgcgctcgccgggcttgcgccctatgatgatgacagcggcgagcaggttggcacccgacacatcgcgggcggccgtcaaaggctgcgtcatgccttgtacgccgcagcgctggccgcatcgttccgctggaacaggcaactcatctctctttaccagcggctgatcgcggcgggaaagggccacaagcgcgcgctcgtggcctgcgcccggaagatgcttgtcttcgccaacacggtcgttgcccgagctacgccgtggcaggatcgtccgccagggagaattgcttcaacaacaggataacacctcgtttctttgttcgatcctaagcgacgtttcttcgtcccgacctgcctctcaccacgacatcgcgcgcagcggccgtcaaggatggccgccggtctctgccgccccgttctccacagctgccaggccatccttgacggccgcgagcacggtgtcacccctagccaaggtcggacgaatacaatcgccatttaatggttg

SEQ ID NO: 7426 - DNA, 1580 bp, unidentified
  source 1..1580: mol_type = unassigned DNA; note = element_b8405a4
  misc_feature 1..3: note = core
  misc_feature 4..276: note = LE
  misc_feature 277..1473: note = CDS
  misc_feature 1474..1580: note = RE
  misc_feature 8..247: note = bridgeRNA
cttgtatatttagattactcaatcatttcaactattccgttttatgtagtcgttattttataattgagttaggcgctgtggattagtttatcttccaccggattccttcggaatactgtttcagaaaggctctaaccacagctctttgtcacattgttaataagttcgttagcacatggcgtttgattatgatgcttgatttcttacaaggttacataggcaaagagtacgtggatcatagcgcaataaatttaactagtttaggagttgatcaatatgctttatgtgggtatcgacatagcgaaatacaaacatgatattgccgtcattgatagtgagggaacaatttttgttcggcaccttcagatacaaaatactcgggaagggtttacccaactccaagcgactttaaccaatcttcaaaaatcgactggggaagatatacaacttgctttagaagatacaggccattattgctttaatatccttcgttttcttcgtacacaaggataccctacttatagttataatccattactcattaaagaatttgccaaacaccattcgttaagaaaaacaaaaaccgacaagaaagacgccatgacgattgctcgtaaattacgagctgatattgataaacaactttttgaagctcaaacaattatgatcgagttaaaatacgccactcgtcatgcgaaacgagtcaaagaaaattgtattcgtcaaaaagttagttatacccgtttattagatattttattccctgaattagcttcgtttctaagttcgccgacggcgaaacatgacgcatatgtttatgagctattaaaagaatttccttctgcttctaaattggcgactgctcatttaacgaaactaaccaatcttatctctactcattcacgtggccgttttggtaaagaacacgccattcaattaaaacggctagcttatgattccattggaacgatctctccagctttagaatttgaactcctccaaacgattaatgccatcgagtatttttcagctatgcgtaaagcagctgacaatgaaattcaaaaactaatgaaagaaattgattctcccttactttcgatccctggaattggaaataatctgggcagtattttattagctgagattcgggatattcgaaactttaaatctcctagccagttgcttgcctatgccggagctgaaccatcaattagcacatctgggacacatcagacagaaactggtcatatggtcaaacgtggctcctctcagcttcgttgggcgctccatgaagccgcaaggctttgcgctatttggtctccttctatgaggcaatatcttgataaaaaactttccgaagggaaacatttcaatgtcgcacttagccatgtcgtaaaaaaattagttcgtatcatttttagagtattaaaaactggagaaccttttgaagaagataaaatgattgtcaattagctgaatttatttctaacatatttatcagcttatttgtgttgccttcaataattatccgcttcgttatttatttcttttcatttttcacttgacttaatatagttcgt

SEQ ID NO: 7427 - DNA, 1611 bp, unidentified
  source 1..1611: mol_type = unassigned DNA; note = element_b844b80
  misc_feature 1..2: note = core
  misc_feature 3..273: note = LE
  misc_feature 274..1491: note = CDS
  misc_feature 1492..1611: note = RE
  misc_feature 14..293: note = bridgeRNA
ctactacaatatatttatggttaataccccttacagccagtaaggaattatccatcttgttgcttaagctgttagaatgagtttggcaataggtctggcctctccttttcaggacttaacgtccgtaaaacagtcagccaaccagccctcattcgcagcattcgttttacgcaggttgaactttctcgttcgtgtgatatccccagtagattgaataggcaatgagtacatctggtattgaccattgctaattcatttcaaaggagttttatcatgaacgctgttggtattgatgtttccaaaggtaaaagcactgtcaccatccgcaggcccggagatgtggttcttatgccgccctgcgatatcccacacacccagtccgctatcaacgctcttattgagcagatcaaaagccttgacggcgaaaccaaagcctgcatggagcatactggcagatactatgaaccggttgccaactggctctctgacgccggcatctttgtcagcgctgtcaatcccatcctgatcagggatttcggagatgactctttgcgggctccaaagacggataaagcggattctaaaaaaatcgcccgttatgctcttgaccgctgggcaaaactgaagcaatatggaagcatggataaaacacgtagccaactcaaaacaatgaaccggcagttcggtttctatatggatcagaaaacttccatgaaaaacaatcttattgcccttctggatcaatcctatcccggtgccaatgacttctttaacagtcctgcccgcagtgacggcactcagaaatgggtggactttgtctatacctactggcatgtggactgtgtacgcagcaagtctctgcaagcctttacggagcattaccagaagtggtgcaaacgcaacggttataacttcagtgccgcaaaggcggaaaagatctatcagagttcttctgacctgatcgctgtatttccgaaagatgacagcacaaaaacgctgatacggcaggctgttacgatgctgaatactgcttcacagaccgtggagtctctccgccttaaaatggatcagactgccgccacactcccggaatacccggttgttatggcaatgaacggtgtcggtccatcacttggcccacagcttatggctgagatcggagacgttacccgtttcactcacagagaatcgcttaccgctttcgccggtgtcgatcctggtaagaacgattccggcaaacgcaaccagaaaagcgtacgcacttcaaagaagggctctccaagcctgcgcaaaacactgtttcagatcatggacggattgatcaaacgttctccggtagatgatccggtctatgccttcatggataaaaaacgattggaaggcaagccgtattatgtctatatgactgccggagccaataagttcctccgcatttattacggacgggttaaggaataccttgcttctctggaaggaaccaaggaaagctgatttcataccatactttgcttcagaccagcgcattgcggtggtctgattgtgatactcttttttcaacctgtataaaattttcaaagtgcattaatttctgcttgactttttatttgcaga

SEQ ID NO: 7428 - DNA, 1432 bp, unidentified
  source 1..1432: mol_type = unassigned DNA; note = element_b847d36
  misc_feature 1: note = core
  misc_feature 2..129: note = LE
  misc_feature 130..1149: note = CDS
  misc_feature 1150..1432: note = RE
  misc_feature 1197..1432: note = bridgeRNA
atggaatgaacgcccccacctaccggatgtgggacgctgaggaaactgggtcctcacgatccgagggcatcaaagtgccaaaatgggaggatcatggagttcttcactggctaaacggagggggctgaaatgaagcgtacgacggtcggggttgacatcgccaaaaacgtcttccagctttactgggtggatactgacacgggtgaaatcataaacaagcaactgaagcgcgccgtgttcctcgaacatttcgcaaatcgcgaaccctgtctgattggtatggaggcatgtggcggtgcccagcattgggcacggcgattgatcgagatgggccatgacgtcaagctgatgccggcgaagttcgtcaaggctttcttgatcggcaacaagaatgacccggccgatgcgcgtgcgatctggatggctacacagatgccgagcaaggccgtcgcagtgaagaccgaagcacagcaggccgtactagcgctgcataggctgcggcaacagaagatcaaattccgaacgatgcagatgaacagtctgcgggggttactagccgaatacggcgaggtaatggccaagagccgtgccgcgctggacaaggcgattcgtggggtgctggcaaggcttgcggagcgtctgccagcgatgctgatcgactcgttacgcgaggcatggaatgaccttgagcggctcgacaagcaaatcgccgagattgaacggcatttgcaaacgtggatgaaagaagacaaggcgtgcacggcaattgccgcgatccccggcgttggcttgctgacagcgacggccactgtcgcgagcatgggtgacgcgaaagcgttcaagtcagggcgggagtttgccgcctggctcggtctcgtacccaagcagatcggcaccggcgggaagatccagttactgggaattagcaggcgcggcgacacgtacgtgcgcacgctcctgatccacggcgcgcgcagcgtgctcttccacgcgaagcatgccggaacgtgggccgagcaaatacagaaacgacgaccgccgaacgtggtcaccgtagcacttgctaacaagatggcgcgaaccatctgggcagtcctagcgcatgacagaccatacaagcaagatcacgtgagcacacgaccggcttgactcgaaaatagaaaatagtgtctgaggagaacctcgaagattagaggatgacgtcgaaaggttgcgttggcaatcgagtgtgatgacaagacaggtcggaccgggactcgctaaacctgaagaatggttagagcgttcagctcgcgcaacaaattaggagcgagtcagcggatttcatcggggcccgcagcgcgtatgctgcagaaaggccgcatataaagctgcaacctatcctgtcgaatcagagcacaagaaaacctggcgcatcgggggcgttcatata

SEQ ID NO: 7429 - DNA, 1392 bp, unidentified
  source 1..1392: mol_type = unassigned DNA; note = element_b8569c3
  misc_feature 1: note = core
  misc_feature 2..223: note = LE
  misc_feature 224..1381: note = CDS
  misc_feature 1382..1392: note = RE
  misc_feature 14..238: note = bridgeRNA
ctacttgtttcactgacggcacggcatcgggttggccaacctggtgtcgaggtgtccggcgagtagctcgcgatccggctgcccacggctgttctggtgtggctcgcgaatggatagctcctcgtcgggcaccgcgtgcgaggagtggttcgagaggggactgaccgagctcgaagtagcgctgccctcctcgtggttcaaccgtgacgagtgaggagcggtgatggcgaaggtggtgattggcgtcgacccgcacaagcggatcaacgcggtggtggtcgtgaacgccaagggcaaggtgctgggtcgcgagcagttcgagaacacctcgagcgggttccgggagctgcgcacgttcgcgaaccggtggcggccgaggacatgggccgtcgagggctgcaacggtgtcggcaagcacctcgcccagcgcctggtcgccgagggagagcgggtcgtcgacgtgtcgacgcggcgggccgctctggtgcgtgtgttcgccggcgggaacggccgcaagaacgacgacaccgacgcctactcgatcgccctcgtcggcttgcagacaccggatctcccggaggtcgtggccgacgatcggacggccgcgttgcggctcctcgcgaaccggcgccacgagctcgtcgggctgcgcacccaggcggtgtgccgcatccatcgagatctcgtcacgctgttccctggcggtgcgccacgagcactgacggcaaagtccgcgaagcagttgcttgcgacgacccggccgcgcgacgaggtggggcggctgcgccggcggttgatcgccgagcagatcgccgacctcgttgcgatcgacaagcgcctcgctcagctcgaggccgagatcaaggcgttggtcgcggagacaccgaccgggctcatgaggttgttcggtgttggaccggtcacgaccgctcgggtgttgggcgaggtcggcgacgtcgctcgcttccggtcacgccaccacttcgcgagctacaacggcaccgcacccgtcgacgcgagcagcggcggcggcccgccggtctatcggttgaacatcaagggcaaccgcaagctgaaccacgcgatccacatggtcgccatcactcagatccgcaacgactgcgccggccgcgacttctaccgacggaagatccgcgaagggaagacacccaaggaagccgtccgcgcgttgaagcggaggatctccgactcgatctaccgccagctcctcgaggacgccgctcgccagcgggacccgggagggcaggcggggacgactccaaagaccagcgtgaccgacctcaccccgatggccggttcttcggtgaagccacaacccgggtcccaacgcgaacctacgcctctcacggtcaccgcttgacagaggggtgc

SEQ ID NO: 7430 - DNA, 1141 bp, unidentified
  source 1..1141: mol_type = unassigned DNA; note = element_b85c35a
  misc_feature 1..4: note = core
  misc_feature 5..186: note = LE
  misc_feature 187..1128: note = CDS
  misc_feature 1129..1141: note = RE
  misc_feature 20..190: note = bridgeRNA
cttgtgtggaggaaatgtggtttacttgcagcatcgaccgggatgcgcatcccggtcgatgcaggcaggaggccgaatttccggactggtttagacagccgagctcaagcaaggccctgcctgctccctttgaccccgaacggttgaccgggctttagcccgcaccacaagactgggagcaaggccatgatacaggaactgaccgtcgtcggcatcgacatttccaaagcccgtttcgatgtctgtacatatcctacgggaaagcattggagtacaggcagctcatccgagcagatcacggctcttatcaagcgtattcaggctctcggaccggttgtcgttgagatggaggcgtctggcggttatgagcgcaagctggcggatagcctgcataaggcaggcttgaaggtctatattttgccaccctcaagagttcgcaactttgccaccgccatggggcaactcgcaaagaccgacaagatcgacgctgccatgatcgctcgttatctggcaacggcaggtgacaggcttgttgcctatggcggaccagaccctgctcgcgaccgcctgggtgcgctcctggctcatcgtcgcaggctggttgccgaaaaaagcggactgatgagccagctcgacacgatcgaggagccattggttcgcgatatgctggaagcccgcttgcgcatcatcgcccaggacatcgccattatggacaaagccatgcacgctttgctcaaggcgacgccgagcttgcgcaagcgtcacgagaggatgtgccaggtcacaggcgtcggcccggttctggcgtctgcgctccttgcggatttgcctgaactgggaactgtctcctcgaaggtcatcgcagcccttttgggcgtggctccccatgcgcgccaatccggcaattcgaaccgcaaaggtaaatgctccggagggcgcaagcatctgcgcgacatcgcctacatggcagccctcagcgcgatcaagatcagggatcctgttctcggcaccttttaccagcgcctgcgtagcaagggaaaaaccttcaagatcgctatcgtcgcaacaatccgaaaactcataacaatcctcaatgccatcgcaaaaacagacccggcatttacttaatcatccacggttg

SEQ ID NO: 7431 - DNA, 1357 bp, unidentified
  source 1..1357: mol_type = unassigned DNA; note = element_b85f738
  misc_feature 1..2: note = core
  misc_feature 3..161: note = LE
  misc_feature 162..1118: note = CDS
  misc_feature 1119..1357: note = RE
  misc_feature 1149..1352: note = bridgeRNA
tgatgtggtggacgcacctcacttctagcgtcgttgtaccaaacttatggtgcaaccagtgagaacagcaggagtaacgtgtatgtccaataaaatttgtcggcatcgatatcgccaaaaacctcttccaaatatgtatattgggcactaacggccggattttgtctaatcgcaaagttaagcgagataagcttcttgatactatccgccaactaccggagaaaaccgctcttgctatggagtcatgtgcgacttcacatcattgggggcgagttttccaggagttaggatatacagtggctcttatcccagcccagcatgtgaaaccatttgttggcaggcaaaagaacgacgctaatgatgcgcgagctatttgcgaagccttttccagaccgaacattcattttgttcccgtaaaatctgttgagcaacaagacctcaaggcaatacgcagcgtccgtaagcgtttagtagaaaacagaactgcccttgccaaccaaatcagagggttggctgctgagtatggggttgttttcccactatctgttaaagcattacggagccatttaccgctcgcgattgaagatgcagaaaatgagtttcctcctgtaatgaggagtttactgcaaacactatactgcgactttatcgatatcagcgatgaaatcgatgaagttacccagagcataaccaaattgagccaacagcacccacggtataaggcgattaaaaatatccctggttttggtccggttttgactgctgcaattattagcgaagtaggctctggcaaacagtttcaaaatggtcggcaattctcagcttggtgtggattggttcccaaacaaaatagctcgggcgggaaaagtagcctaggggcgttgtcaaagaatggcaaccgcgacttgagaaccttacttattcacggcgcacgcgcagttgtacggtgtagaacaaacagcaaggatcctatgggtgcttggctcagaaacctggttacgcgccgtgggaaagctaaagctatagtcgctttggcaaacaagctcggtcgtgtggtctggcgtgttttatcaaccgactgtgagtacgatatcaatcgtgcttttaagccactgtaattaaagaaatatagcattttgaatagcaactgagtttgcaatagctgatgaagaaacggtgaaccatccttactacactctgattaagcaacaggtttatcgaaacctaggctttgaatagacagtgaggagcggattatatcatggcgcaggtcagttattgacctagatagacgtcggatatatgttagcgaccgtaccattcaattagccattgcatccagaggtgcgtccatata

SEQ ID NO: 7432 - DNA, 1438 bp, unidentified
  source 1..1438: mol_type = unassigned DNA; note = element_b86073e
  misc_feature 1..3: note = core
  misc_feature 4..151: note = LE
  misc_feature 152..1171: note = CDS
  misc_feature 1172..1438: note = RE
  misc_feature 1208..1438: note = bridgeRNA
agaatgagatgaacgccccccactcattaagttcggagcgagatgatggttgaaagcgtgaagtcggcaggtgtggagcctcgcagattttcggcatcatcgtgcccaatatgggatgcataaagctccttcagactggagactccacagcatgaaatatataccggttggcgttgatatcgcaaaacatctcattcaggttcacttcatcaatgagcacacaggcgaagtagttgataaacagttacgcagtaaagactttctggccttcttcagtaaccgggagcgttgcctgattggcatggaggcctgtggaggctctcagtactgggcgcgagaactggaaaaactggggcataaagtcaggctgatgcagggacggttcgtcaaggcgttcgtcatgggcaacaagaatgacgtgatggatgcgcgcgctatctggatggctgtacagcaacccggtaaggaaatcgctattaagacagaagagcagcagtcagtactggttctgcaccgtgcccgcaggcagctggtgaagttcagaaccgcgcagattaattccctgcatggcacgctccttgagttcggtgaaactatccacaaaggtcgggcagcgatggacagagagctaccggtagccctggagcgaatgaaggcgacgttaccaccgtatctcatcaccgtgctggaagaccagtataacaggctgaatgagctggactcgctgatagatggcattgaaaagcagcttaacagcgtggcgcggcagagtgaaatctgtaaacggctgatggagatccccggcgtggggccgctcattgccacggcggcggttgccaccatgggggaagcagcggcgtttaaatccgggcgtgagttcgctgcgtatgtcggtctggtgccgaagcaaactggctcaggtggaaaaatccgcctgctggggataagcaagcgaggtgatacctacctgcgaacgttgtttatctatggagcaagagccgcctcgctatgtgcaaaagagcctggtctatggataacggaactgagaaagcggcgtccgacaggtgtggctattgtggcgatggcaaacaagctggcacgtacagtatgggcgctcgcagcctatgaccgtaagtacgaaaaaaatcatgtcagtatcaggccctgttaatcgctgataccgataaacgttaactcttaaaaagggtgaatgctgaaaggttgctctggcggcccgagtgatgacaaagacggtaagaccgtgacctgataaacctgaatgagtatctggacgtaaagtccgcgaggagaataaggctcaggtcagcgaatctcatagtggcccgcagcgctgactgcaataaggccggatacagagctgcaactactcgtcaatgtcagaacaacggaagccttgcaaacggggaggcgttcatac

SEQ ID NO: 7433 - DNA, 1420 bp, unidentified
  source 1..1420: mol_type = unassigned DNA; note = element_b8695fb
  misc_feature 1..2: note = core
  misc_feature 3..399: note = LE
  misc_feature 400..1413: note = CDS
  misc_feature 1414..1420: note = RE
ctcctaccatgagttcgtgtatagggctttatgatctgatattgtaaggtttaataatgaactatggaaaggcagaaggacttacaacttcctgcgttattgaatcctcagtacagtttgtcccatgccttcccaaaccataataagttgattggatctttgaatccttgttacgatggaggattggttggggaggctccggcactctgcttttcccgtctcatgacaggaggttttcttggtatcgacatttcaaaagacaagtttgatgcctattgcatagacatcgatggagagaaacaattttatctttcatgtctcatggacagagcgggttttgaaaaattgatgggccgtctggagactttatctgtcccccgatagagtcttctgatcggcatggaatcgaccgcctgctatcacatgaacctattttcatttttgcttgcgggtggatatatggcgatcataatcaacccgttgctcatttctaattttgtaaagatgcagttgcggaagaccaaaacggacaagaatgatgccttggtcatcgctcagttcttgtccatgtacgcggatgggttggcccaaacaagcatttctcctcatatttccgatcttagagatctgtctcgtcaacgggagagtctgctcagccagatgacggccctgaaatgcgatatgaaacggattttgacgattacgtttccagagctggagaaactaacaggcgtctttacaaagtctattctgaagcttttaagccgtttcccctcagcccgtgccattgtccaggcggatcctgcagagatgactcaacttcttattgaccattccatgggaagaaattcttcaaaggcagccgagattataatcaaagcggctcgttcttcagtcgggacaacgagttctgcgagggaggtgatcctcaaacagaaggcagaggtgttgatgcatctcgatggacatctgaaagagttgacggctgtgatgattgagttatgccgctccggcatgggagatgatgttgatattatgacttctcttcggggcattggtgagaaaacagcgacaaacttccttgtggagatgggaggtgatatcaaaaggtttaaagatcacaaaaagctcattgccacggcgggaatcgatcctgccatataccagtcaggtaagcatgatgggcaaggcaggatcaccaaacgtgggaaccgccatctcaggagagtgatctggctcatgacggtcagggtcatccagttcaatgactgtttccacaattactaccaaaagagaagacaggatggactcccttataaaaaggcggttctcgctaccgcccataaacttcttagggtgatttttgctatgctcacccaaaagacattttttagatatgcggtgaactcatgatagttga

SEQ ID NO: 7434 - DNA, 1494 bp, unidentified
  source 1..1494: mol_type = unassigned DNA; note = element_b87a8f4
  misc_feature 1..2: note = core
  misc_feature 3..255: note = LE
  misc_feature 256..1473: note = CDS
  misc_feature 1474..1494: note = RE
  misc_feature 10..238: note = bridgeRNA
ctaatgagaggtatcgaatcggtcagttgaggcagactcgatgcttggtagccgctggcaggtgagcactcaggcgccccggatctcggagtcctacaagcagatcgtgccccttgctggtggtcggaagagtcgaccgctgatgggatgtcgtgcccgccgctggcgtgagcacttgatcattagggtgctggtgatcttccgcgggctgccccaacttgatcagggacgacacggaagaagcggaggacgagggtgctgttcgtcggagacgactgggctgaggaccaccacgacatcgaggtgcaagacgagactgggcggcggctggccaaggcccggttcgcggaaggattggccggcgtcgctcagttgcacgagctggtcgcccaacacttgggcgatgctcagtccgcccaggttgcgatcggtatcgagaccgaccgcggtccgtgggtgatcgccttgatcgccgccggctaccgggtgttcgcggtcaacccgctgcaggtcgcgcgctaccgcgagcggcagagcgtatcgggcgcgaagagcgacgccgcggatgcgcacatcctcgccgacatggtgcgcaccgactctcaccagctgcgtcaggtcgcgggtgacagcgatcaggccgaggcggtgaaggtggtcgcgcgtgcgcacaagacgttgatctgggaacggacccggcatgcgcagcggttacgtaacgcgctgcgggagttcttcccggcggcgttgctggccttcgatgatttgaccgccgccgacacgctcgagctgctggccaaagcccccgatcccgatgccgcggcccggctcacgatcgcgcagatcaccgcggcgctcaagcgcgcccgccgccaccacgccgccgacagagcccgggtgatccaggccgcgctacgcaccgagcagctgcgacagccgaccgcggtgagcaccgcttacgcggccacggtccgtgcccaggccgccgtgatcgccacgctcaatacacaaatcaagacaatgggagcgcaggtcgaggcccattttggtcagcacccggacgttgagatctacctcagccagcccggcatgggacccatcgtcggcgcccgggtgctcgccgaattcggagatgacaagaaccgctacgtcgatgcccgcgcccgcaagaactatgccggcaccagccccatcacccgtgcctcaggcaagaaaaagacggtcctcgcccgctacgtgcacaacaaccggctcatcgacgcgctcgggcagcaagccttcagcgccttgaccggctcacccggagcccgcgcctactacgacgagttgcggcagcgcaggatgggacatcttgctgccctacgtcaactcgccaaccgactcgtcggcatcctgcacggctgtctcaagaccggcaccatctacgacgaaacaacagcctggtcacaccacgctgagactgccgccgcttgacaaattttcgccatgggatgt

SEQ ID NO: 7435 - DNA, 1539 bp, unidentified
  source 1..1539: mol_type = unassigned DNA; note = element_b87bda6
  misc_feature 1..3: note = core
  misc_feature 4..241: note = LE
  misc_feature 242..1417: note = CDS
  misc_feature 1418..1539: note = RE
  misc_feature 3..219: note = bridgeRNA
cttgtattatagagtagtagttttcagtgtccttttgcaaggacgtatgctacactgtagaggatgctgtggattggtggtctccccctaccgcaagacggttttcttaaggctccaaccacagccctttacagatttgttaatcagttagataccgccagacggtttatgtagaacaaggttacaacagtaaagtgttctgtggatacagcatcataaaatatattctggaggtataatcatgatttgcgttggtatcgatgtggcaaaggacaagcatgactgctttatcctaagctcggaaggagaagttctggcggatgtgttcaccatccccaacaacatggagggattcgggaacctgctccaagccatccgctcctgctccaggcccggagacaaaataaaggtaggacttgaggccaccggacattacagctacaacattttgggattccttcttgacaaaggtctacccacctttgtcataaatcctttgcataccaacctctatcggaaaagtctgacccttcgtaaaaccaagactgaccgagtggacgcacgaaccatcgcagctatgttactgtctgatgtagacctcaagccctacacgggtacatcatatcacaacgaagagctaaagtcactaacaagatacagatttgacaaagttcgtgaacgtgcaaagatgaaaaccgccgtgtcccggttggtctgcattctctttcctgaactggaaaagttgtttcccaatctccatattgcctctgtttacgcacttctcagggaatttccgggggcaaagcaggtggctggtgcaaacctgacccgcttgaaaaacttgcttcatgaggtctccagggggcgctatggcagggagaacgcggttgagattcggaacattgccagaaactccattggctcctttatgcctgccaagtccctggaattaaagcataccatttccctcattcacgtgctggatgaagaaattgcggaggtggaggcagaaattgattgcatcatggatgagattcaatcccccattacctctattccaggtatcggcagtcagatgggtgccatgattctggcagaggtgggagatttctcctgcttcgattccccggacaagatcctggcctatgccggtctgtctccatccgtccaccagtccggtcaaatgaaaaactgctacgctcacatggaaaagcgtggctccagatatttacgctatgccattttcaatgccaccaggttcgtctgtaactggaatccgatttttgccgcttaccttgccaagaagcgctctgagggcaagcactacaatgttgccatatcccacgctgccaagaagctggtgcgtctgatttacgccatggagaaatccggacaggcataccgcccagcagtctgatgactccaacctcatatccctgccagagcgccgtcttcgacgctctaattgtcatgccgttttcacggggggagactgatttgcaatttcctcatttcaggacttgacttttaatagttagt

SEQ ID NO: 7436 - DNA, 1102 bp, unidentified
  source 1..1102: mol_type = unassigned DNA; note = element_b883505
  misc_feature 1: note = core
  misc_feature 2..70: note = LE
  misc_feature 71..886: note = CDS
  misc_feature 887..1102: note = RE
  misc_feature 885..1090: note = bridgeRNA
ctatgtatggactcctccaacccagttgcctaggttggaaggtcgacgaaaaccaaaatggagtccatacatgcatcattcaacaacagttggggtcgaccttgcaaagaacgtcatccaggtatcggtagtttctcatcggggcaaagagctccttaatcgatcattctctcgccgcaagttcgcagagttcctgggcaagcagaagccatcactcgttgcctttgagtcgtgcgcgagcgcgcactactgggcgcgtgccgcgaagcggcacgggcatgaagtgcgcatcatcccggccaaggccgtggcgccgttccgtcagggtcacaagaccgacagcaacgatgcactggcagtcgctgaggcagaacgccggccgacgctgcaccgcatgcagcagcgactgctcgaacttcggcaggacattgagtcgatgaccaaggaagtcgacgggctggtgaagcagcacccggtgtgcaagcgcctcacagcgatcgagggcatcggcccgatcggtgcgctgtcgctctacgccgtgatgggctgtggcaaggccttcaccaagagccgcgagttctctgcctaccttggtctgacgccgcggcagtacagtagtggcggcaagaccaacatcgtggggatcagcaagaaggtcggtaaccgccgactgcggtcgatactgatccagggtgcgcgagcctatgtgtatagaatgaaggagccgcgatccttgaaagatcgctggctgaaagatctaatcgaacgagcgggccccaaccgcgctgcggtggcactcgccaacaagaatgtacgaacggcctgggcgatggtgacccagggaactgaataccaacgtcggctgcaactggagatggctgcttagaacgtcctgcaaactgaaaacctgtatcagataaagatatctgctcgggtcaaacctgcactgctttgaggccttcgatcccactgacccttagagaaaccggagtgcgcatacgtagagggccaagagatagcgtctccaaacaaaggccgaatatacaaacgcgtctgaaccctgatcacagtaactgtttgctagactggaggagtccatata

SEQ ID NO: 7437 - DNA, 1402 bp, unidentified
  source 1..1402: mol_type = unassigned DNA; note = element_b88f56d
  misc_feature 1: note = core
  misc_feature 2..94: note = LE
  misc_feature 95..1135: note = CDS
  misc_feature 1136..1402: note = RE
  misc_feature 1168..1400: note = bridgeRNA
taatggaatggtccgcctcacttttataaacggcttcaagtaagccatgatgttagtcgtaaacaaaacatcaaaaacaaaagagaggcgagccgtgaacaatcataattcaaaaggcaacataacaacactaggcattgatttagcaaagaatagctttcaacttcatggtgttaatgaaaagggtgacagaatgttaaggaagaaactaactcgccggcaattaacggcttttgttgcaaacttagaaccttgtttaatagggctcgaagcctgtgggggtgctcatcattgggtgcgtgtttttagtcaatttggccataccgttaaaatgatagccccgcagtttgtcaaaccgtatgttaaatccaataaaaacgatgctgtggatgcagaagccatctgtgaggcagtacaacgcccgagtatgcgctttgtacccagtaaaagtttagaacaacaagacatccaaagcgtgcatcgaatcagaagcttattagttggcagacgcaccgcacaagccaatcaaattagaggcttactcatggaatacggggttgttatccctcaaggtatacatcaacttagacgcgccataccagaaatacttgaagatgcagaaaataccttaaccgcttactttcgtgaattactccaagaactctacgaagaaatcattcactttgaccaacggattgaaacaatagagcttaagttaaagcgagtcagtgaacaaaataaagattgccagcggttactcactattcccggtattggtttattaacagcaaccgccttaatcgccgccataggagatatctccgccttcaagaatgggcgagagctagccgcatggataggtttagtaccacaccagcattcaacaggcggcaaacccacgttattaggtattagtaaacgcggggattcttatttacggacgttattaattcatggcggtcgttcagtggttagggttgcatctaggcatcaagacaagcgaaaccagtggatcacagagatcaaacaacggcgaggagaaaacatctccaatgtagcggtagccaataaaaacgcacgagttgtctgggctttattaacaaacaaacaagattataatgtcgtagcggcctaaagagtcagacaataaaacgatacaaattaagtttcaccaaattgcgtggataaaatttaagtgatggcataaaagataacatctacattccaacgaacctggtggtgtctagggctcaattgaagccgaagacctgatgaggggggaatgtgcggattccatcagggccagagattaatgaaatctcacctaaaggccggatatatggaagcaatatttctctatgttacgaaaaaattttacttgcaatacgaggcggaccatata

SEQ ID NO: 7438 - DNA, 1201 bp, unidentified
  source 1..1201: mol_type = unassigned DNA; note = element_b89a1b5
  misc_feature 1: note = core
  misc_feature 2..170: note = LE
  misc_feature 171..1175: note = CDS
  misc_feature 1176..1201: note = RE
  misc_feature 35..201: note = bridgeRNA
tcttaagtttaatttctctaaattttgatagttaatcagaaagaaccaaagagaggaataagattatataaaccgtgggaactagagattccgtcaacaatgataatcccctctcttttctactttaatttcgtttagttctgtgagacctggatctcgtttttaagtcgatgaaaaccaaagtagctgttctttccaatcattcttatatggataaaattaaacatttttacggagtagacattagtaaatcattctttgatgtggttgatcaaaatggaaagcatgaccagttctctaatgatgtaaaaggctttaaaggcttgctgaagtttattaagaatgacagcctggtagttatggaagctactggttattatcattacagattagctcagtatttatatgagaaaggtataacggtatcggttgtgaatccactttcggtgaagcgttttattcagatgaaactctccaagatcaagaccgataagagtgatgccaaagcgatctgtgaatatgcacaggctacaaaagttcctttgtacacagccagaaacgccgtgcaggcagagtgtttgcagctactaagtcttcaggatctttatttgaaacaacgcactgcggtgaagaataagatacacggagagaaagctctcggtacaccttcaaagactgttagtagatcactcgttcgaacgctaaagcaattagagaaggaattagatcagattgaaaccaagctggaatccttagtcaggcaaacccaggaagatcaactggagcaattaacaagtattccagggatgggtaagaagacagcgatgttattaattgtgcttacagacggatttaccagttttgagaatgccaggcagctttgctgttttactgggatcactccaacgatcaggcaatccggaaccagtgtaagaggacgcagtcgaattagtaaagtaggcaatcgaaagcttcggaatttactattcatgtgtagtttcactgattgcaaaactaataaagcttgcagggaaatttatgagcgaatagttgagaaggggaagagtaagaaactggcactcatagctgtgtgcaataagctcctgaaacaggcatttgccatagctaaatcaggaacttcttaccaggaaaattatatatcgaaattagcttagaagtacttggattttaccttagttct

SEQ ID NO: 7439 - DNA, 1554 bp, unidentified
  source 1..1554: mol_type = unassigned DNA; note = element_b89d8b9
  misc_feature 1..2: note = core
  misc_feature 3..497: note = LE
  misc_feature 498..1427: note = CDS
  misc_feature 1428..1554: note = RE
  misc_feature 3..242: note = bridgeRNA
cttgtatgatatttatagaagtaaatatcacactttcctttcttttttattcgtgactataatacattcagatactgtggtacctttgatttttttctgtagcacagactacttaacaggagtgtattgccgctacctttatctgaattgtttattagctggatgtgccatacattttgtatagagtacttatctcattcaagtctacaatgataatcgctggtggacgtcatggtatcaataattcgaaaggagatttaatctcatgatctatcttggcattgatatcgccaaacttaaccacttcgccgcagccatatcttctgatggtgaagtacttctcgagccgttcaaatttacgaatgacagtgatggcttccatttgttgctctcttcaattagttcctttaaaagagtgacctcatcattggtcttgaatcaacagctcactatggcaacaaccttattgaatttcttgtatctagacactttaaggtttgtctcatcaacccacttcagacttcatctatgcgaaaaataacattcgcaagactaagactgataaagttgatacctttgttatcgctaaaacccttatgatgcatgatcatcgtttcctcactgtagaagacattgatcttatgcatttgaagaatcttggacgtttccgtcagaagctggttaaaaaccgtactaggttgaaaattcagctaacttcttatatggatcaggttttccctgaactccaatacttcttcaaatcaggtttgcatcagaaagcctgttatcagcttcttaaagaagctcctactccggatgctattgcctccatgcatatgactcatctttcagctcttcttttaaaagcctcccacggccacttcaagaaagaacatgctaaagcattaagagttcttgcaagggagtctgtcggatccagcgacaggtctttatctattcaaataactcatgctatcgagcaaatcgagttattagatagccagttaaaaactgttgaatcggaaatgcaatcaattatgctttcacttgattcacttatcatgaccattccaggcattggatttgtcaatggtggaatgattcttggtgaaattggtaacattaaacgcttctccaatgctagcaaagttctagcttatgctgggttagatccgtctgtttatcagtctggaaactttgttgccaaacgtacacgtatgtcaaaacgaggatcaaaaaccttacgttatgcattaattaatgctgcaaacaatgttgttcgtaacaacgacacatttaaagcttattacgatactaaaagagctgaaggccgaaaccactacaacactttaggtcactgtgccggtaagcttgtcagggtcatctataagatgcttactgacgaagtcgagtttaatctcgactaattaaaacccgaatatcatttgattttgaaaactaccttatagggagtcttattaaagttacccttttttaaggaattcgattaaaaagaatttccagctaatttatacttgacttttcatagctggt

SEQ ID NO: 7440 - DNA, 1366 bp, unidentified
  source 1..1366: mol_type = unassigned DNA; note = element_b8a1a17
  misc_feature 1..2: note = core
  misc_feature 3..79: note = LE
  misc_feature 80..1114: note = CDS
  misc_feature 1115..1366: note = RE
  misc_feature 1157..1361: note = bridgeRNA
tgatgtgatggacgcacctcccttctagcgtcgttgtaccaaactaatagtacaaccattaagagcaggagtaacaagtatgtctattaaagttgtcggtattgatatagcgaaaaatctcttccaagtgtgtgttctgggtacaaatggacaaattttatcaaacagaaaggtaaagcgagataagcttctcgatactgtccgccaactaccagagcaaactgctctagcaatggagtcatgtgcaacttctcatcattggggcagaatatttcaagagctaggatatacagtggctcttattccagctcagcatgtaaaaccatttgttgggcggcaaaagaacgatgctaatgatgcaagagccatttgcgaagcctattctagacctaatcttcacttcgttcctgttaagtctgttgaacaacaagaccttaaagcgatacgcagtgtccgtaaacgtttggtagaaaacagaactgccttggcgaaccagatcagaggattggctgctgaatacggggtagtatttcctctctctattaaagctttacgaagtcatttaccgctagctcttgaagacgcagagaatgccctttccccagtaatgaggaacttactgcaaactttatactgtgactttgtcagtcttagcgaagagatagatgaaatgacccaaagtgtcaccatgttgagtcagcaaaatccaaaatatgaggctattcggaatattcctggttttggtccgattttgacagcggcgctgattagtgaggtaggtgttggaaaccaattcaaaaatggtcgccagttctcagcatggtgtggcctagttccaaaacaaaatagtacaggcggaaaaagtagtcttggctctctatcgaagaatggcaatcgcgaattgagagcattacttattcacggtgctcgcgcagtggttcggtgcggagctaacaaaacggatgctatgggagcatggttgagaggactcattgcacgccgaggaaaagcaaaagcgattgtcgctcttgcaaacaagctcggtcgggtagcatggcacatcttggcgaaaaatagtgaatacgatattaatcaggcatttaagcctgtttgactaaaaatactaagttctaaggagatatcctcaagaagcaactgagtttgcaatagctgatgaataaacggtgaaccatccttactacactctgataacgcaacgaggttattgaaaccgaggctttgaaaagacagtgaggagcggattacatcatggcgcaggtcacatagtagacctagaaagacgtcggatatatgttagcgaccgtatcattgaatcagtcattgcatcctgaggtgcgtccatata

SEQ ID NO: 7441 - DNA, 1357 bp, unidentified
  source 1..1357: mol_type = unassigned DNA; note = element_b8a5fb2
  misc_feature 1: note = core
  misc_feature 2..69: note = LE
  misc_feature 70..1110: note = CDS
  misc_feature 1111..1357: note = RE
  misc_feature 1112..1347: note = bridgeRNA
tatgggatggctcgccccttatccagcatcggatatgatgcgaatctttgaagaggaaggagcgagtcgatgtctatcgcgtctattgcaatccttggagttgatctgggcaaaacatcttgcagcatggtcggtgtcgatgagcggggcacagttgtcctgcgccggtcgctgcgacgccagacgctgatcgaatacgtggcaaagcttccggcctgcgtgatcgggatggaagcctgctgcggagcgcatcatcttggccggctgtttgccgcaagcggtcacgaggtacggctgatgtcgccggagtatgtccgtccgtacgtgaaggcgcagaagaacgatgatcgggacgcggaggggattgctgaagcggcctctcgaccaacgatgcgcttcgtcgagctgaagacgcaggatcagttggacatccagaccctacaccgcgcgcggtcccgcctggtggctgaacggaccaacttgataaatcaacttcgtgcggttctgtttgaacgtggggtgagctttccggtcggacggcgcaagcttgagcagggcatcgacgacttgctcactgacggtgacaacaccctatcgtcgcggatgagccggttgatcgcggaaaggcgggcggaatggaagcaactcgatacgaagatcgagatgttaaatggggagttcgtcgagatggcgggcagcgacgctgcgatgcgtcgactgacgaccattccaggcattggcgtactcaatgcaaccgcgctggtagccgcggtcggcgatggtagcagcttcagcaaagcccgagatctcggcgcttggctcggcctagtccctcgccaacacacaacgggcggcaagccgcgcctcttgggtatctcgaaacgcggcaacacgtatttgcgtacgctgctcatccatggcgccagagctgcattgccgtccctgtccaaaggcgacacgccgcttggacgatggttacaggggatgatcgaacgaggcgtgcatcgcaatgccatcgtggtggcgcttgccaacaaactcgctcgcatcgcgtgggctgccctgcgcagagacatgccattcgaacgtaactacccggttgcaatataaacagttcggcagcgtgaggtaacacgcgtaacctacgaggtttgcaggaaggagtggagatggcctgatagtcgatcggcgtttggaaggcccgatgaacgaattggcactcgatgccgtggacattatgaggcttcagacgcgcggatttccatcttggccgtgggcttgcctacgagaccgcatacgttggcgcagactaatcagatcatcagaaatctcacttgcaaacggggcgagccatacg

SEQ ID NO: 7442 - DNA, 1377 bp, unidentified
  source 1..1377: mol_type = unassigned DNA; note = element_b8a8818
  misc_feature 1..3: note = core
  misc_feature 4..95: note = LE
  misc_feature 96..1112: note = CDS
  misc_feature 1113..1377: note = RE
  misc_feature 1146..1376: note = bridgeRNA
atggataatggaatggacccatccactttaaatcggcctcgcaatgggccacgatgtagtcgctaaaactcatcagaaagaggacgggtccacctatgaagattactacaatcggtttagatatcgcaaagtctgtttttcatgctgttggcgtcgataaagcaggcaagttaattaaaaagaaaatgcttagacgcaaagacttgctgccctttgtcgctcaaattgagccttgtctgattgtgatggaagcctgtagtggcgcaaattactggaccagagaatttgagctgttgggccacagcgtcaagttaattgctcctcaatttgtcgtgccttttcggcaaggtaacaaaaatgactacaatgatgctttagccatcgcggaggctgcgcagcgacccaacatgcggtttgtaaaacccaaaagcgtcgagcagcaagatgtgcaactgctccaccgaatgcgcgaacgattaactaagcaatcaacagccttaatcaaccaagtgcgaggtatgttagctgaatacggcatcgtgatagccaaaagtaaatcggcttttaaagtacagtttcctgagattttgactaacgaaaccaatgcgctgactaccaaaggtcgaacaattttttatcagttatatgaagagtttacagatatagaaagacggcttaaggattgtgatacccaagtactcactgaaacgaaaaacaatgtgatttgccagcgtttagagactatcccaggtattggtcccgtcaccgctacggccttttatgcggctgctggagagggtaaagacttcagtaatggtagacacttttcagcttggtgtggcttggttcccaagcaacacagcagcggaggtaaagataacctccttgggataagcaagcggggaaatgcgtatttacgtaccctgtttattcacggcgccagagcggtgttgcagcacagttgtcataaacaggataaatttagctgctgggcaatacagttagcagagcgccgaggttttaatcgagcctgtgtggccgtcgccaataaactcgcgagaatggcatgggttatcccggcgcgtgaggaagagtatcggcttccagtatagtactgaatagattcaataaacgtgaataattaaccaaccagcaagttgctaagacacttgatttgatgatgagacagtcagactgatctactaaaaaccttagtcgggcataggctcattacgaagccgcagggatgataaggactgtagaagcagatatccatcagggccagagggatccctcaataacaggccggatatatgggtgcaatgaactcttctcaaaatcgttatcgaatgtcttgcaaaccggatgggtccatat

SEQ ID NO: 7443 - DNA, 1374 bp, unidentified
  source 1..1374: mol_type = unassigned DNA; note = element_b8b30dd
  misc_feature 1..3: note = core
  misc_feature 4..84: note = LE
  misc_feature 85..1116: note = CDS
  misc_feature 1117..1374: note = RE
  misc_feature 1138..1362: note = bridgeRNA
tgatgctgtggacggctccaccgccggcatcgcaatgtgccatggaggttgttttcataaccgccaaaaggggagccgcccgagatggacgttagcacgattggattggatgtggcgaagagcgtttttcaggttcacggcattgatgcagcaggccaggtcgttattcgccgccaagtgaagcggcgccaggttttgagatttttcgagaagcttggcccctgtctggtcgggatcgaagcgtgtgccacagcccatcactggggtcgcaagattgccgcactggggcacgaggtgcggttgatgccggcgcactatgtgaaggcttatgtgaagcggggcaagaatgatgtggccgatgccgaagcgatctgtgaggcggtgggccgtccgaccatgcgctttgttggccttaagagcgcagaacagcagagtgttctgatgctacaccggacccgggagttactggtgcgtcagcgcacgatgctggtcaatgcgatccgtgggcatatggccgaattcgggattgtggcccgtgctggtctaccccagatcaaggagcttctggccgtgatcgccgaccgggatgatcatcgccttccgcctgacgcgcgtgcctgtcttgagggcctggcgcggcagttcctctccttgcacgaagagatttgcgcggccgataagcgcctccatgcctggcaccgatcgaaccccgtgagccagcgccttgcaaccatacccggcatcggaccggttacggcgagcgcgttggctgcctccatcaccgatcctttagtgttcaggtcgggccgcgagatggcggcctggatcggactggtaccgcggcagaactcaacaggtggaaagcagcgccttggcaaaatctccaaacagggcgatcagtatctgcgatggctgctcgtcgccggggcgatggccgtaatccggcatgccaaacggcgcggcacagcaaaccagctctggctcgatagcctgattgccaggcggccgaccaaggtggcggcggtggccttggccaacaagatggcacgaaccgcctgggtcctactcagatatggcggaacctatcgacagccgctcgtcacggcgagcgcctaggcagcggtaggtaaagagatcgacagttcggcgaggtgcacatgaggtaatgcaaaatcggtcgaaccgagggtcgggaaaacccgtttgggtcacggtgcactacaagcccgagttaatgattgggacccggtccaggcggatcgcattagggccagcggcacaatacgccgcatcaacaggccggacacatgacagcactcgaccagtttgcaacagcctcgaaatgtcccttgccaaaacggagccgtccacaca

SEQ ID NO: 7444 - DNA, 1369 bp, unidentified
  source 1..1369: mol_type = unassigned DNA; note = element_b8bb67f
  misc_feature 1..2: note = core
  misc_feature 3..87: note = LE
  misc_feature 88..1122: note = CDS
  misc_feature 1123..1369: note = RE
  misc_feature 1112..1357: note = bridgeRNA
tgatgaggtggacgccccctcgcgccggcatcgatgtgccttaaggtggccgttgatgatcggaaccaccgaggaaggagcgtttacatgaaggttacaacgattgggctcgacttggccaaaagcgtattccaggttcatggcattgccgatgacggcaccgtcgtcgtggtgaagaggctgctcaggaagcagatgatcaatttcttctccaagcttccgaactgtctgatcggcatggaagcctgtgcgacggcgcatcattgggcgcgagccctggcggtgctggggcatgaggtcaagctgatgccgcccgcctatgtcaaagcctacgtgaagcggggcaagaacgacgccgcggatgccgaggcgatctgcgaagccgtccggcgcccgaccatgcgcttcgttccagtcaagacgccagaacagcaaagcatcctgatggttcatcggacccgagccttggtcgtgcgccagcgcaccatggctgcaaacgccctgcgggcgcatctggcggagttcggactggtctgtaacccgggtgtggtgaacctcataaagctgatgcgtgccgtcttcgacgagcatgatccacagactatgcttcctgagatggcgcaggtggcgatgacgacgctggttcgccggctcctcgaactggaagacgaactccggaagctcgacaaggtcttgcacgaatggcatcgccagaacgaagcgagccggcgcctggcggccgttcctggcatcggcgtgatcaccgcgacggcgatcgtggccaccgtcagcgaacccggccagttccgctccgggcgccagttcgcagcctggctcggcctcgtccccaaacagaactcgagcggtgaccgacaacgtctcggcggcatctcgaagcagggagaccgctatcttcgccggctgcttgtcgtcggcgctacggccgtgatccgtcacaaccggggcaagcagacgccaggagcccagtggctgcaatcgttgctggcgaagaaaccggtgcggctggtctcggtcgctctcgccaacaagaccgcgcggatcgcctgggctcttctcgcccgcgggcagcagttcagcccatatcggatcagcgcctgctgacggccgccagccgctacaggcaaacacaggaattggtgacggcagaacgtgatgcgagatgatcgaccaagaacgagaacaccccgtgtgattcaatgcgtctcgaatgcgccagcttgatcagggatctcgttcgcggatttccatcagggccagcggaaactgctccgcacaaacaggccggacatatgaaagcgaccgatcagaagctcaccaaaagccattgccaatcaggggcgtccacata

SEQ ID NO: 7445 - DNA, 1379 bp, unidentified
  source 1..1379: mol_type = unassigned DNA; note = element_b8bd926
  misc_feature 1..3: note = core
  misc_feature 4..239: note = LE
  misc_feature 240..1115: note = CDS
  misc_feature 1116..1379: note = RE
  misc_feature 1089..1366: note = bridgeRNA
tgatggagtggatgccccctcccgccggcatcgtgatgtgccaaagtgatgttcgcaggaacgtcactcagaggaggaagcatccatgaaggaagttagcatcgttgggctggaccttgcaaaacgggttttccaagcccgcggagcccgtgccgacggcagcgtggcgttccgcaggaagcttatcacgtggtcaagtcctggccttcttcagggggctgcccacgtccgttgtcgcaatggaagcttgtgcgaccgcacattattgggcgcgggcgatcggcaagctcgacaatgaagttcgtttgttgccgccagcttatgtaaagcctttcgtcaaacggcagaagaatgattcggcagacgccgaagccatcgtcgaagctgcgagccagccctcaatgcggttcgtcgcgcccaagaccgaaggccagcaggctcactcgatgatctttcggacgcgcgatcttttcgtccgccagagaactcaactcatcaatgccgttcgcgcgcatttagcggagcatgggttcattgcaccgcaaggaattacgaaccttgccgcactgacagcgatcatcgaagataccaatatcggtctcgaactcatcgtcgttgaaaccgcgcggctttatcttgagcagatcgacatgctctcctctcgtatcgccagtttggaaaagacgcttaagtcggaagctaaacgctcggagagcacagcccggctgatgtctatgcctggcatggggccgatcactgccatggcaatcgaggcgttcgcgccgagcatgacggtattccgaaaaggacgcgattttgcagcgtggcttggcctggtacccaggcagtattcgagtggcggcaagcaggtgctcggacgaacctcgaagatgggccagcgcgacatccgggggcttctgatcatcggcgccatgacggtgatccgttgggcctgccgcaaggcgccggccgagacctcatggctggcgcggatgttaacgcgtaagtcgcgcatgctcgttgccattgccctcgccaacaaaatggcgcgctcgatctgggcgatgatgacgaagaacgaagattacagagattccggtctggctgccgcataatcaaaaccagcagcagagaccggaacggcggtgtgtgaggaggtcatcgaagggtaaggacaaagatcggtgagagtggatctggaaatgcatccggctcaaagagccttgagcccgcagaagtgatttgcaccaggtccgggtagctccataccggccagcggtctaaatcgagccgcaagaaaaggcctgatacatgaccgcacccgatcacacgttcgagccattcgaagaaagccttgcatgaaccggggcatccataca

SEQ ID NO: 7446 - DNA, 1812 bp, unidentified
  source 1..1812: mol_type = unassigned DNA; note = element_b8c7db2
  misc_feature 1..2: note = core
  misc_feature 3..233: note = LE
  misc_feature 234..1385: note = CDS
  misc_feature 1386..1812: note = RE
  misc_feature 1483..1731: note = bridgeRNA
agcattcctgtagagagttaattattgactttgataaaaaaagagctcctcagtatgattgaatatagacaccactctaaactcaaatcttaaggaggaaactctactatgaagtataaaatgcaagacaaacaaaatcaacttattgaaagaatctcagaccgtcatctcgttgtcggtgttgatattgcacaacaagtccatgtagctcgagctgtaattatcgtggtattgtgattggtaaccctctctctttcgaaaataatgaagtgggctttactaggttactagaatggatcaacggattaaaagctttaaaaaattataataaagcaatagttggtatggagcctaccggacactactggattaacttatcaaaatggctatatgaacaaaacattgatgtcgtaacagttaatcctcaccttgtaaaaaagaataaggaaaaccgagataacacccaatccaaaagtgataaaaaagacgctctcgtcatcgctgatatggttaagaatggatactatgcctttattcgcccctcttcagagcctttcgaaaaacttcgagtattaatggctaaccgcgacgtgattgttaaacggctcgtcagttccatcaatcaaataaatcgttgggtagatgttgtcttccctgaacttcgacaggtatttaaagacgtcaaaggtaaagggtcaatcgcaactcttcgcttatttcctacaccaatggaactacgttccatggaagcacaggatatagttaaaggttggaaaacagtgatgaagagacacgctgggttaaaaaaagcacagttactaatagaattagccaaacattctgttggtagtcaccaagcacatgatgcttataaactacacttagaacaattacttgaagaatttgatctcgctacagctcaactcgaaagagtcgaaaaagaagttactggtgtacttaaacaaattcctttcgcaaggaaattacttgccattaaaggaattagtgaaattacactagcaggcattttaggagaagcaggagatttaagtggtttcgcccatggaaactctctattaagacatggaggattacatctagcagaggctagctcgggtaaatggaaaggacaaatcgtcatctctaaacgtgggagatctagactgcgacgtttcttgtatttagcgacaatgagtcttgtcaagaacaatcccgagttcaaggagcttcactccaacaatgttaaagtgaaaaaaatgaagaaaatgaaatcaattatgaaactgattggtaagcttgcaagaatattagtaggaattgcccgacgtaatgaatcttattgtcctgaaaaagtacaacctttaacaccctcaatagcagcataactaggactttattaaaagagttcatatcaaaaaataactagcagataatatttagattaatattttttcgaatgttgccttattcgtaggatctcaaagaaagcacggagtactggatgtgttcaaccaaagggcaccgacccgttccgttagcaaaaccggcctccaccccttggataggcatgacgaaggaatgagagggcttagacccgttgagacatgggagggatagcctccaggggcggcgtggagaatgcgtgcatcatatggtaataattggagttatttctacctcctctatttccgcatgccttcatgtagccaaaagtatcaaaactcattcgattcatccgttattgttccatcaagtggtttgaaatcctgcgaataagtgagcattcgagagataaatgtatctaactgaggg

SEQ ID NO: 7447 - DNA, 1421 bp, unidentified
  source 1..1421: mol_type = unassigned DNA; note = element_b8c8034
  misc_feature 1..2: note = core
  misc_feature 3..191: note = LE
  misc_feature 192..1406: note = CDS
  misc_feature 1407..1421: note = RE
  misc_feature 10..221: note = bridgeRNA
tccctaccttgttgatcgggatgagcgagccattcgtagggttggctcacccaggggggccgggtgtggctttcagttctctgccgatcgtggctgctgaggattcgccgcccggcccccacgacgactcggctgctcatcaggaattgcggcactgatcgctctgtagggactcgacagcgaggtcgtctgtggtgcacgacagcaagcaacccgtggagagacgagtgacagcgatctgggccggcatcgacgccggcaagacccatcaccacgcagtggtgatcgacgacaccggcaaacgcctgctgtcccgccgcgtggccaacgatgaaacggaactgctccagctcatggccgatgtccttgcgctgggcgaggttacggcctggggcatcgacctggctgacggcggcgccgccctcgtgatcgcgatcctgctcaaccatgggcagcacctgctctacatccccggccgctccgtcaaccgggcctccgagggataccgcggcgacggcaagaccgacgccaaggacgccgcggtcatcgccgaccaggctcgtgtccgccgcgacctgatgcccctgcggcccgacgatgaacgggtcaccgaactcaaggtcctgaccggccgccgccgtgacctgtcggacgacaagacccgcaccgtcaaccgactccgcggccatctcaccgggatcttccccggcctggaacgcgaactcgacctcgccaacgtcgctccactggtgctgctgaccggctaccagtccccggccgccatccgccgcaccggtgcgcgccggctgaccacctggctgcgcaaccgcaaggtcatacgccctgaccagctcgcggccaaggctgtccaggccgccgaaggacagcacaccgccgtccccggagagaagatcactgcccaggtcgtgcactcgctcgctaaggaggtgatggccctcaacgagaagatcgccgagatcgacaagctcatcgagggtcggtttcgcgagcaccggcacgccgaagtgatcagcagcctgcccggcatcggccccctgctcggcgccgagttcatcgcggccaccggcggtgacatggacatctttgagaacgccgaccgcctcgccggcttcgccggggtcgctcccgcggcccgggactcgggcaggatcagccggcccaagcgatacagccgacgcctccaacgcgtcttctacacctcggcgttgatcagcatccgctgctgcgacgagtcccgtcgcttctatgaccgaaagcgcgccgaaggcaaacgacacgtccaagcggtcctcgcgctcgcccgccgacgagtcaacgtcccgtgggcactgctgcgcgacggacggtgctacagcctcacaccaccagtcaccctcgcagcttgacaactccattaggaa

SEQ ID NO: 7448 - DNA, 1407 bp, unidentified
  source 1..1407: mol_type = unassigned DNA; note = element_b8d7bbf
  misc_feature 1..2: note = core
  misc_feature 3..92: note = LE
  misc_feature 93..1109: note = CDS
  misc_feature 1110..1407: note = RE
  misc_feature 1168..1406: note = bridgeRNA
ataatggtatggacccactccacttcctaatcggcctcattagggccaaaatggaattgataccaaccatttaaaagcggagtgagttaactatgaagattacaacaataggcttggatatagcaaaatcaatttttcatctttatgcggttaatcaggtaggtcatttagtgaaaaagaagcaactaaaaaggaagcaaatgttggcgtattttgcgcaacttgagccttgtctggtggcgatggaagcctgtggcggcgccaactattgggcgcgagaactgatggcgctggggcacgaggtgaaactcatcgcaccacagtatgtaaaaccatatgtcagagggaataaaaatgattacaacgatgcccaaggtattagcgaagcagtgcaaaggcccgatatgcgatttgtgccgatcaagtcggtagaacaacaagatattcagaattttcatcgtcaacgcgagctaatcaaaaaagaacgtaacgcgttagcgaaccaggcacgtggtctgttagcggaatatggcctagtcatcaataaaggcgtcgccgccctacggcgagatttgccgctgatgcttgaagatgccgagaatggcttaagtgccctcagtcgagaattgtttgcagaggaactagaggcgctgcgggtattagataagcgctttatggattgtgagaagcgaataaaggtcttgaatcaaaataatgagatgtgtcaacgtctcgacgatatcttgggtatcgggccaatcacggccagtgccacttatgcggcggccggtgatggcaaagattttgtcaatggtcgacattattccgcctggttaggcttggtgccggggcaacattcaacgggcggaaagccggtgttactgggtattagcaagcgcggaaacgcgtatcttagaacgctttatattcatggtgctagagcggtgctacgtcatagcgcgaccaagcaagatcgttttagtcgctgggcacagtcggtattagctcgccggggtcacaacaaagcgtgtgtggcggttgccaacaagattgccagaatggcttgggtgatcatggctaaaggggagtcttaccgggcaccggtttaacgaaaacaaaacagaatttgattgaacatcgtcgagattttcaatcaaccgaagggtaagccctttccgagagttgcaaaagataattaatctgatggtgagataggtcagaccggctcattcaaaacctggtacctgcatcggcaatcaagaggccggagggatgatgaggaggatgagcgcaaataaccatcagggccaggatgtaaaaagcgtccacaaacaggccggatatatgagagcaatgattttctctcacatcaatgattaatatcttgcaaacggcgtgggtccatat

SEQ ID NO: 7449 - DNA, 1302 bp, unidentified
  source 1..1302: mol_type = unassigned DNA; note = element_b8da3a4
  misc_feature 1: note = core
  misc_feature 2..221: note = LE
  misc_feature 222..1190: note = CDS
  misc_feature 1191..1302: note = RE
  misc_feature 44..212: note = bridgeRNA
tcttaagtttgatttatattaaaacacctagttttagttattaatcagaaagaacaaaggagagaattaaggttactatatacggtgaagcttcagacttcgacaacattgataatcctctctcttttactactttaattacgatcagttctgtgagactttagatctcgttttcaagtcgatgtaataccagtagctggttctttcataaatcaattcttatgaataaatataaagaaacttatggagttgacatcagtaaagatgtttttgatgtgcacggcagtagttcggggcacaatcagtataaaaacgatgcgactggctttaagaaatttcttaaagacttacctaaggaatccttagtagttatggaagctacgggctattatcattatcgacttgctcagtttctttacaaaaatgaagtggtagtctctgttgttaatcctttgtctgtaaagcgttttatacaaatgaaattagcaaaagttaagacagataaaagcgatgcaaagatgatctgtgagtatggaataattaacgaggttcctttgtataatgccttaacagatgttcagagtgaatgtttgcaattatttagaaccctagataattatataaaacaccgcactgctacaaagaataaaatgcacggagaagaggttttagggataccgtcaaagttcacatatcaatctttgagaagaactaagaagtattatgataccgagattaaaaaaattgaagcaaagattctctccctagtaaaagaggagcagcaagaacagctcaccttgctaacttctgtaccaggaataggccagaagactgctttatttttaatcatcgttacagatggtttttctaagtttgaaacagcctcgcagttatgcagctatgtaggcattacaccaacgacaagagtctctggcagcagtgttagaggcagggcacggataagtaaggttggtaatagaaagcttcgtaatctattgtttttatgttcttttaatgcctgtaagtacaacaaagcgtgtcgagaactttatgagcgaatagtgaacaaaggtaaaagcaaaaaactagcgctaattgctgttgcaaataagctaattaaacagtgtttcgctatcgcaaaatctggaagaccttatgacgaaacttacgtttctgtcttgcctagataattagaaaaatttacaataaaaaactcaaagaatcaatcaattgaatctctgagtctaggataatagtgtctcaaaattaatgaagaaaaaggttgttttttacctcagttct

SEQ ID NO: 7450 - DNA, 1376 bp, unidentified
  source 1..1376: mol_type = unassigned DNA; note = element_b8dc7ac
  misc_feature 1..2: note = core
  misc_feature 3..75: note = LE
  misc_feature 76..1101: note = CDS
  misc_feature 1102..1376: note = RE
  misc_feature 1077..1363: note = bridgeRNA
tgatggggtggacgccccccgacggcctcggtgtgccaaagtggaggtgttgaacaccacttgagggaggcgtccatgggagaggttagcacaatcggcttggatctggcgaagaacgtctttcaggcgcatggggctgatgcatcgggcgcggtcctgttccgcaagacgctgcggcggcatcaggttctcaccttctttgccggccaaccgccatgcacggtggcgatggaggcctgcggcagcgcgcaccattgggcccgcgagatcggcaagctaggtcatcgtgtgcgactgattccacccgcttacgtgaagccctttgtgaagcgccagaagaacgatgccgcggatgccgaggcgatctgcgaggcggctcagcgcccgaccatgcgcttcgtggtggtcaagagcgagcagacgcaagccgccgccctcgtgttccgcgcgcgtgacctcctggtgcggcagcggacccagatcatcaatgcgctgcgcggtcatctggccgagttcggcatcgtggcggcgaaaggaccagctcgtgttccgcagctcatgcaggctgtcgaggatccgaccgagccgatcccggagctcgctcgtccaatcctccagatgctgatcgagacgcttcggggattggacgagcagatcacacgtctggaccaggagatcatcgagcgagcgaaagaggatgagacagcacgtcggctgatgaccattcccggtatcggcccggtgaccgcagtcgcccttgcagcactggccccaccggctgaggtcttcaagcgcggacgggactttgccgcctgggtcgggctcacgccctcggagcactccaccggcggcaagcagaagctgggagcaacctcgaagatgggtgagcggaccttgcgtcgcctgctgatcatcggcgccagtgccgttgtgagctgggtggctcgcaacggggctcccgcgggatcttggatcgcgcggatggtggcgcgtaagccgccgatgctggtgcgggtggcgctggctaacaaaatggctcgcatcgtctgggccctgatggcacgaggcggggtttaccaggctccggctgcggcggcataagccgtcgccgctgtggggctgttggggcgtgggaagatcgaaggagagagatggcgcaacggtcacgagacggaatcaggaaaaccagctttgcgacaggtgccgtgagcacgtggttgtgagcacgtggttgtgtattggacctgatccacgaactcccatccgggcccgcggcgtgtgaacggccgcatcagaggccgaacacatgtccgcatctgaccacgcgctgcatcaaacctgaagattcctcttgcgtcacacggggcgtctacaca

SEQ ID NO: 7451 - DNA, 1308 bp, unidentified
  source 1..1308: mol_type = unassigned DNA; note = element_b8df121
  misc_feature 1..5: note = core
  misc_feature 6..216: note = LE
  misc_feature 217..1182: note = CDS
  misc_feature 1183..1308: note = RE
  misc_feature 38..202: note = bridgeRNA
ttcattgtataataaattatcgttataaatttgcataaacattcaacatcaaagtgtggaataagaccgagttttcattagtcataaagaccgtgaatcatgttctgtccccacactttatacatcagaaaccggatagttcaatgggcttttagaccccgcattcgcaatgatggctcacgatgtacagatgttgttcaataaatcattaagactatgacctacgttggaattgatgtcagcaaagcgactttcgtagtagcttattcttctgccaagagcagtaagacaaaaacattcaagaacaccacaaaaggtgttcacgagttcattcaaaccttgtcagccgatgattatcattgcgtgctggaagcaaccggcaattacagttccctgctcgtctatcttctttcgcaagcaggaattactgtcagcctggaaaatcctctcaagataaaaaacttcgcccgtgtgatgctttccgtcaccaagacggatgaaacggatgcacgtttgattgccctctatggagagaaaatgcaccccgccccttataaactccgcagtgatgccattctcatcttgaagcagaaacggacagtcatacgccagctcaaaaagcaacttatagccacccgtaacttgaaaggctctatggaagtacttcctttcttcgattccaagtgcaagaaaaccatagaaaagactatcgctttccttgaaaggcaagtcaaggacttggaagaggaactggcaaatttggcacaaggtgagtataggaaacagatgggcttgctcacctccgtcaaagggatcggcgtcacactcgcggcagccttaatcatggctacaggaggttttgcttactttgataacgccaagcagcttacccgatatctggggctgtcgcccacttaccaacaatccggtacgtcagtcaatgtcaaaggtcacatcaaccgtaacggtgattcatccttgcgcagcctgctttatgttgctgcaatggcatccctgcgatgcaatgccgaatgtaaggagtgtgtcaaccggttaaggtctaacggcaagccggggaaagtggcggtcgttgcggtcgccaacaaactcgtaaggcaagcctttgcggtagtcactcaagaaaagccttatattgatggattcaagtctgcaaagccataatagctcctgcggagggaacgccatgcggcaaggggctgcgcagtcagccccgacgagctttccatccacgacaactcgcataattatgctaattattgttaaccgtagtcggcttttatattatag

SEQ ID NO: 7452 - DNA, 1240 bp, unidentified
  source 1..1240: mol_type = unassigned DNA; note = element_b8e5a4a
  misc_feature 1..2: note = core
  misc_feature 3..262: note = LE
  misc_feature 263..1222: note = CDS
  misc_feature 1223..1240: note = RE
  misc_feature 6..217: note = bridgeRNA
cttatatctcgattttatccaatctcacagataaaatccccggatgatcaccgggcggaagccggagaagccgagcccgacctgaggcttcgagcctgacacgtagagtacgctctccgccttccacattcgccttttaagttcgaacggtatgcgtaggccaccacactgagtcgggtgagcctgtatgaccataaggctgaaccaggcgtatgccttgattatatcctattgattctctatattgtttaggaaggtcagtatgtttcaaattattatcggcgtagatattgccaaacacaaattcgatgtggctcgactagagtctaataaatataaacacaaaaaattcgacaacacgcccgatggctttgccgcctttagcgcttggttggcaacatttggcgacagcaatgtgttgatttgcatggaggcgacaggcgcctatagtattcccttggccgaattcctgatgcaatcggattatccggtcgctgtggttaaccctgccaaaatcaagagcttcgccaaaagcgaactgagtcgcgtcaaaactgacaagtccgacgccaaattaatcgcccgctacgcgctggaaaggcagccgcccttgtggactccgccacccgccaacatccacgagctacaagtgctgttgcgccgcgttgaggatctgctggaaatgcagcaaatggagaaaaaccggttggacactgccgacgcctgcattgccgaatctattaaaacggttttaacgcagttggagaaggaacttaaagcgactcgcaaacgcatccagcacctgattaaccaagaccctgaccttaaacgccgacgcgacttactggaaaccattccaggcatcgccgaagcctcttccgcacatcttctggtggccttgagcgagcattaccgatttaccaacgccaagcaggcggtcgcttttgctggcctcaatcctgcgctgaacgagtccggtacgtggaaaggaagaactcgaatttccaagatgggtgatccgttgttacgggccaaactgtatatgcccgctgtggtagcaggccagcataaccccatcatccgtgcgttccggttgcgtttggaggctaatggaaaaaacggcatggccatcgtttgtgcctcaatgcgtaagctggtgcatctcgcctttgctatcctcaaatcaggtaagccatttgacccacattttttacttgcataaggggcggcgagacggtat

SEQ ID NO: 7453 - DNA, 1378 bp, unidentified
  source 1..1378: mol_type = unassigned DNA; note = element_b8f7818
  misc_feature 1..2: note = core
  misc_feature 3..212: note = LE
  misc_feature 213..1184: note = CDS
  misc_feature 1185..1378: note = RE
  misc_feature 41..218: note = bridgeRNA
cttgtattggcgggccgggctatgatgggctggttccgtgaggaatggcccagcccgggtggccacccgggctgggccgccgatcgatcggatcgatgcccaccgaagcccctgagagctgcgtttcgtagcaagatcgcggtcggcacttcatcgggacccgcatggttgaacgaacttcaggttcgcatcacaagggagggtcgaggaagatggccaaacgtaacacgatctgtgccggaatcgatactagcaaagacaagctcgacgtggcgctcgatggcagttcggaggagctgcaggtcaagaacacggcggaaggtcaccaggagttggtggagtggctgaagcgccacaaggtcaagagggttgggatcgaggcgagcggtggttatgagcaggcggcggttgccgaactgcgacgcaagcggtttgtcgtcatcgtatttcagccgatccaggtccgtgcctatgccacgttccatttgcaacgggccaagaacgacaagatcgatgctgcgttgattgcggcctgcaccgccgcggtcaagaacatccatcccgctccagacccccggctgcagccctttgccgtgcatctgacgatgatcgaccagatcaaggaggacatcgcaaagctcaaaaatcggctggagagctgccgtgacgagcgtatccagaagttctggaaggagcagattgctctgttggccaagcacagacgagccgagttcaaggccttggtggcagcgatccgcaagcatcgcgatctcgccgcacgtctcgatctgatctacagcgttggcggcagcggcttgccgaccgcggttgccatcttgatcaggatgcccgagatcggtcggatcacccgcgagcaagccgcagccctcaccggacttgcgccttacgatgacgacagcggcaagcatatcggcgcccgtcgaattgacggcggacgccagcgcttgcgtcaggcactctacaccgcagctcttccggcctccttccgctggaacccgcagctcatggccctgtacagccggctgatcgccgccggcaagggccacaagcgcgcgctcgtcgcctgtgccagaaagctgatcgtcatcatcaacgccgtcgtcgcccgcggaacaccgtgggtcgctgaaccgcccaaaaccgtgagtgtgtccgtcacctgatcgcgtttcttggttcgaccaggcgaccgtttcttcgtcccgacctgccgtcaagacgacgccgcgcaccgcggccgtcaaggatggccgtcgcgcgcgtctcacctcacatcaactgccgccaggccacgccttgacggccgcggcgcgcggcgtcagcctcaaggctatcgggacgccatacttaatggttg

SEQ ID NO: 7454 - DNA, 1407 bp, unidentified
  source 1..1407: mol_type = unassigned DNA; note = element_b90331d
  misc_feature 1: note = core
  misc_feature 2..315: note = LE
  misc_feature 316..1392: note = CDS
  misc_feature 1393..1407: note = RE
  misc_feature 10..309: note = bridgeRNA
ctgtgagtcttggtagtggctggtctgggaccggctggcagagtaggtgttggcctctccatcccgtgatcgtgactcaacctggcggtgacccacccccttttggtggtgtcttcgggccgatttgtccgatcacatgggtggtgcggccggcaccgactcggcccacctcggtaacttgatcagaaggctgtctgcccctttgccgggggcatgactcatcacagtgttgttccgaagtgacctcatcccggaccggtaccggccgcaagcggccgcacaacctatcggtcaaacagggagcttcgaaccgccatgtccattgtcgcgcacttatacaacttcttcatcggcgtcgatacacacgccagaaaacacgtctacacgatcattaccaacaccggcatcctcgtggctaccggcagcttcccgacatctcgggccggcatcaaacgggccctgacctgggccggccggtggacgaaaggtgacctcgacactctgtgggtcgtggaaggaacagcctcctatggtgcggtgctgaccggtcatatcgccacgaccgaataccccgtggtcgaagctggacgcatggatgccaaagcccggtacggcgtgggtaagagcgatgagctcgactcctaccggatcgcgaagtccgtgctggcgctacacaccgaccagctgcggtggccacgccaaggcgaaggcgtccgccagggcctgcgcgtgctgttggcagcccgggacgcgatgaccaccgaacggacccggatgatcaactccctgaccgcgttggtgcgcactgtcgatctgggaattgatgcccgtaactcgttgaccgatgcccagttcgtcgagatctcgaagtggcggtcgagaaaggaagacatcggcctggccacgtcccgggacgaagcggtccgtttagctaaacgcgtcctcgatcttgatgacgatctgcaggacaaccatgacaagctcgctgaacttgttgaggccagtccggcggcagtcttgctggccgaacccgggatcggtacgttcactgctgcggtgttcttcaccgcctggtcgcatccgggacgagtccgtaacgcggctgcgttcgcagccctggcaggggcgaatccgatccctgcttcgtcgggcaacacgcaacgacaccggttgaacaggggtggggatcggcagttgaaccgggccctgcacacggtgatcacgaaccggatgatccacgatcagaggaccaaggattatgttgcccagcgctttggagaggacccgacgaagaagtcgaagagggagctcaagcgcaagctcaaatggtatctcgcgcgtcgagttttcaaggttctcaacgggctagaaacaattcccacgtcggcttgacagacatagaaggat

SEQ ID NO: 7455 - DNA, 1774 bp, unidentified
  source 1..1774: mol_type = unassigned DNA; note = element_b903ed2
  misc_feature 1..2: note = core
  misc_feature 3..75: note = LE
  misc_feature 76..1122: note = CDS
  misc_feature 1123..1774: note = RE
  misc_feature 1549..1761: note = bridgeRNA
tgttggggtggacggccccacggcatcgcgtgccagaattggtggtcgtttcaccctccaagaccggagccgtccatgacccagtataaacgcatcgccatcgacacgtccaaagccgtgttcaccctgcacggcatcgaccgggctgaccgggcgatccttcgggtcaatctcagccgcgcccagatgatcccgttcttcaaaaagcttcgcaccaccgagatcgcgatggaagcctgtggcggcagccattactgggcccgggaactgaccgcgctcggccacaaggtactcctcatcccaccgcaatacgtcaaaccgtatgtcaaacgcggcaagaacgaccgtatcgacgccgaagcgatctgcgaggccgccggccgacccggcatgcacttcgttccggtgaaatccgccgaacagcgagctcaggggatggtgttgaaagtgcgcgataccctggttggtcagcgtaccgcgctggtcaacacgttgcgcggccacgccaccgaattcggcatcatcgcggccaagggtctcagcaacatcgctcctttgcttgagaagattgaagccgagaccaccatcccacccgaggccagagagatgatggccctgctcggcgaggagatcgctcgcctcgacgcacggctgaaagagatggatacctacctcaaacgaacccacaacgccaacccggacagcaaacggcgggcgaccgcgccgggcattggttcgaccaccgcgctgacggtcgtgaccactgtcgatccggacgcgtttgaatcaggccgccacttctcggcctgggtgggactgacgccgaaggaacattcgacgggcggcaagccgcggatgggcggcatcagccgcgcggggaatgaacggttgcgccaactgttcgtcctcggcgccatgtcggtcatcaaggccgccgtgcgagccggcggtcaatgcaccgacgcatggctgttggacatgttgcggcgcaagccgcgcaaggtcgtggctgtggcgctggccaacaaaatggcccgtcgatgctgggcgatgctgaagcgcggcgaagcctaccagccggcccggcacgcccgctcgatccgcttcgtggctcaagcgtgacgtaacgattgggagtggaaaccatgccccgtccaacgataggcgataccgccatgaccgatgccgaacggcaggcgcgctatcgcgccacgcgcgcgacgggccagcccgtcatccgcacgcgccgtccggttgatcgccgaggcttgctccagagatggaacgatacgagggctgaattcaccgacctgcagggcggtacgccgcctggttggaaagcctgccggacaatcaacaagacagcgcgaccgctgatgcgttgcgagcgattgtcgaactcgatctcgacgagttgctggcgatcgaaccgccacgcggcttcgggcgggattgaacaaccagatggcccgtacggcatgggccacgatgacgcgtggcaagagcataccggcagcagccggtcaccgcccgaaccacgcgtcgatgccagggtgtgagagcggaacgagatgaccatcggtcgaaccgacgatctggagaacccgtcaggggctacggctttcgaagccgcaagcttgtttggggctggatcgcggatcccatctgggccagcggccatgctgccgcgccaacaggccggacacatgatcgcaatcgacccgatcgtcggatttctcgatttttctcttgcatccaaggggccgtccacaca

SEQ ID NO: 7456 - DNA, 1394 bp, unidentified
  source 1..1394: mol_type = unassigned DNA; note = element_b90dd4c
  misc_feature 1..3: note = core
  misc_feature 4..80: note = LE
  misc_feature 81..929: note = CDS
  misc_feature 930..1394: note = RE
  misc_feature 1114..1381: note = bridgeRNA
tgatgtggtggatggcgccctccgacggcatcaagtgtgccagagtaggttgttgcaaacatttagaggagccacccaccatgggagagattaagacgatcggcctcgatatcgcaaagaatgttttccaggttcacgggatcgacgcggatgggcatgtcgtgctgcgcaagtcgttgcggcgcagccagatgccccccttcttcgagaagcttgccccttgcctgattggcatagaagcctgcgcgacagcccaccactgggcgcgcactctgatggaggccggccatgaggtgcggctgatcccgccgggctatatcaaaccgtatcttcggcggcaaaagaacgacgcagccgatgcagccgccatctgcgaagccgtgacacgaccgtcgatgcggttcgttccggtgaagagccgggatcagcaggcgacgttgatgctgcacagcgcccgcgagctattgatttcgcaacggaccgccctcatcaatgccctgcgtggccacttcgccgagcttggcattgtcgtaccgcagggtgcccgcaatgtccggcagctcatcgccctcctcgaagacgagcaacacagtccgcaggccgtccgcgttgccctcatgcccttggcaatggcattgacagagatggagacgcaggtcgccaagctcgacaaggcgatccttgccacccatcgcaacgacgacgtcagcatccggcttgctaccgtgcccggaataggccctgtcattgcgacatgtctttcggccagcgtctcggatgtaaagctgtttgagggtgggcgtgagttcgcggcctggctgggcctcgtttccaggcagcattcaaccggaggaaagccaagacaatgggtaataggcacctacgcaagctcctcgtggttggggctcatgcggtactttaccgcatgaagaagggaacaagtgatacgcctttggcgaactgggcccgatgcctgctgtcgaaaaagtccttcaagcttgtcgcggttgcgctcgccaacaaaatcgcccgcatcgcatgggcgatcatgacatggggcgtgaacttccagccaggctacgccaccggcaacaacgctaaggtcgcagcgtcggcctgaatcacgacagcgccctttcgggcaaaacagttggcggagtgacgatggtatgatgtgacagcgaaagcggaatggaccgcacgaactgaagaacccgcggcgatgtcttgcgcaacaacagcgcgataacgtgatagggatcggctcaagcggacaacatcagggccagcggtcgtatcgtgccgcacaaacaggccggagacatgactgcacccgacccgcaaagctcaatcttcatccaaaatcacattgccaaacgggcgccatccagaca

SEQ ID NO: 7457 - DNA, 1403 bp, unidentified
  source 1..1403: mol_type = unassigned DNA; note = element_b920aa3
  misc_feature 1..2: note = core
  misc_feature 3..51: note = LE
  misc_feature 52..1143: note = CDS
  misc_feature 1144..1403: note = RE
  misc_feature 1119..1391: note = bridgeRNA
tgatgatgtgaccgccccccgacggcatcgatgtgccaaggtgggtctgcgatgatccacaaaggaggacggtcatgtcggagattatcacggtcgggctcgatccgttggctgacaggcgaatgcgtagcaatcgccgataggctggcgaagaatgtatttcagttgcatggggccgatggcactggccatgccgtcctgcgcaagaggttgcggcgggctcaggttctggagttcttcagtcagcttccgtcctgtgtcgtcgcgatggaggcctgtggcggcgctcatttctgggggcgcgagatcggcaagctgggacatgaggtgcggcttatccctcccgcctacgtgaagccctttgtgaagcgtcagaaaaacgatgcggccgatgccgaggcgatctgcgaggccgcgctgcgtccgacgatgcgcttcgtgcctgtgatgagcgaaaagacgcagggcgcggcgatggtgtttcgcgtgcgcgagcttctgatccggcagcggacccaggccatcaatgcactgcgagggcatttgagcgagttcggacaggtcgtgccacagggggccgcgaatgcatcgaagttgattgcaatcgtcgaagacccgacaagcggcttgccagccgatgccattcccacgctcaagaccttgatcgcggcactcgcgcacctggaagcagagatcaaggagctcgatgcggagatcgcccgtcgcgccaaggagaacgacctggcgcggcgactgatgacggtgcccggtatcggcccgcttatcgcgacggccatagcgacccttgcgccgccgcccgaaactttccgcaaggctcgagactttgcggcctggctcgggctcacgccccgccagcattcaactggcggcaagcagcggctgggggccacgacgaagatgagcgagcgatccctgagacgcctcctgatcattggagccaacagcgtcatcatcaagcggcatacccatgctgcagcccagccaggcacatggctgggcgggatgctgtcacgcaagccaccaatgctggtgcgggtggcgctggcgaacaagatggcgcgcatcgtctgggccctgatggcccgcggtggcgtttaccagtctccggccgtggcggcataagcccgctgtaggtcgcgagaacgtcggagcacaagagggcaaggagaggtttggcgcaacagtcgtgagacgggatcgggagaaccagtgcgcaacagagtgccatcgagcacgcggctttgatctggacccgaccttcgaacaccatacgggcccgcggcatctggaacgccgcatcatgaggccggatacatgtcagcacccggtgacgcgccaaaatcagctctgaagtttcctcttgcgcaaggggcggttataca

SEQ ID NO: 7458 - DNA, 1546 bp, unidentified
  source 1..1546: mol_type = unassigned DNA; note = element_b921965
  misc_feature 1..2: note = core
  misc_feature 3..247: note = LE
  misc_feature 248..1306: note = CDS
  misc_feature 1307..1546: note = RE
  misc_feature 14..215: note = bridgeRNA
ctcgtattataaagtagtagttattagagtccctctccaaggacaaaatgctacaatagacaaggtgctgtggattggtttaaacctcctaccgcaagacggtttcggaaaggctccaaccacggctctttgtttttagtgttaatcagttagataccgccagacggtttatatagaacgaggttacatagcaaagaggtgtggctctaagcagcactgtaaaataaaacgccggaggtaaaaagaaatgatttttgttggtatcgatgttgcaaaggacaagcacgattgctttatcctcaactcggaaggaacggtcttggcagatgtatttaccattgccaataaccgcatcggttttgagacgcttctttcaagaatccaaagctgttcccaaggtgaaagcaaaataaaagtagggcttgaagccacaggacattacagctacaatctgctggggtttcttttagacagcggcctggcaacctatgtcattaaccctctgcacacgaacctctaccggaaaagtctcagcctgcgaagaaccaaaacagatcggatagacgcgcgtaccattgcaatgatgctcatgtctgatgtggacctcaagtcctactcaaatacagcataccacaatgaagagctaaagtcactaaccagatacagatttgataaggtaaaagagcgcgccaagctgaaaagctccgttgcgcggttagtgaatattctgtttccggagctcgaaaagctggtctcaagcctgcacatcgctgttgtatacgcactgctgagcaactatccaggtgcaagctatatcgcaaacgctaatactgaagaactcgctgagactctttgcaccgcctctaaaggtcgttataccaagtctaaaaccgcgaaaatccaagtagccgcaggggtctccattggctcgaaaatgcctgctaagtctatggagttgaaacacacgattgctctcatccgcgagctggacaaagaaatttctgaggtagaatccgcaattgacaagattacatctcagatggattctcccatctttacaatccccggtattggccgacatatgggtgcaatgattcttgctgaagttggagatttttccaactttgcaagcgcagacaagttgctggcttatgctggactctctccatctacatatcagtcagggcaactgcaaaactgttatgctcacatggaaaagcgtggctccagatatttgcgatatgctctttttcaatgccgccaaatatgtttgcctttggtgtcctacattctcggcctatcttgaaaagaagcgttctgagggaaagcattacaatgttgccatctctcatgctgctaaaaagctggtaaggcttatttttgctatgcagcgttctgggaaagccttcttagctgattattaagcgtgcgattttatacggagcgagtatccgacaacggatgctcttgtttgctataccaattttcaccaccttaaaatttctctcgaaaattttgttttggggcttgacttttaatagttagt

SEQ ID NO: 7459 - DNA, 1380 bp, unidentified
  source 1..1380: mol_type = unassigned DNA; note = element_b92ba61
  misc_feature 1..2: note = core
  misc_feature 3..86: note = LE
  misc_feature 87..1118: note = CDS
  misc_feature 1119..1380: note = RE
  misc_feature 1149..1368: note = bridgeRNA
tgatgctgtggacggctcctccaccggcacgcaagtgccatggatgtgggtgctgttgatgctcccacgattcggaggagccaatcatgcaaacggtcacaaccatcggtctcgatatcgcaaagtcggtctttcaggtgcacggcatcgacgcagaaggcaaggtactcatccgccgtcagctgaagcgccgctatgtcctggcgttcttcgagaagctgccgccgtgcctggttgggatcgaggcctgcgccacgtcgcatcattggtcgcgcgagctcaaggcgtttggccataatgtgcgcttgatgccgccggcctacgtgaagccttacgtcaagcgacagaagaacgatgccgctgatgctgaggccatctgtgaagcagtgaccagggccaacatgcggtttgtcgagaccaagacgtccgagcagcagagctgcctgatgctccatcgcacacgccagctgttcgtccggcagcagacctcggtgatcaacgccattcgcgcccacatggccgagttcgggatcgtagccccggtgggacggaagggtattgaacaactgcttgcggtcgtcgcggatgccattgacgcccgtgtgcctgaggttgcacgggcgtgcatcgctgcccttggggcgcagctgcggatgttaaaggcgcagatcctggagtttgaccgccagatcatggcttggcaccgatccaatgagacgagcaggcggctcgatgccattcctggcattggtccggcactggctaccgccctggtcgcaagcgtcgccaatccaaaggccttccgatcggggcggaacttctcagcctggatagggctcgtgcctaagcagcactcaagcgggggcaaggacaagctcggcagcatcagcaagcaaggcgatcgctatctacgcagcctgttcaccgccggcgcacttgccgtcatccgttatgccaagatccatggcacaaagcatcggccttggctcacgtcattgctggcgcggaggccgaccaaggtcgccgccatcgcgctcgccaacaagatcgccagaatggcttgggccatgatggcaaagggcgagtgctacaaggaacccgccgcacttgcggcgtgaacgagatcacgctggccatccggcatgacgagaaggttgggagggcgaacagcacgtaatgcagagccggtcgatccggcgatcaggacaacccacatgtgccagtgcatctatagaatgcgggctgttgaccgggacctgatccgcggagggcattatggccagcggtcatgcgaaccgcattaacaggccgaacacatggctgcaccgaccaatgctgcgacgtggcgttttgacttgccaaccgggagccgtccacaca

SEQ ID NO: 7460 - DNA, 1375 bp, unidentified
  source 1..1375: mol_type = unassigned DNA; note = element_b92bb86
  misc_feature 1..3: note = core
  misc_feature 4..86: note = LE
  misc_feature 87..1109: note = CDS
  misc_feature 1110..1375: note = RE
  misc_feature 1110..1361: note = bridgeRNA
tgatggggtggacggcccctgtgtccggcgtctgagcgccataggatggtcgttgttgtagcaacccccatcaggagccgtccgcgatgcagattaccacgatcggtctcgatctcgccaagagcatcttccaggtccacggcatcgatgccagcggtcagacagcggttcgcaagaagctacgccgcgctgaggttttaaggtttttccaagcactcccaccgtgtttggtcggcatggaggcgtgtgcgacggcccattattgggcgcgcgagatcggcgcatgtgggcacgacgtgcggctgatggcgccgagctacgtgaaggcttatctccgccgccagaagaacgatgctgctgacgccgaagccatctgcgaagcggtgcagcgcccgaccatgcggttcgtgccggtcaagagcgccgagcggcagggcgtgcttgtgcttcaccgaacgcgcgagctgctggtccgacatcggaccatgctgatcaacgccatccgcggccactgcgccgagttcggaatcgttgctccacagggagcgcgtcgagcagtcgagttgatcgagcatattcgacagaccgaggccggcgacatttcgcagcttgtccgcgccagcctgctgactttggcggatcagctcgacgccatcgccgttcaaatccacgccctcgaacggcgtctgctggtctggcatcgacaggatcaggacagccagcggctggcgacgatccctggcgtcggaataatcagcgccacggcgctcgccgcttccgtgcccgaccctaagctgtttcgctcaggtcgggagttcgcagccttcctaggtttggttccgcgccagaactcgtctggcggcaaggcgcggctgggacgcatttcaaagatgggcgatcggtacttgcgcaagcttctggtggtcggggccacctcggtgatccgccgagcccgaacaggagccttggccgcagcgccctggattcgatccctgctcgaacgcaggcccgcccgcgttgtcaccgtcgccatggccaacaagaccgcgcggatcgtctgggccgtgttggctcgcggtgaggtctaccgcgcgccggcctcagcttaacccagatcgctgcggccctccgccgcggccccagactgtaagggtgcaatcggaatgatgacgatctgagcgcggccgcagaccaggacaacccgaggtgctgtcggagcctgagtgctcgatggactgaaagggaccaggtcagcggactccatcagggccagcggccatgagcgccgcaccagcaggccggacagatgaccgcaccccgacagatcagcagatcaatccattttcactcttgcggggccggggccgtccacaga

SEQ ID NO: 7461 - DNA, 1198 bp, unidentified
  source 1..1198: mol_type = unassigned DNA; note = element_b92d489
  misc_feature 1..4: note = core
  misc_feature 5..212: note = LE
  misc_feature 213..1196: note = CDS
  misc_feature 1197..1198: note = RE
  misc_feature 26..190: note = bridgeRNA
atccattaggtttgttttatattgtaaaagatatcgcaagtcagaggtgatccatcttcaatcctaggtttgcagacctatttagggatacggtcctctgactttgctatgcttcgggcttaaatagaaattcaggcattagggcctattatcatggatataagttgtaagcataactgcgatactttttaaacaactcaaaattaaacattatggaacagttttctttttttacaggcattgatgtgtcgaaattatggttggatattgcagtattgaaccccaccgatggacttgttcatcaaagcagaatcaataacaacgtgaaggcgatcaggagttttctaaagggattaaagaaacagctaaaggccgaaataactgaacatctcttttgcatggagcacaccggtaaatatggccatgcttttcttgctgcatctgttctcgaaaaagtaagagtttgggtagaacttcctgtccagattaaaaggagccagggacttgtcaggggaaaaacagatcagtgggatgctgttcggattgcgaaatatgcacatcggtttgcagataaggctgtcttctgggtgcctgccgacaaaaccattcaggatatgaaagatcttcaggttaaaaggagccaattggtaaaaacgtactcgcagctaagtcaggaaaacaagaacgatccgcttttcaaaaaaccattgcaggctataaaacaaggcatacaagcaattgaattaaaaatggaacaattgatggaagacaaccaggtagcccgccaacaatacgacctgcttacctcagtaccgggtattggcaaacaaactgcaatggctttaattgttgttaccaatggttttaccaggctgacagacagcaggaaactaagctgttatagcggcctggcaccattcccatatagctcagggagctctgttaaaggcagaaccaaagtctctaaaatgggcgacatgaagctaaaggtactgttaaatctttctgcatggaatgccatcagagcaatacctgctttgaaagattacttcaaaaggaaagtcggtgaaggcaagcataaaatgtctgtcattaatgctgtaagaaataagttacttgctttggctttagctgtggtcaaaagaaatagtccttttatcaaagaatatacctcaaacctcttgcttttgccatagaa

SEQ ID NO: 7462 - DNA, 1626 bp, unidentified
  source 1..1626: mol_type = unassigned DNA; note = element_b930b3c
  misc_feature 1..2: note = core
  misc_feature 3..350: note = LE
  misc_feature 351..1514: note = CDS
  misc_feature 1515..1626: note = RE
  misc_feature 100..326: note = bridgeRNA
cttgtatgatatagtaaactatttaatcatacattcctttcatttatttacgctctcttttatagtcgttttggaaatttgaaagcggaaggagcgtagcggatgaagctttcaaatttcgctcggcttgttgcctatatattaacttatcctatataatgtaattaggcactgtggactttttatttttttctatagctttgactattcgaaggagtgtattgccacagttttatcttaattatttatagttggataagttttaaaacttttatctcccgcaagtctatgatgataaaactaagtggatcaaagcagttgcccaaatattacttaaaggatgtggtttaatgatttatgttggcattgatattgccaagcaaaagcactttgccgctgcaatgaccgctgatggcgaagtattagttccaccttttggttttactaatgatgcggatggattcaatacctttctttcaaagattaaatcctttgataaaacagatattttaattggtcttgaatcaactgctcattatggcgaaaaccttatttgttatctttttagtcttggttatcgtatttctgtgattaacccgattcaaacatcaactttacgaaaaaccaatatccgcaaaactaaaactgataaggtagattgcctgttaataatcaagtcaatgattgtaaacaaaacaaggctttattcaaaatctgatattgactctcttcgccttaaaagtctttgccgctttagggaaaaattaaaaaaatctaaaactaaacttaaaattcaacttgttacttatgttgatgttatttttcctgaattgcagtattttttcaaatccggtatccatattaatacatgctacatgcttttaatgaagcatccttctccagatgaaatcgctgctttacaccttacatacttggttaatcttcttcagaaagcttcccacggccgtttcggtaaagaagaagctatcgctttaaaaagtctggcaaaatcatctgtgggtactggtaataccgctgtttctattcaaataacccaatctatcactcaaattgaattattggaacagcaaatgaatattattgatgaaaacattgaatcaattatgcttgaaatggattctataatcatgactatcccaggaatcggttctcttaatggtgctatgattcttggtgaaatcggtgatatctcaagattctcgaatccttcaaagctgttagcttatgctggcttagatcctactgttaatcaatccggtaagtttactgctaaaagtaccaaaatgtcaaaacgaggctctaaattgcttcgctatgctttaattaatgccgcctggaatgtttcccttaacaacaagacatttgatgattactataacttaaagcgttctcaagggaataaccactatgcagccctcggtcatgtggctcataaattggttcgtgttatctttaagatacttaaagataatgttgcttttaacttagattagtactcttgtttttttgtctatttcagtaggcttattttgttatactcatttttcttcccactataattatttaatttatttgtcatttttttcttgacaattcatagttggt

SEQ ID NO: 7463 - DNA, 1612 bp, unidentified
  source 1..1612: mol_type = unassigned DNA; note = element_b93129f
  misc_feature 1..2: note = core
  misc_feature 3..289: note = LE
  misc_feature 290..1456: note = CDS
  misc_feature 1457..1612: note = RE
  misc_feature 64..260: note = bridgeRNA
ctggtatatataaattagctcattcaactgagtaatctgcatataccttttcctttctacctgatctagtattcatcaggattttgtttatctgttagaattgaaattgtggatgtgtacttgagcgatctcctagaggctttgacttcataagaaagaatcttgccacttcctaatattcagaactgcgatcagttggatgagcctttgagttcgtattaccaggatcagtcgaatactttgcaagtggttcatccattcacgcatatatagaaaggacggtgcttctatgcgctattttatcggtatcgatatcagtaaattcaaacatacggctgctgtaattgatcaggatggtgtcgttcatatcgaaccttttgactttgacaatgacatcatcgggttcaattctttttttacttctgtttcttcctttattcaggatgatttcatcatcggcatggaagatactgggcactatgccgacaatcttcgaaagtttctcttatccaagaatcttaaggttgccatgttcaatccattggctaccaatcacatccgtttagccttcaatctggctaagaatgataggctggattctcttacaattgcttcagctttagctatgcctagactttatagaatcatcgaagatgagcattttacctatcatgagatccgtgaactgtcgcgttatcatcaaagcctttcgaaaacaatgaatcgctataagaatcgtcttcagaagtttattgatatcgctttccctgaattcaataaactttttgatacaaaatactcaaaaacttatttaaagattcttaaagatttccaaagtgctcagaatattgccaatacagatatacggacacttagaaaagctcttttatcaaaaggaagatgcgtttccattacggctgaggaactgaaatctgctgccagggattctattggtcattcccatatagcacttgatctggagatacagcagacagttgaaatgatcgaaaagattgattccaatctgaatatagtggataaaaaaatagaagaattcagtctgcagctaaactctcctatccttgccatccctggtatctcacacatatcagcgatgtccatcctgtccgaacttggtgacttcacccagtatgaaagtgctaagaaggtcatcaagctgtcaggaaccaatccatatatctatgaatctggtacctatagtatgccacgaacaaggctagaaaaaaagggatcaaaatacttaagatgcactttatacaacatcatccagaccgtcatcaacaacaatccagtattcaaggattattatgacagaaagatatctcaaggaaaatcgcatcgatgtgcacaggggcattgcgtgagaaaactactcagagtcatctatcatatcctgacaactggatgtgaatttgatccgtctcttttacgataacccgtctatacaatcaatcgtataaaaaggctattttccgatagttctttttagtgtacacatatttacaatttcaaagatcaatacaacctttaaagtctagttttatatttcatactttttcatcgcttagtacttgactttatatatagttgt

SEQ ID NO: 7464 - DNA, 1394 bp, unidentified
  source 1..1394: mol_type = unassigned DNA; note = element_b93784e
  misc_feature 1..2: note = core
  misc_feature 3..86: note = LE
  misc_feature 87..1118: note = CDS
  misc_feature 1119..1394: note = RE
  misc_feature 1162..1382: note = bridgeRNA
tgatgctgtggacggctcctccaccggcacatgagtgccatgaatgtgggtgctgttaaggcccccaccatttggaggagccaaacatgcaagcgatcacgactatcggtctcgatatcgccaagtcagtgttccaagtccacgccgttgatgccgctggccaggtgatcatccgccggcagttgaagcgtcgctctgtcctggcgttcttccagaatctgccaccatgcctcgtgggcatcgaggcctgcgcctcgtcgcatcattggtcacgcgagatcaaggcgcttggccataccgtgcggctgatgccaccggcctacgtgaagccctacgtcaaacggcagaagaacgacgctactgacgctgaggcgatctgcgaagccgtcgccagagccaatatgcggttcgtgccaacgaagacacccgagcagcagagctgcctgatgctccatcgcacgcgccatctgttcattcggcaacagaccgcggtgatcaatgcgatccgggctcacctcgccgagcttgggatcatcgcgccggttggccgcaagggagttgaggaactgctcgatgtagtcgctgatcgaagcgataagcgtgtccctgaggtcgcacgcgcgtgtattgccgctctcggagcacaactgcgcagactcaaggaacagattctggagttcgaccggatgattttggcctggcaccgttccaatgagacgagcaggcggctcgatgcgatccccggcgtcggtccgatgctcgccactgctctagtcgccggcgtcgctgatccaaaggccttccgatcggggcgcaacttctcagcctggatcggactggtgccgaagcagcactcaagcgggggcaaggacaagctcggcagtatcagcaaacagggtgaccgctatctgcgcggcctgttcgtggctggcgcgctcgccgtcatccgctatgccaagatccacggcaccaagcatcggccctggctcacggcattgttggcgcggcgaccggttaaggtcgccgccatcgcattagctaacaagattgcgcggatggcctgggccatgatggccagaggcgaacgttacaggcaacccgtcgcgcttgcggcgtaaacttgcggcgtaaacgagatcgcgtcggacatccggcgtgatgtgaaggttggaaagggcgaacagcacgtaatgcagagccggtcgatccggcgatcaggacaacccacatgtgccagcgcattgtcgaatgcgtgcttttgaacgggacctgatccgcggagggcattatggccagcggtcatgtgaaccgcacttaaaggccgaacacatggctgcaccgaccaaggctgcaaacgtgaaaaaagctcttgccaactcggagccgtccacaca

SEQ ID NO: 7465 - DNA, 1416 bp, unidentified
  source 1..1416: mol_type = unassigned DNA; note = element_b93e54f
  misc_feature 1..3: note = core
  misc_feature 4..135: note = LE
  misc_feature 136..1152: note = CDS
  misc_feature 1153..1416: note = RE
  misc_feature 1173..1414: note = bridgeRNA
agatggtatggacgcctccctcccgcgtcggataggagaggcattaggaacggcggagccctcgctatacccgacggcatcagagtgccaaagtggtggtgtcaaaacgaccactgagggtaaggagggctcgaaatgaagactacgacgtttggcgtggacctggcaaagcgggtctttcaggtgcactgggtagacatggacacaggcgagatcaaccgtcgtcagctcaagcgcgaacagctcgtgacgttcttcgcgaagcaggcgcccgcgctcatcgcgatggaagcgtgcggcagcgcccattactgggcacgccgcttcgcgagcttcggtcatcaagtccggctcattgcgccgtcattcgtccgaccgtttgtgaagcgcaacaagaccgatgtggcagacgcgcaggcgatctgggaagctgcacaacggccggagatgcgtttcgtcgctgtgaagagcgaagcgcagcaagcggtgctgacgctgcaccgcgtgcgcgcacaactgctcaagatgcgtcgcatgcagattaaccagacgcacggcttgctgtacgagtttggcgcggcagtgcatcgcggctcgcacagcatgagcgacgcggcccgcatgctcggcgagctggccgacgctttgcccgccatggtcatcgacacgcttcgcgaacaactgcagcgtatcgaagcgctcacgcgcgacatccgtgccattgaacaccggctcgcagcatggttgcgccaggacgaaggggccacgcggctcgccgccattccgggtgtgggcctgctcacggcgactgccgccattgccaccatcggcgaggcgagtacgtttcgctccgggcgcgagttcgccgcgttcctcggtttggtgccacggcaaagcggcacgggaggtcgcgtcaagctgctgggcatcagcaaaagaggcgatgtgtacttgcgtaccttgctgattcacggcgcgcgcgcagtgctctcgcatccgaagcacctgagcgacgcgctgcaacgtttgctcgcgcgacgaccgttcaatgtagtggtcgtcgcgctcgcaaacaaaacggcacgcacgatctgggcgctgcttgcccacgctcgaacgtaccagtctggttacgtggctcacgctgcgtagaagatcgactaactatggagacgtggtcgctaataggttgcgcaggttgatatacatgtgatggcgaaacaggtcggaccgcggggaagcaaacctgaattctgtcttgtccttcgaggactcgcaggagatgaggacttccccggcagattccatcagggccagcggatcaccatccgcaccacaggccggatataagtctgcaacctcatcctgtccgtcacacaccgaatatcacctggcaaaccgggaggcgtccatata

SEQ ID NO: 7466 - DNA, 1169 bp, unidentified
  source 1..1169: mol_type = unassigned DNA; note = element_b94165d
  misc_feature 1..2: note = core
  misc_feature 3..218: note = LE
  misc_feature 219..1157: note = CDS
  misc_feature 1158..1169: note = RE
  misc_feature 12..224: note = bridgeRNA
cttgtcttatgattttggagcttcttcgtgagataaggaagcgccggagaggacggccatccttctccggcgatgggggacggatcgtggaaatgcaggccgccattctgacgaatgccgggccgagctagagtatgatcgcccccatcttttccaatcgtcctgaacggatacccgagctttgaggctcggatgacaagcatgggagatgagaaaagatgacggatattaccatcggcgcggacatctcgaaagaccatgtcgatctgcatatgttgccggagggccgaacgttgaaggttgccaatgaccgcaagggatttgcagctattctcaaatggatcggctcgaaggccgtgcaacgcatcgtctacgaaccgaccggtccctaccacaaagccttcgagcggttcatggtcgtgcagggactgccgctctccaaggtcaatccccgccttgcccggcgtttctgcgaagccaccggtcgtctggccaagacggacaggatcgacgcctgtctactggtccgttacggtgcacttctggagacgcgcatccttcaggccaacacgcaagtcctcaatgacttgaaagagctgcatacggcaagactggccctcatcaaggacaggacagccgcgaagaacagggccaagaccctttccagtccgctcctgaagaaacacaatgtagacaggctcaggcagatcgaacaccagatcacggccatcgacggtgccatcacggctctgattgcaaaggacccgtccctcaaggccaggttcgatatcctcgtttcgatcccaggtgtgtcgcagatcacaggctttacgcttctcatcgacatgcccgaactgggccagatcgacgagaaggccgcagccgcgctcgcaggtcttgccccgatgaaccggcagtcaggacgatggaccgggcgcgctttcattaccggcggaagggccatcgtccgcaaagcgctctacatgccggctctcgtcgcatcccgcttcaacgaagacctcaaggccaaatacgaccaactcaaagccgcaggaaagccgcccaaggtcgccataacagccatcatgcgaaagctcatcgtcctggcgaacgctctgctccgcaaaaaccagaaatggaccccaaaacacccttgatcaaaacggata

SEQ ID NO: 7467 - DNA, 1507 bp, unidentified
  source 1..1507: mol_type = unassigned DNA; note = element_b942663
  misc_feature 1..2: note = core
  misc_feature 3..237: note = LE
  misc_feature 238..1320: note = CDS
  misc_feature 1321..1507: note = RE
  misc_feature 17..183: note = bridgeRNA
cttgtatgttgcgttcagaggcgtgaggatgatttcacgtttcggcggcaaggccgttcgtcccataggccaacgcgagttgagcctgtcccgtagatcggccgccgcccctctctttgacgccgtggagaatcgaaggccttttgagcctgcatgttcaaggtcggcggctggagtttagctcgttggcgcgggcaggggcggctgctgaagctcatcctagcgccaaggaggcttatgagcaagcaaatcgtttctatcgtcaggccggttctttccgacaacaagctaacggattcccgtcaggcaagcgtgttttgcggcatcgacgtcagtgcggaaacgctggccgcggcggtgatcgaggcgggtcggcctatggagcagcgggagttttccaacacggccagcgggcacaagaggctgattgcatggctgggcaggagcaaggcactggcgcgggtgtcgatggaggccaccggtatttattcgatggacctggcgctggcgctggatgcggcggaggggatcgaagttgccgtgctgaaccccaaacgggctcatgattttgccaagtcgatgatgcggcgctcgaagaccgaccgggccgacgcggcggtgctggctgagttcagcctgcgcatggagtttgtagcctggcagcggcccagcctgagtgcgctgagcctgcgctcggtcacccgctacaccgaggcgctgagtcgggagcacacgcggggcctcaaccggctgcacaccgcgcaaggatcgaggggcaccccgcgctgcgtggtggaggatctgaagcgagcgttggccacgctcaagcggcgcatcgtgaagcagcggcgcgcggcccgcaggatgatcgacagcgacgcgcagacgcgcgagcagttccggctgctactcggcatgccgggggtcggggagatcagcgcgttgcagatactgggcgagctggtgctgctggcgccggatctgaaggcgcggcagtgggtggcgcgtagcggactggacccggtgcatgaggattcgggcagctcggtgcataagccggcgcacatcagccgcgcaggcagccgccacctgcgccgcgcgcttttcatgccggcgctggccgcggtgcgctgcgatccgcatttgaaggcgttctacgaaactctgctggcgcggcacaaaagcaagttgcaggcgctgatcgccgtggcgcgcaagatgctgcacgccatctacggcgttttcaagagtggacagccgtatgaaggcaaactgctgtttccgaatatccggttggaggtagaatcaatcgccgggtgaaacggaagcaggctctgctgggaagcaaccgtgccgagggataacccgacgggctcatcctgacgatgaaccgaaggggcgcgcaggggaagagattgctcgccccaaaatcatcggagggatagaccccgatgccttgaaaatccaatgcaggctccgaaaaaaggcttgcttttcaacagagaat

SEQ ID NO: 7468 - DNA, 1554 bp, unidentified
  source 1..1554: mol_type = unassigned DNA; note = element_b9469f2
  misc_feature 1..2: note = core
  misc_feature 3..260: note = LE
  misc_feature 261..1424: note = CDS
  misc_feature 1425..1554: note = RE
  misc_feature 3..239: note = bridgeRNA
cttgtatgataattacagaagcaaattaccacttttcctttctttttatttgtggcttaatacattcagatacagtgggactttttattttttctgtagcttcgactactctataggagtgtattgccgctacctttatctgaattgtttataactggatgtgccggagcttgtctcctgagtacttatatcaatcaagtctacgatgataatcgttggtggatgccacagtattaggaaccctaaggaggtaaccttctatgtattacgttggcatcgatgtagccaaactgaaccactttgcctctgtcttatcgtcagatggtgaagtactcgtcaagccgttcaaattcacaaataacaatgatggcttctgtaagctgatctctgcactcagtcagtttgagcgcggcaacctcatcattggtcttgagtcaacggcacattatgctgataacctggtcgaattccttgtatctaatcactaccaggtctgtgttatcaacccgatccagacttccacaatgagaaagaacaacatccggaagactaaaactgataaggttgatacactcgttatcgctaaaactttaatgacacagcctcacagggtactggagcaggaagatattgatctcatgcaccttaagtaccttggccgtacacggcagaatctcgtaaaagagaggacccgtaagaagatccagctcactgcttatgttgacagggtatttccggaattacagtacttttttaaatccggtctgcatcagaaagcagtctacgcacttctgaaagaggctccaaccgcggaacttgtggcttccatgaacctgacccatctcacacacctgatagaagtctcctcacatggtcacttcacaaaagatcaggcaagagaatttagagttctggcacagaagtctggcggtttcaacgacaaagccctatctattgaagtaactcagtctgtggagcagatagagttactggataggcaaatcaatgaaacagaatcattaatgactgagattatgctcggccttgattctgttattatgactatccctggcatcggatatattaatggagggatgatacttggcgagattgagaatatccatcggttcgccaagcctaaacagctgcttgcatttgcaggtcttgatccatctgtacatcagtctggtaatttcaacgccagtcatacgaggatgtcaaagcgtggatctcgcgttcttaggtatgccctgataaatgcagcccacaatggagtaaagaataattcgactttcaaggcttactacaacgccaagatggccgaaggccggtcacactataatgcacttggtcactgtgccggcaagctcgttcgtgtcatccataagatgcttacggatgatgtggcattcaatcttgagtgagttctgactcaagttcatagtagacttttgaaaaaacacccttagggagctttattaaagttaccctaaaaagccgcaatgaaagaaatgtaattttgccctaatttatacttgacttttcatagctggt

SEQ ID NO: 7469 - DNA, 1488 bp, unidentified
  source 1..1488: mol_type = unassigned DNA; note = element_b952d48
  misc_feature 1..4: note = core
  misc_feature 5..314: note = LE
  misc_feature 315..1472: note = CDS
  misc_feature 1473..1488: note = RE
  misc_feature 28..214: note = bridgeRNA
gtcactagggcaccatcctttctgcggatgtccgatgggcgttcgttgaagggactcggtgggggccgaggtgacggctagcgtcggtcgccccctgagggcctgcatgacaccgctgccctcggtcctcccggagtcgcagaccggcatcagggagacgcgccgcagagcgccagttagtgaccgtccggtagccgattccggggccttaccgggtcgtcgctgccaacctgaggagttctgttgtctgaggaaaccccgaagtcgtctacgtcggcctggactgggccgctgtcgttcatgctgtgtgcgtgatgtccgcggccgggaaagtggtgggccagttcatgatcgaacacactgccgacggcatcgcgacgctgatccaccggctcgccaagcatggtgatcccgaactcgtgcaggtcgggatcgagcgccccaacgggcgcctggtcgacctgctgctcgaggccggacacccggtcatcccggtctcgccgaacgcgatcaagacctggcgtgagggcgaggtcgtctctggagcgaagtctgataccggcgatgcgatggtgatcgcggagtacctgcggttgcgtcaccaccgactggccccggtccagccctacagcagcgagaccaaggcgctgcgcacggtggtccgcacccgcgacgacatcgtcgagatgcgcgtggccgccaccaaccagctcagcgcattgctcgacgacttctggccaggcgccaaggcggtcttcgccgacgtggagtccccgatcagcctggcgttcctgcgccgctaccccaccgccgtggcagctgcccacctcggccagaagcgcatggcggcgttcctgaccaagcacggctactccggccgccgtcccgctagcgtcctgctcgcacgactccgccgcgcgcccgctggcagcaaagacccggtcctgaccgaggccgtccacgatgccgttctcgcgctggtcaccgtgctcgaagcgctcaacaccgccgggaagaacctcgaccggtccgtggtcgcccacctcggggagcacccggacgccgagatcttcacgtcgctgccaaggtcgggtcagatcaacgccgcccaggtactcgccgagtggggcgattcccgcgcagcctacgacggacccgacgccgtcgccgccctcgccggcgtcaccccagtcaccaaagcctccggcaaacaacacgccgtgcacttccgctgggcctgcaacaagcgcttccgcaaggccatcacgaccctcgccgacaacagccggcacgagagtccctgggctgcgcacgtctacgcccaagcgcgagcccgaggacacgatcatccccacgcagtccgcatccttgcccgtgcctggatccgtgtcatctaccgctgctggcacaccagtcagccctacgacaccacccaccacggcggagcgcaaaggatgccgatcgcggcctgaggttgactcaggaagt

SEQ ID NO: 7470 - DNA, 1459 bp, unidentified
  source 1..1459: mol_type = unassigned DNA; note = element_b952ea7
  misc_feature 1..2: note = core
  misc_feature 3..242: note = LE
  misc_feature 243..1442: note = CDS
  misc_feature 1443..1459: note = RE
tctaccatagaatttgtggatgacacccgctggcaagaagcgtagcattttctgctggcgggggcgtggctcatggggtccgtggtttggcgacaaatgtcactcggctctgaaatgccgcccccgtcatccacatcatccgttacgcctgccgggatggtgccaatcgtgagatcgtggctctgcatgtagacgcgacgtgcggatgatttctcaccgcataacctggtcaggagccaccgatgaacccacaaaccctacgcgtcggcatcgacgtcggcagcgcgcgtcaccgcgtggctgttgggctgcccgacggccagctcatcgacgaattcgacattgagcatcatgccgacggttttagtcaattctttcaacgcatcaatacccacgaagatcgtcaccggttgccggtgagcgtcgccatggaaggccacaacggctgggcgaggccgctcgatggccagatacggcgccgtggctggcaactctacaacgtcaacaacctcaagttggcgcgctacaaagagattttccctgcgcccgccaagaccgataccatcgatgcacgacgcattctcgaactgttccaactctctgcccacctacccgtcgcgcgcaacgcattgcaagaaattgccccgacacctgccgtgaacgacaagctcaagcgcttgacccggcgacgcaagcaactggtagtcgagcgcgttcgtatcgtcaaccgcttgcacgctgacttgcacgccatttcgccggggcttgccgccagcaccggcgatgttgccaacgtctggtttctgaatttcttgacctgccgggacgcgttacccgagctcgccaagctgcacatgaaaagtctgttggcgatccccgctgtgggacagaaatacgcaagccggattcaagcctggcaacaccatgccagcttcgcgcccgaggtggaattcgtcggcgccatgatccagcaagatgcccgccgtgtgcaagcactgaacgccgacatcaagacactggattgcagcatccaggcaacagcactggattccgccctggctcagacgatgctctccattccgggctttggcgatacctcggcggcggaactggcgggcgagatcgggacgatggatcgctttgagtcggaggcagggcttgcggtgtatgccggcatggcggcgctcgacaacagttcgggcaagaagaccgccgcgcgagcgccgaggcaggtgaacacaagggccaaggcggcaatgatggtagcgctcgcgcggcattacccgcaagtgggcgcatcgcgggcttactacaacaagaaacgcgccgagggcaagaagcataatcaggcagttcgtgcgttaggacgacacctgattcgcgtcatatgggcgttggtgaaaagcggcagaaaatacgaagatcgctcaaaaaatacttgaaaattctagcgggatgt

SEQ ID NO: 7471 - DNA, 1439 bp, unidentified
  source 1..1439: mol_type = unassigned DNA; note = element_b954775
  misc_feature 1..2: note = core
  misc_feature 3..490: note = LE
  misc_feature 491..1429: note = CDS
  misc_feature 1430..1439: note = RE
ctcctaccatcaattcatagtataaatgcatgtggatgaaagtttattgattagccatggaaaggcaggagggctcatttcttcctggatcttagaatccttatttcagtctgtcgcctgcctcccaagccatgataagttgattggatcatagaatccttgtcacgatggaggattggtcgggaggcaattcctgttttggccatgcgaagatgggaaggaggaatggatatggacgaaacacagcggttcagatggtttctgggtatcgatgtttccaaggaaacattcgatgggtgttgtatcaacatgaagggggaaagagtttttagtctatcgacctcgatgaacaggaaggggtttgaggagttgatcaaacagctctctggcccgtctgtttcccaagagtctggtgggcatggagtcaaccgcctgctatcatgtcaacctttattctttccttatctccttagggtataccgtgattgtgatgaatcccctgctcatttctaatttcgtcaagcttcagctacgcaagaccaagacggacaagaaagatgcttgggtaattgcacagtttcttctcctgaaccgagattccctttctcaaaccatcctctcttccgacatctcagatctcagagatctctccaggcagcgagagagtctggtggatcagatgagctcgatcaagagtgagatcaaggggttattgaccatgacctttcctgaattggagcatattgcgggtgtttttagtaaatccatgctccggctgctgtgccagtatccttctgcggcttcgatcaagcaggccaagcgttccaagatagccaagatcctgataccgggatcgtacgggaaacaaaccgatgtatcggtggagcgaatcctaaaggctgcacaggtatctgtagggacgtcaagcgctacgaaggagatcattctcaggcagaaagcatccttactgatccaactgggacaacatctccaagagcttacggatatcctcaaggaactctgcgaagggaagatgcagggcaatagggatatccttacctctatgaaaggaattggggagaagagcgcagtgaattttctgatcgagatcggtggagagattaagcaatttgaaagtcataaaaaagtgattgccatggcagggctcgatccggccgtttaccaatcagggaaaatcgatcggaaaggaaagatctccaagcgaggccatagacatctcagacgggtgatctggattatgacaacgaaggtcatccaatttaacgaacgattcaaacaatactacttgaagcgaataaaggatggattgccttacaaaatggctgtgctggccactgcccataaactcattagggtgatgtttgcaatgttgaagaacaaaactttattcgatccaagaatgaattgatgatagttga

SEQ ID NO: 7472 - DNA, 1437 bp, unidentified
  source 1..1437: mol_type = unassigned DNA; note = element_b971e5e
  misc_feature 1..2: note = core
  misc_feature 3..122: note = LE
  misc_feature 123..1154: note = CDS
  misc_feature 1155..1437: note = RE
  misc_feature 1190..1390: note = bridgeRNA
agatggggtaatcggccggcgagttgtggatagctgaaagattttgggtgctgcgcttcaggctgatggtgaaacggggtcaccgtagttacgggccccaagcatcaaaggagaagcgcagcatggagcattttggtggactggacgtgtcggtcaaggagaccagtgtttgcattgtggatggcacgggcgggatcgtacgagaagtgaaggttgcgagtgaacccgaagcgctgctgccagtgctgacgaatcccgactaccatttcaagcggattggattggaagccggaccattgtcgcaatggctttacagtgctctggccgaagttggcttgccggtgatttgtgtggagacgcggcatatgcgggcggtgctgaaggcgcagatcaacaagaccgaccgcaacgatgcgcgcggcatggcgcagatgatgcgggttgggctttaccgacctgtgcatgtgaagacgttacgcagccagaaattgaggatgcttctaacccatcgccagttgctgcagtcaaaggccatcgccattgagaacgaactacgcggcaccttacgcaacttcggtctcaaggtgggtatggtaggggcagctaaatttgaagtacgcatcaacgagttggtcgcgaaccttcccgatttggccgtgctggtcgaaccgctgcttgttgtccggcgagcgcttcgcgagcagatcggcgtcctgcaccaccgcttactggctattgtccgggatgatgaagtgtgtcggcgcctgatgacggtgcctggtgtcgggccggtggtggcgctcacctatcgcgccaccgtcgacgtgcctgcccgtttccgcaaatccaagtcagttggagcggtgttcggactgacgtgctccagggatcaatccggtgaaagagatcggcccggcgccatatcgcgctgcggcgatgagatgatgcgggtgatgctttacgaagcagcccaggtcatgctgacccgcaccaacaggtggtcttggctcaaagcctgggcgatgaagatcgccagaaaccgcgggaagaaaaaggcgatcgtggcgttggcacgccggctcgctgtgatcatgcaccgcatctgggttgatggcaccgagttccgttggacccgggagatcgcagcgggatgacgcccgcacaggataacatcccataggagaatacttgagttccaccctacggtggaaagatgtccctcgcgggacgatggatgaggtgagttcgcttggtcgcttggacctgccgttcgtctgacagcaaggccgcccgaaagattgttccgcctcgttctcgactcccatgatggaagggccttggtgccgattccgaagagaagcacgagcccgtgagcgacaccgacactgcactggtggatagcctgaaagtgcttgaccccgaacggccgattagaga

SEQ ID NO: 7473 - DNA, 1374 bp, unidentified
  source 1..1374: mol_type = unassigned DNA; note = element_b97a558
  misc_feature 1: note = core
  misc_feature 2..70: note = LE
  misc_feature 71..1093: note = CDS
  misc_feature 1094..1374: note = RE
  misc_feature 1128..1369: note = bridgeRNA
caatggtatggaccccgccgccttcggtcggcgacccttagaggatcaatttagggaaaggagaaataccatgcagattgtacgaattggtttggacttggcgaagaacgtctttgaagtccacggtgtggatgcttacgacaaagccatcctgcgaaagacattgcggcgggatgcagtccctcaattcttcgcagagttgccgccttgcgtcgttggaatggaggcctgtagcgggtcgcactattgggcaaaggtctttgctgaccttgggcacgaggttcgtttgatctcgccgcaatttgtgacgccgtatgttaaatccaacaagaacgaccggaacgatgccgaggcaatttgcgaggccatcggcaggccgtccatgcgcttcgtgccgccaaaatcctcggagcaactcgtgatccaggcagttcatcgtatccgccagagactggtgtctgatcggacacggttggtgaaccagatccgaggtttgttggcggagcatggcatagtgattgcccgcgatatctcgcgtctcagatatgcgctcggacaaattgcagatggagccgacaacaagctcggggtgatgatcctggagctggttcgcgacgtgcgccaagaactcagtgaattggatcaacgcattgccgcttacaacaagcgcatccgagacctctttcgatccaacgagatgtgccaacgcattggaaaaatcgaggggatcggcccaataacggcaacggcgctggttgcggctgtcggcgaccggacgtgcttcaagaacgggaggcagtttgcagcatggcttgggctggttcccaagcagcgatccagtggcggcaagtcgcgcctgtttgggatcagcaaacgcggagaccgatacttgcgcaccttgatgatccatggtgcccgcgcggtccttgccaaggccagcggtaaaacagatgccagaagcctgtggattgggcggatgcggaatcgacgacaccctaatgtcgttgctgtcgcacttgccaacaagaatgcccggatcgtttggtcagtcttatccggtggcggcgagtatcagcccgctctctcggtttgagaaggccgtaagaagcaaaagccagaagggtaaacccggaatattgcaacaaattggcatgggatggtgacaacgacacgaaccgttgcttcttgaacctggtgtatggatcggcacagaaacgctgatgccttggagccaatgagggagaggcatgcggaaatccatcggggctcgcggcgacaatgtattgggccgctcatagaagccggatatacgtcagcaatcgtgatcctgaaccagaccaaccaaaaccgttgcaataaggcggggtccatata

SEQ ID NO: 7474 - DNA, 1520 bp, unidentified
  source 1..1520: mol_type = unassigned DNA; note = element_b97b07f
  misc_feature 1..2: note = core
  misc_feature 3..243: note = LE
  misc_feature 244..1500: note = CDS
  misc_feature 1501..1520: note = RE
  misc_feature 7..232: note = bridgeRNA
ctaatgggtggtgagtcggtcatcgggcagacttgggtctggccgccagtgggtgagcacttgttgcgcctggacgtggagtgctagtgaaagatcgtgcccttgctggtgggtcgggagagctgaatcgctgctgggatgtcgtgtccgtccgtgggtggcgtgagcactgatccattaggtcgctgatagttctcccgcaggctcctggatgttgttgtggtggaagggacgggagaacgagtgcggttgttcgttggggatgactgggccgaggagcaccacgatgtggagttgatggacgcgtcggggcgacggttggccaaggcccggctgccggagggtgtcgcggggatcacgcggttgcacgcgatgatcggcgagcaactcgttgaactggtcggtgagaacgccggtgggaacgccggtgaggtggaggtggtggtcgggatcgagaccgaccgtggcccgtgggtgcaggccctggtcgcggccgggtacacggtgttcgcggtcaacccgttgtcggtgaaggactatcgacgacgtcaccgggtgtcgggcgcgaagagcgacgccgcggacgcgcacaccctggccgacatggtccgcaccgattcccaccagctgcggccggtcgccggcgacacgccggaggcggaagcggtcaaggtggtgacgcgggcgcacaagacgctgatctgggaacgcatccgccacacccagcggttgcggcacgcgctgcgggactacttccccaccgcgttggaagccttcgacgatctggacgccaccgacaccctggaactgctggggcgcgcgccggacccgcagtccgcggcacggttgtcgttcaaccagatccgcgccgcgctcaagcgggctcgccgccgcgccgtggacgacaaggccgccgcgatccagaaggtgttgcgctctgagcacctcgaacagcccccggtagtggccgcggcctatgcggccaccacccgcaccgcggtggcggtgctgaccaccctgcgtgagcagatccgcgccctggaaggcgaggtcgaggcccattttgggcggcacccggacgctgagatcatcctgtcccaacccgggatgggcatgatcctcggtgcccgggtgctcgccgagttcggagacgaccccgaccgctacgccagcgccaagtgccgcaagaactacgccgccaccagcccgatcaccatcgcctccggcaagaagaagaccgtactggcccgctacgtgcacaacgaccgcctcctcgacgcgctcatggcccaagccttctccgcgctccgagcctcgcccggcgcccgcgcctactacgaccacctccgcgcccgcggcctcgaacacaaccccgccctgcgccaactcgccaatcgactcgtcggcatcctccacggctgcctcaaaacccgcaccctctacgacgaaaccaccgcctgggcacaccacacccagaaaaccagcaagactgccgcttgacacccaagctcctgggatgt

SEQ ID NO: 7475 - DNA, 1464 bp, unidentified
  source 1..1464: mol_type = unassigned DNA; note = element_b98017d
  misc_feature 1: note = core
  misc_feature 2..160: note = LE
  misc_feature 161..1207: note = CDS
  misc_feature 1208..1464: note = RE
  misc_feature 1232..1462: note = bridgeRNA
gaatgaaatggacgcctcccacccgtatcggagggggagtcgagaacagcaggaaggaagcgaggggtagcaggaatgatggaccctcgcgggccaacggcgtcaaaagcgcctaaagtgaaagtctcagagctttcaggctaaccggaggatccacatcatgaatgctactcgcaaagcagtggtcggtgtcgatactgcaaaaagtgtgttccaggtgtacaccgttgagcaggcaacaggcgaagtgatcaacaagccgatcaagcgcgcgcagttcctgcagtggttcgccaaccggccgcctggcctgatcggcatggaggcatgcggcggttcgcagcattgggcgcgcaagctccatgaattggggcacgaagtaaagctgataagcgggaagatggtcaaggctttcgtcatcggtaacaagaacgatgcagctgatgcgcgtgcgatctacttggctgcgcaacagccggaagtgaaagccgtggcgatcaagaccgaagcgcagcaggccgtgctggcaatgcatcggatcaggcagcaactggtgaagatgcgcacggcacagatgaacgccctacgcggtctgctggcggagtacggtgaagtgtttggcacgggcaggaaagccttcgatgccggcatcaaggcggcgctcgaacggttggccgagaggttgccgatgccgctcatcgacgcgctgcgcgaccagtggagcgagctggcccggctggacgaccgcatcgtccgcatcgagtcatcgctgctgacatggatgcggcaggaccgggctgctaacgcgatcttcgcgattccaggcgtcggcctattgaccgcgaccacagtggtggctgcgatgggagatgcgaaggcattccggtccggccgtgagttcgcggcctggcttgggctcataccgggccagaccggcagtggaggaaaagtccggctgctgggcatgagtaagcgcggcgacacttacctgcgcaccctgctgatccatggggcgcgagcagtgctgcggcgccccaagacgctcagcccttggttgcagcaattgagccagcggcggccactgaacgtggtaatcgcagcgctggccaacaagatggcgcgcacgatctgggcggtattggcccatgaccgtgcatatgataaggaccacgtcagcatgcggccggacacggcggtagcggcgtgaagagcacctcaacttgcgaaaggattactctccgccagttgcgttaggtattgacagcgatgacagacaggtcagaccgggattcaccaagcctgaatggagcctggggcttagcagcccatgtagagaatgaggcgtggatcagcggatttcatcggggccagcggcgatgccgcgtacaaggccggatatagaactgcgactttcctcgtctggaaaagctggaaaataccttgcaaaagggaggcgtccatata

SEQ ID NO: 7476 - DNA, 1349 bp, unidentified
  source 1..1349: mol_type = unassigned DNA; note = element_b98026d
  misc_feature 1..2: note = core
  misc_feature 3..87: note = LE
  misc_feature 88..1107: note = CDS
  misc_feature 1108..1349: note = RE
  misc_feature 1121..1336: note = bridgeRNA
tgatggtgtggatggctcctgctccaaccgacgtcgcaatgcgtcatactgcagatgtcacaacctgcaaatgagaggagccaccccatgcaagttaccacaatcggccttgatctggccaagaacatttttcaagttcacgggatcaccaaagacgacgaggtcgccttcaatcgacctttgagacgggcgcagttgttgtctttcttctccaagcttgagccctgcttgattggtatggaggcttgcagcagcgcgcatcattgggcacgcgagctgactaaattcgggcatgacgttcggttgatcccaccgatatacgtgaagccatatgtgaaacgcggcaagtctgacgccatcgatgcggaagccatttgtgaagcagttacccgacctacaatgcgttttgtggcgatcaagaccgtcgaacaacaatccctattgtcggtccatcgtgcgcggagcctcttggttcgccagcggacccaactcatcaatggtctacgcggaatggtcgccgaatttggtgtgtatatcgcgcgaggtctcgcacgggtcatcagtttttccgaggacataatggctggtgaggttttggatctgcctgatatcgcgaacgacgtgatccacaatctgtgcgagcagctcacggcattgcatactcgtctgcgctggtacgaggagcgcctgaagcagattgccaaggaagacgcgcgtgtgcggttgttgcgtaccatcccaggcgttggtgctgtgacggcgtccgcgatcatcgccagcattggagatgggcatcagttcagcaatggccgcgagtttgcagcatggcttggtttgacgcctgcgaataaatccagcggcggtaaagagaagctgggccacattacaaaaatgggtgatcaatacttacgatcattgttggtcgttggcatgacatcacttgtccgacagaccaaatcgcacccggagcgcgcaagtaagtggctgatatcgctgctggagcgaaaacccgcgcgcttggcgactgtcgctatggccaacaaaacggcaaggatcgtctggacagttctaactcgcaaccaaccttacaccccacacaaggcctaaaggagaaagaacaaagagttagcaagacccgcgagatgatggtgcataagtctgccgccaaaaccgagacaccccgtcgaaggtcccgggcgcaattgcccgctaagctgtaagggacttggtttgcggaacccatcagggccagcggtcaaaaccgcgcaaacaggccggacacatgactgcttctgacaaatgcacaaatcggatcaaaaatgtcttgctatgcaggagccatccacaca

SEQ ID NO: 7477 - DNA, 1666 bp, unidentified
  source 1..1666: mol_type = unassigned DNA; note = element_b980c79
  misc_feature 1: note = core
  misc_feature 2..307: note = LE
  misc_feature 308..1567: note = CDS
  misc_feature 1568..1666: note = RE
atttataatccgcctttctgcgaaaggcaccaatgcggtcatgaaacccgtctcggtctttcgctgttttgaatttcctgatatagttttcctataagactgacacactacagaacacgtggaggtgagtggcggggctgtatagcggcgaccccgcatatctatatgttgtcggtcatccgttaaggcatcaatgattggcgcatgacagtagcccgtaaacttatctcttccaaagtcgactcgattttgccggatgaccagtcactgtcagttttataacgataaatcatcaggaggttattttgtgtcatttaaaattcttaaaaacaactgctgtggacttgatgtccacaaaacatggatctttgcctgcattggtattacagattcccacagccgtacagaatataagcaggctcgtttctcttccttttccaaaggtttgcaggaactgtgtgactggcttgcaaaatatcgctgtactgatgtctgtatggagtcttctggcaagtactggatccctgtctttaatattcttgagaaaaacaacctctgggttacgctttctcatcccaagtatacaaaacccttgaagggaaataagactgaccgtaaagatgctaaatggatttgcgatctttacatgtgtggtatggtcaagccatccttcattccacctgccagcatccgtcatcttagagatttggttcgttatcgtttcaaacttacctgtatgattactggcgaaaagaatcgggcccaaaactgtctaaccgtatcaaaccttaaactcgatgatgtattcagtgacgtctttggcaagtcctcccgttccatcacggaacagatacttgcccacccaggggaaacttttgatgtcacacctttcgtacatggacattgtaagactcctatagaagaaatccaagccgctgtcgatggtgccatctcgcctgaacaggctgttaaacttcgtcaatgtcttgaccacatcgacgaattagaaaagcacatagaaacagtggaacaggaaattcttcgtctttctgacccgtacgaatcagcgctcaacctgatacgtactgttcccggatttcacaagaatcctatgaccgcaatccaagtcctttctgaaatcggtgctgatatgtctgttttccccacagcaaagcaccttgtatcatgggccggatgttgtccccgcaacgatcaaagcaacaaaaagatcaaatcaactcgaatttcccgtgccggttcttattttaaaccaatactggtacaagttgcaaatgctttaatcaaatcgaagaaacatcctgaatttacaaaccgctaccggcgtataaaagcacgtcgtggtcacaagaaagccatcattgccatctgtcgtatgatcctgaccgctatctggcacatactctcagatttgaatccatatacaccggatggatttcttgaatcacgtcctgtgaatgaatcaaaaaccctgactacttcacaggcacttaatcttctaaagcaacgtggttacattatcaaagatgagcctgtaacagcttcctgattaggtgttgtgtctatatttacttttaaagccacccgataagatggtttgtttgctataccctttaattcttgactatctgctacttctttgtttcaa

SEQ ID NO: 7478 - DNA, 1398 bp, unidentified
  source 1..1398: mol_type = unassigned DNA; note = element_b984ca0
  misc_feature 1: note = core
  misc_feature 2..83: note = LE
  misc_feature 84..1127: note = CDS
  misc_feature 1128..1398: note = RE
  misc_feature 1158..1373: note = bridgeRNA
tgatgaggtggaacggcccgcacccagcgactcggtgttaaggatgaggcgttgggtcgacgtcatcaggaaaggatcattcgatgcaggaagttgccaccatcggcttggatctggccaagcaagtttttcaggctcacggcgccgatttcgagggtgcgccgctgttcagccgcaagctgcgtcgcgctgaggttctgcgttttttcgagaagctgccgcgatgcctggtcggcatggaagcgtgcggcggttctcactactgggcgcgcgagatctcggcgctgggccatgacgtgaagctgataccgccggcctacgtcgcgccgttcgtcaagcgcgggaagacggatgccggcgacgcagaagcgatcagcgaggcggtcacccgcaagaccatgcggttcgtcccgatcaagactgccgagcagcaggcggccgcgatgatgctaaaaacgcgtgcgttgttggtccgccaacgaactcaagcggtcaatgccctgcgcgcgcatctgacggaactgggcgtcatcgccggcgccggcatcgcgaagatcgattccctcatcgcgatcgttcgagacgagaccgatgaccgcttgcctccggctgcgcgttttgccctgaccgccattgccgaccaggtcgaatctctgaagacgcaggcccgtcagctcgaggatgcgatcgtccgcgaggcgaaggtcgaccaagatatgcggcgtcttgcgacgattcccggtatcggtgccatcaccgcggccacgatcaaggcgctcgttccggatcccggcggcttcaagtcggcgcgccactttgcagcttggatcgggcttacgccgaagccgcggtccagcggcgggaaggagcggctcggacgcatctccagaatggggaacccggatctgcgctccctcctcgtcgtaggggcaacatcagtgcttcgccacgctgagctgaacgcaacaacaatgccttggctgacgggtatcgtcgcaagacggccgtacaaagtggcggcggtcgcgctcgccaacaagatggccaggatcgcctgggctgtgctgacgcgcggcggcgtttatcagcgtcccaacagtttagcgggttgcgtggtcacaggatgaccctcgccaccgcttgatgagctgaccggcacggcagccggcagaagtgaggtgcacgaagcagacgatgatccctggggcgaaatcccgatgcaagacaggctggaacccgtaacgcgcctcgagcgcgtacccttgatcaagccacttgtaccgcgaacttcatcgaggccggcggccatgtgccgcgctgacaggccggacatatgaccgcaccgttaccgtggaagaatcgactgccgagagaccttgctacgcgggccgttccaca

SEQ ID NO: 7479 - DNA, 1736 bp, unidentified
  source 1..1736: mol_type = unassigned DNA; note = element_b99d96a
  misc_feature 1..2: note = core
  misc_feature 3..353: note = LE
  misc_feature 354..1580: note = CDS
  misc_feature 1581..1736: note = RE
  misc_feature 55..329: note = bridgeRNA
ctcgtataataagatttgcagatgattttaagtgtatctgcttagttcactccgtgtaaccaacaggcttagagatacccgtgatacaatagctgtaggacagtagggtcaagctcttttgctcctcgttgagccacaaggctgcttcattgaaagtccgtccccctgagccggaagttagctgcaaactcattggctgtttgccgaagacaagaccgccctttcagcagtgagggatatcgcattggtctgctccggaatgattctgatatgcgaggttgccagatgctccggttatcatgggtatctcaaagcctgctggcctgaaatctccacgaggggaggtgaaaagtgtgaatccactattcgttggcattgatgtgagcagcaagaacaatgtagcctacctgatgaagccggacggcagcaaacactccagcttctccgtgcagaacaacctcggtggtgctaaactgttgtcagagagaatcgtgtcggcactcagctctatgcggctcagtgatgtggtgattggcctggaggctacctccatctacggggacaatttggtctatgctcttcgtgaagatggcggtctgggccggttccggcggaaaatccatgtcctcaatccgaaacaggtcaaaaagttcaaggaagcctatcctgacctgccaaaaaacgactgggtggacgcctttgtgattgccgaccatctccgcttcggcaggattgccaaggaggtttatatggacgactatcgctaccaggcacttagaacccttaccagggcaagatttgatgtcattcagaatctgacccgcgagaagcagcggtttgccaactacttatttctgaaatgctccggcatggctcaggacaagggtattcagaataccagcgccaccaccattgcactcatggagcggtttgaaacggtagacaacctggcaaatgctgatctggatgacctgactgcctttgttgctgaaacggggcgtggcagatttgcagatccagaatccaccgctaaggctgtacaggctgcggccagaggttcttaccgtctgcctaaaacagtgaacgacaccgtgaaccaggccatggccgtttctatcgcctccatgcgggcgctgaaagaacaggtcaaggttctggacaaagccattgaacaacagtttgagattatcccaaataccctgacctctattccaggcgttggcaaggtttactccgccggtattatcgctgaaattggcgatatccaccgtttcgcttcccaagcctctgtcgccaagtttgccggccttgtctggacacagcaccagtccggtgaatttgaagcagaacactcccggatgattaaatcaggcaaccgctatctccgctactacctcctggaagctgccaactctgtgagaagatgcgactccgagttccggcgctactatgacctcaaattcaaagaggttaacaagtaccagcacaaacgcgcactcgctttaactgccagaaaactggttcggttggtctttcggctgctgaaggacaaccgcctgtatatcccgccggagggctaagcgatatcgcctgcctctctgacgccaaggccctgtttcaaaaattataggggcagggctttattgggtgttgcctttttgcactctaaacatccgttttgctttacttttcctcaaaattttctcgtattatccccttgacttaataccattgga

SEQ ID NO: 7480 - DNA, 1360 bp, unidentified
  source 1..1360: mol_type = unassigned DNA; note = element_b99f13f
  misc_feature 1: note = core
  misc_feature 2..284: note = LE
  misc_feature 285..1340: note = CDS
  misc_feature 1341..1360: note = RE
  misc_feature 13..276: note = bridgeRNA
ctgtaagtgtttgtagtggctggcccggggctggctggcaggatcggtgtcgtcgtcgcgactgggtgtgacccctgaaccgcatggccctttcggggtgcactttccaggatctgtccactcggtcgagacggcgacgccgacccggtctcgcttcggtggcttgatcagaagcctgcccgacccgtgtgcgcgggtcgtggcccgttacaggcctgcctcgaagtgttcttcccgggccgacgccgacacgacgtcaccctttgggaaggagatccgtcgcaatgcctatcgttgcagatcagtacgagttcgtcatcggggtcgatacccacgccgctacccactcgctgtcggttgtcaccgccgcgaccggtgcagtcgtcgaccaatcaatgtttcctacgaacccatccgggctcgagcgagcggtgacatggatcagtcgtcgcgtgggcgagcacgcgactctggtggtcatcgaaggcgtcggttcctacggagccggtctcgccgagcgggtcctcggttccggattggccgtcgtcgaacccgccgcgatgccagccgcgcaccgacgcgggatcggcaagaccgactcactcgacgccgtccggatcgcccggtcggtgctcgcggtcgacatctcccggctccgctggccgcgcgccgagggtccccgcgccgcgcttcgggtcctggtcgtggccagagaacaaatggccggcgagcggacccgagcagtcaatgcgctcaccgccctgctccggatcaccgacctcggtatcgatgcgcgcaaagctctgacgcgcaaacagattgatgcgatatctacctggcgttcccgatcggaggacgtcaccatgcacacgtgccgacaggaggcggtccgactggcgaagcgaatccgcgccctggatgccgagttgatcgacaacaggaaggcactcgactctgccgtgggctcggtcgcaccggaactgccggagttacccggcgtcggatcggtggtcgcggcctccgtgctcatcgcctggtcccatccgggccgtgtccgttcagaagccgcgttcgcagccctcgccgggacctgcccgataccggcgtcgtcggggaacacgatgcgtcacagactcaatcgtggcggagatcgacgactgaaccgggcgctgaccaccatcgtcctcgtccggatgcgcacccaccccgacacccgcgcgtatgttgcccggcgccgccgcgagggtcgcacgaccaaggagatcatgcgctgcctgaagaggtatatcacccggcaactgttccgaacactgaccgctgcatacccggccccagcatgacttgacggatatagaagcat

SEQ ID NO: 7481 - DNA, 1442 bp, unidentified
  source 1..1442: mol_type = unassigned DNA; note = element_b9a9f52
  misc_feature 1..4: note = core
  misc_feature 5..435: note = LE
  misc_feature 436..1296: note = CDS
  misc_feature 1297..1442: note = RE
  misc_feature 1..237: note = bridgeRNA
ccccgttacctttttcctggctcccgaccagggagttgtggtcaccaggcctggcatgacttgcgcccccaggcgaacccatgctccgggggggtggagtcaccgggcctggtggcatcgaccgaccgctgatagggacacggccaccgccaggtaggtctcgtcgtaacgtgggtgccggcgctcgatgcctgaccggatgaccacgaggcggcgaacgaacggcaaggtggatgagcagcactttcagcgtgttcctcggcctggacgtcggcaaggacaaccaccacgccgtcggcctcgaccccgacggcaagcgactgcatgacgggcctctgcccaacaccgaatccaagctgaaagccctgttcgacaagctcgccgcgcacggaccactgctggtcgtggtcgaccaacccgccacgatcgggggcgttgccggtcgcggtcgcccgcgccgccgggcaccaggtcgcctacctgcccgggctggcgatgcgccgcatcgccgacctctaccccggccgcgccaaaaccgacgcccgcgacgcattcgtcatcgccgacgccgcccgctccctgccccacaccctgcacccggtcgacgtcggcgacgacgccctggccgaactggaggtgctgatcgggttcgacgacgacctcgccggcgaagccacccgcatcagcaaccgcaaccgcggcctgctcaccggcatccaccccgctctggagcaggccatccgaccacggatcagccacccggcggtgctggaaatcctctcccgctgcggcggaccgaccggcatcgccaaagccggccgccgcaaactcaccgccatcgccaaggtccacgcgccccgcctcggcgacaaactggtcgaggcgatcatggccgccctcgccgagcagacggtcaccgtcccgggcaccgccgctgcggacacggtcttgccgcggttggccgacagcttgaaagcggttctcctgcagcggaagcaggttgctgagcaggtcgaggggatacttgatgcgcaccctcttgccggggtcctgacttcgatgcccggcatcggggtcaggaccgccgcccgcatcctgctcgaggtcggcgacgcctccaattttgcatcctcggcgcatctggctgcctacgccagcatcgcgccggtcacccgcagctccggcaccagcatcaagggggagcaccccgcccggaccggcaaccggcagctgaaacgggcgttcttcctcgccgccttcgctgccctgtcggatccgaccagccgggcctactaggaccgcaaacgcgccgagggcaagaagcacaacgccgccctctctgcctggcccgccgccgctgcgacgtcctctacgcgatgctccgcaacggcaccccttatcgccaacccgctccgccgcggcttgacaaccacatagggaca

SEQ ID NO: 7482 - DNA, 1302 bp, unidentified
  source 1..1302: mol_type = unassigned DNA; note = element_b9ad2aa
  misc_feature 1..2: note = core
  misc_feature 3..224: note = LE
  misc_feature 225..1055: note = CDS
  misc_feature 1056..1302: note = RE
  misc_feature 18..239: note = bridgeRNA
ccaacttgttgaattggtggcggagatcagggtctgcagccatgatctccgaggttgtggtcggggtcgctcgggaaacacctgccgcccacgggctggccctcgaacggcctgcgccccggccgtaaccgccggcgagagtggctcgagagaggtctgttaagcccgaagttggtgtgccctcctcgccggatcccccttttccggtcctgcaaggagaaccagtgcccgccgccgcgtcgtcaacaccaccccgggtcgtcatcgcgatcgatccccacaagtcctcctggaccgccgtcgcggtcgacaaccgactccagcctctggccgcgatccgcgtcgaggtcaaccgcgacggctatcggcagttacgtcgcttcgccgggcgctggtcgcatgccgtctgggcggtcgaaggcgccaccggccttggtgccacgttgaccactcgtctggcagccgacggcgtcgacgtcgtggatgtgcccgcgaagctcgcccgccgcgtccggatgctctccaccggccacggccgcaagactgaccaggccgacgctctctcggtcgggatcgccgcgcacaccgctgcgcgactcaacaccgccgtggtggatgaggcgatcgccgccctgcgatgcctcaccgaacaccgcgatgacctcgtccgcagccgcactcagatcgtcaaccggctgcatgcgctgctggcacagctcgttcccgccggcctgccccgcggactgaccgccgacagcgcagccgctgcgctgcgcagcatccgcccacgggccgtgctggcccgcactatgcgccaggtcgccgtggaactgctcggcgagctgcgccgcctcgatcggcgcatcgccgaggcaacagcaacgttgtccgctgcggtcgcagcatctggcaccaccttgaccgatctgcacggcatcggcgacgtcaccgccgcgaagatcctggcccgctccggcgccgtcaacaggttccggtcggagtccgcgttcgcctcgtactgcggcgtcgcaccgaatagaagtgtcatccggtgacgtccaacgccaccgcctctcacgcgctggcgaccggcagctgaactacgccctgcacgttatggccatggcccagatcaaacgagcgaccccgggccgggactactaccagcgcaaacgagccgcaggcaaaacccacaaggaggccatgcgctgcctgaagcgacgcctgtccgacgtcgtctaccgcaccatgatcaaagacacggagacctctctgctgccgacgccttgacacagagaggtg

SEQ ID NO: 7483 - DNA, 1573 bp, unidentified
  source 1..1573: mol_type = unassigned DNA; note = element_b9b1095
  misc_feature 1..2: note = core
  misc_feature 3..252: note = LE
  misc_feature 253..1428: note = CDS
  misc_feature 1429..1573: note = RE
  misc_feature 3..228: note = bridgeRNA
ctcgtattatatagtagtagtgtttatagaccctctccaaggtctgtatgctatattattggagatactgtggattgtttatttgctcctaccacttgatggttttagaaaggctacaaccacagtctctttgtatatttgttaatcagttagataccgcatgacgttttatttagaacgaggttacaatcgcaaggagtaccagtggttctataaacagtatcaaaatatatttattcaaaggagatttttatgatatacgttggaattgacgttgtcaaagacaaacacgactgtttcattattcactcagacggtgaggtattatttaaatcctttactatctctaacaaccgtgatgggtttgaaaccttatttcagaaaatacaatccgtatcagatgatttaacgaaagtaaaagtaggacttgaagccactggacactataattacaatcttcttggatatctcttagataaaggtctgccaacctacgttatcaacccgttacataccaatctttacagaaaaagtctaagccttagaaagacaaaaacggataaagttgatgcctacacgattgcgtctatgattatgtctgatgtaaacttaaagtcctactcagacacatcttaccacaatgaggaattaaagtcactcactcgttatcgttttgataaagtaaaggaacgtgcaaaactcaaaacatccgtctcacggcttatttgtatccgtttcccagaattagaaaagcttgttccaacacttcatatggcatctgtttatgctttgttgtcagaattcccatctactcacgctgttgcatcagcacatcttaccagacttaccaatctgctttccgaaagttcaaagaacagatacggaaaagacatcgctgtcatgtttcgtgaagctgccagaaactccattggctcagatatgcctgcaaaatctttggaattaaagcataccatcaaacttattcaagaattaacttctgagattgacgaaattgaaatcgaaataaaatccattatggatgaaatcaattctccaatcctcactatctccggcatcagttatagaatgggcgctatgatcattgcagaaatcggtgatttcactcgttttgactcacctgataagatacttgcctacgccggaatgtctccgtccacctaccaatcagggcaactagataactgttattcccatatggaaaaacgtgggtcccgctatcttcaatacgcactttataatgcaacgaaatatgtctgccattgggatgtatcatttgggaaataccttgccaaaaagcgagcagagggcaaacattataatgttgctttatcccatgctgcaaagaaacttgttcgattgatttttgcaatagagaaatccagacaagcatatatgccgacaacttaactttttctatgaaatatctctttttcgagcacctgtaaagatgctttttttgtcatgcagttttcatggtacaaatatatctgaaatgcatttctgcaattcactcaaaaaatttcatctttaggcttgacttttaatagttagt

SEQ ID NO: 7484 - DNA, 1254 bp, unidentified
  source 1..1254: mol_type = unassigned DNA; note = element_b9b11a3
  misc_feature 1..2: note = core
  misc_feature 3..243: note = LE
  misc_feature 244..1239: note = CDS
  misc_feature 1240..1254: note = RE
  misc_feature 22..193: note = bridgeRNA
cttgtatgttgccccggaagatattgatagggtttaacacggttaccggggaggccgttcgctcctggaagcagcctggtctgacttcgtctgtagagcggctccccgcctcattgctcactccgaagggtatcccgaagcccatcaagggacttcgtatccacaaggtcggtagcggcaagcagtgcgaggtcggggaaccggtgcccattgtctctaatcaatgacctggagtgaagtgacgtgccggttaatgtgggtttggatatcagtgcttacacagtggatgtggtgattcggcaaggcgacaaggcctctcagcccaagcagtacaagcagaccgttgaggggcacgcgactctgatctcacagctgaagaaggccaagccggccctgatcgtgatggaagccacgggtatctattattttgatctggcggtggcactggccgatgcgggcctgccggtcgcggtgatcaaccccaagagttttcgccatttcgctgagttgaagctgcagaccagcaaatccgacggcatcgatgcggatctgctggccgaatacggtcagcgtatggctccggcactgtggacgcctccggatcagcagcaccaggcgttgaggggcctggggcggcagatcaaccggctggtgggcaaccgggcccaggccaagaaccgactgcacgctctgaaggccacccgctccacgccggctctgctgatcgaggatgagcaggacggcattgccactctggagcgccgtattgagcggcttcgccaggccgccctggaactgatggccgaggccccggtgctgcagcgtcagtatgagcacctattggcggctaaaggcgttggagaagcgacggccttgtcggtcctggcggagttgtgtgtgctgccgcgggatctgaagtccagtcaggtcagtcggcatgcggggctggatgtgcgtcagcaccagtccggaaccagtgtgaaccgacctggacgaatcagtaaggccggcaatgtttacctgcgctccgccttgtatatgccggcgctatcggcggtgcgttatgacctcaatgccaaggccttctacgaggccctggtggcgaggggtaagaagaagatccaggctctggtggcggtgatgcggaaatacctcactggcttatgggcctgcttgaagaccgataccccattcgattcatcgcgtttatttcagccccaagagtctcaaaacgcttgatattgaacagggtat

SEQ ID NO: 7485 - DNA, 1456 bp, unidentified
  source 1..1456: mol_type = unassigned DNA; note = element_b9b22dc
  misc_feature 1: note = core
  misc_feature 2..89: note = LE
  misc_feature 90..1172: note = CDS
  misc_feature 1173..1456: note = RE
  misc_feature 1203..1396: note = bridgeRNA
gaatgcgaagggacttcccgcaatccagcaccggcatcgagtgccaagattgattgtcgaagtcaatctgaagcggaaaggggaagtccatgggcgagattacacgtgtgggcgtcgacctggcgaagcgggtgatccaggttcacgcggtggatgcgacgggtcgagtggtcgtagccaaacagctgcagcgcgacgggttcacggcttggtgtgcacagctaccgcccgggtgtcttgtcgccatggaggcgtgctcgggctcgcaccattggggacgacggctgcgcgcaatgggcatggaagtgaggctgctggcgccgcacttcgtctctccctaccgtctgagcggcaagaccggcaagaacgacgcagccgatgcggcggcgatctgcgaggcggcttcgcgccccaccatgcgcttcgttcccgtcaagagcgtcgagcagcaaagcatgatggcgctgcaccggctgcgcgaagggtacaaggaagagcgaaccgcctgcatcaaccggatccgcggcctgctggcggagttcggtctggtcttcgcccaacggcccgaagtgctgcgagcagtgttgtcggaggtcgtcgaagacgcgggcaacgagctgggcgcggtcgctcgcatggcgctgcagcgtgcgcaccttcactggatcgagctcgagtgccacatcgcctggtgcgacgaacgcatcgccctgcacgtgcgcaacgatgagcaggcgaaggcggcggcccagctctgcggcatcggccccgtgaccgcctcggcactggtggcgacggtagacgacttcaaacagttcaagaacgggcggcagttcagcgcctggatgggtctggtgcccaggcagaactcgagcggaggcaaggcggtgctcggcgagattaccaagcgaggagatgaatatctgcgaacgcttctgatccagggcgccaagtcagcagtattcaccgcgcaccgacgcagcgatcgcctgtcgcgatggatcgtccagctgcgcgatcgcgtcggctggcagaaggccgcggtggccttggccaacaaacatgcgcgcatcctgtggtcgatcctggtcaacggtcaaggcttcgatccagaacacgttccaaccaagcacctgatgcgagcgccggccgcattgccagcggcaggctaaagcaactcgattgatccgttcctgaagacgtgcgcaccggagatgcatcacacaggtcagaccggcagcaggtgaactcgaaaagcggaccgtcgcgcccgacgtggcgacgactacgagtgaatggagccctgctgagcggttggtatctgggccagcaccccgtcaaggtgcagcaaggccgtctgtagattcgcagtctgttctggcgtgaagcgccttcgttgagcacaagacttcaggatcacgttagaaggaaattgacttggtgggaagtccctgta

SEQ ID NO: 7486 - DNA, 1278 bp, unidentified
  source 1..1278: mol_type = unassigned DNA; note = element_b9b418a
  misc_feature 1..2: note = core
  misc_feature 3..229: note = LE
  misc_feature 230..1273: note = CDS
  misc_feature 1274..1278: note = RE
  misc_feature 18..241: note = bridgeRNA
ctgacttgtttggatgcatccacgccgttggggtctgcagccctagcgtgcgaggacggtgacggtgttggctctcacgcttcttgcccgccccggcgtggctgtctcatagcgtgccgcgcggtcaccgcccgccgttggcgtggctcgatagaggcgtgactgctgttgctcgaactcaggttgcccgccgcggtatccgttcgcatctcggcctcgaggagcgtcagtgatcactatcggcatcgatccccacaagagctcgcacaccgcggtcgcgctggatgagacgggcgcgctgctgggagaagtgcgtgtcccggccgacagctcgacgctggcgcgcctccaagcctgggcggcgtcctggccgcaacgtgtctgggcgatcgagggtgcctgcggccttggccggctgctagcgcaacggcttgtcggctccggcgagaccgtgctcgacgtccccgcggcgttggccgcccgcactcgcgttcttcaacgcggccacggccgcaagagcgatggcatcgacgcgcgcagcgtcgccgtcgttgcccagcaccgcgatggcctctcgcgcgtcgcgccggatgaccactgcgccgtgttgcggttgctgtctgaccgccgcgacgagttgacctctgagcgccgccgcgccgtcaatcggctccaccgcctgctgcgagatctacaccctggcggcgcaccgcggcagctttcggccgatcgcgcgtcccgcctgctcgcgaccattcggcctagcggcgccgtcgacatcgaacgcaaggcgatggcccgccagctgatcgccgatacccgtcgcatcgatcgcgccctgaccgagaaccgccgccgctgcgcgcaagcgatcgccgcctcgggcagctcgctcaccgagatcttcggcatcagcgaagtcctggccgccaagatcctcggccacaccggtgacatcacccgcttcgccaacgccgaccactacgccagctacgccggcaccgccccgatcgaggtctccagcggcgatcagcgccgccaccgactctcccgcgccggcaaccgctccctcaaccacgccctgcacatggccgcccgcgtccagaccatgcaccccggccccggccgcacccactacatgcgcaagcagaccgagcacaagacccccgccgaagcgctacgcagcctcaaacgacaactcgccaaggtcgtctaccgacacctccaagccgaccacacgcatcagacatccccctccccaggattgacatagaggcg

SEQ ID NO: 7487 - DNA, 1498 bp, unidentified
  source 1..1498: mol_type = unassigned DNA; note = element_b9c3bc2
  misc_feature 1: note = core
  misc_feature 2..90: note = LE
  misc_feature 91..1131: note = CDS
  misc_feature 1132..1498: note = RE
  misc_feature 1263..1496: note = bridgeRNA
taatggaatggtccgccccacttcctaaacggcctcaaaagggccgtgatgttaatgtcatttaaacgtcaaatagaagtgaggcaaaccatgaaatattgtaaagcaaaaagtgaaattaaagtgttggggattgatttagcgaagcaaagctttcagcttcacggggtagataaaattggtcaaaccacgcttaggaaaaagttgagtcgaaataaattagctgcatttatagccaacctgccgccttgtttaattgggcttgaagcgtgtggtggcgcacaccactgggcgcgtacatttactcattttggacacacggtacgaatgatggcgcctcagtttgttaaaccctatgtcaaatccaacaaaaatgatgcggtcgatgcagaagcgatatgtgaggcagtgcagcgtcccaatatgcgttttgtgccggccaaatgtattgaacagcaagatattcaaagtatccatcgcatacgaagtctactggtttcccggcggactgcgcaagcgaaccagatccgagggttgttattagaatatggcgtcgttattcccaaagggattgcttatatcagggcgaggataccagaaattctcgaggacgcagaaaacggtttaacaccattatttcgtcaactactgaatgcgctctatgaagagatggtacatcttgatcaacgaattggcacattggagcagaagctgcaggccatctgcttgcagagcaaagattgccaacgtttgctcactattcccggtattggcctgttgactgcaacagcgatggttgcagcggtaagtgacatcgcagcattcaagaatgggcgcgagctagcggcctggatgggcttggtgcctcgtcaacattccactggcggagtgacaacgctgatggggatcagcaagcgaggcgacagctatttgcgaacattattaattcatggtgcaagagcagttgttcgtattgccgacaaataccaggataagcgcaaccgatggatcagcaaacttgagcaacggcggggtaaaaatatctcagcagtcggggtagctaacaagaacgtacgcattgcatgggccttgttgagtaaaaaagaaaactataatggcgtggctgcatagcatggatacaattaatatcctaaattaagaactaatcgacgcaaatgtttgaactccactttaacttattcgggtctggtgaaaggacattgggcagagataaattacaatagatttaaaaatatcaacagtcggtaacgaattgcgcggaaaattcaaatgatggcacaaaaggtaatacctgcattcccacgagcctgatattgtcaagggcccaatagaggccgaagatttgatgaggctggaatgtgcaaattccatcagggccagaggtgcttttatacctaatgcgaaggccggatatatggacgcattattctttttgtcacaaacgaaatttttcttgcaatatggggcggaccatata

SEQ ID NO: 7488 - DNA, 1253 bp, unidentified
  source 1..1253: mol_type = unassigned DNA; note = element_b9cf331
  misc_feature 1..2: note = core
  misc_feature 3..242: note = LE
  misc_feature 243..1238: note = CDS
  misc_feature 1239..1253: note = RE
  misc_feature 20..190: note = bridgeRNA
cttgtatgttcaacccggctggtttgctaggttctcaaatcagtcgccggggaagccgttccaacccggaggcaggtaatccctgacctcgaatgtagacaggctccccgcctcattgccgacttcgaagagtatccggaagccagctgggctggacttcgcatcacaaggtcgaagccgcaagaaatgcgaggtcgggggcccggctcttattctgacgcaaccggacttcggaggaaaagatgcagtgcgtggtaggcattgatgtcgcggccagatcctttgacctgactgtccgcaaggacggcaagtgccggaaggcgcaaacgtacgagcaaacgccgcaaggacaccggcaggcgatcaagcggctaaggtcattacagccggcacgcattgtgatggaggccaccggggtctattacctcgatctggccatggccttgcacgaggcggccctgccagtgtgcgtcatcaaccctcgtagcttccggcacttcgccgacatcaagctcagcgctagcaaaaccgatgggatcgacagcgcgttgctggccgagtatgccgagcgcatggaaccggcgcgctggtctccgccgccgcatctccacttggagttgcgtgacctgggacgtcaaatcaaccgcttggttcacgcgcggacccaggcaaagaatcgcctgcatgcgctgggcgctaaaaatgggacgccccggatggtgatcgaggacgaacaggagggcatcgcccacctggatcggcgtatcgagcgccttaggcaggccgcccgagaggtgatcgcccagtccgaaacactgtccgaaccattcgactgcctgatggcggcaaacggggtcggcgaagccagtgctgtcgcgatcctggccgagttgtgcgtactgcccgaggggttgaaggcaccccaagtggtgtcccatgccggcttggacgtgcggctcaaccagtccggcagtagcgttaaccgtccgggccgcttgagcaaggccggcaacacctatcttcgtgcggctctgtttatgcccgccatggttgccattcgccatgaacctcgagccagagctttcttcgaggcactgatagagcggggcaagaagaaaattcaggccgtgtgtgccgtgatgcggaaatacctgaccggtatctgggcttgtgtgaaaaaccggacccgtttcgatccaacgcttttgttcagtgacaagcatgccgcggcaggttgacgaccaacagagtat

SEQ ID NO: 7489 - DNA, 1333 bp, unidentified
  source 1..1333: mol_type = unassigned DNA; note = element_b9d8aba
  misc_feature 1..2: note = core
  misc_feature 3..257: note = LE
  misc_feature 258..1319: note = CDS
  misc_feature 1320..1333: note = RE
  misc_feature 33..228: note = bridgeRNA
ccgacttatatgagagtagcgaggtgcccagcgggattgcagcccatagcgtgtcgtagtaggccggagggaatgactcgtgaacgttctgtctcccgcagttcggggatgactctcgtctggtgtgtcaccccctccggtctgcgttcgcggtgtgactcgagagaggcgtgaccccaagctgctgtgagaggtacttgaagtcggattgtccaccgcggatcccccatctatcgagcgaaagggaaccgaaccccatgatcgtcatcggtgtcgatccgcacaagtccacccacaccgcgaccgcactcgactccgtcaccaacaccgacctaggctctatccgcatcgacgcctcgatcaccgaatacaaacgcctgatcgcctgggccaaagcctggccggaccgacgatgggccatcgaaaacgccgacggcctcggacaccacctcgcactctggctgcttgccctcggtgaggtcgtgctcgacatccccactaccgccaccgcccgcatacgcgaactctcccgcggtggacgacgcaagaacgaccgcatcgacgccgcggccgcagcgagcgtcgcagctctgcaaggcgacgccaggcaggtctatccggagaccgtcaacgatgcgcttgctttgctcgacgagcggcgagtcaatctgtcgtccagtcgaactcgcaccgtcaatcaactccatgccttattgcgtgaactgatggccggcggtgcgccaacctcgttgacacccaagaaagctgccgccgcgatccgcggattccgcgcccgaactgcaccggacaagatccgactcgaactcgccaaagcgctcatcacagactttgaacggttcgatcagcaactcgccaccaacagtcgcaaaattaccgcgctgctcgacgagcacggcacacgcctgcgcattatcgacggagtcggcccggttcttgctgcccgcatcctagtccgcagcggccgcgccagccgattcccgaccgctgctgcgtatgccaattacaccggcaccgcgcccgtccagatcgcgagcgccgacgcctctcatcaccgactgtcgcgtttcggcgatcggcaactcaactccgccatctacacgatcgccatgatccagatccggatgccgtcgagcgccgggcgggcgttctatgagaagagaatcgccgaaggaaaatcaccccggaccgccgctcgcgcacttaaacgccacctcgccacacacctatggcgagtcatgctcgcagatgaaaaacggagcattcgagccgtatcgagagaatcccttgctgccgcttgacaaatagagaagca

SEQ ID NO: 7490 - DNA, 1144 bp, unidentified
  source 1..1144: mol_type = unassigned DNA; note = element_b9d9ae6
  misc_feature 1..2: note = core
  misc_feature 3..175: note = LE
  misc_feature 176..1129: note = CDS
  misc_feature 1130..1144: note = RE
  misc_feature 16..190: note = bridgeRNA
cttgtatctttacggttgtggatcggactgacctgcgcagccagcagccccctagggccgatgtttatcaagcccgtccccgagcgttgagcgcgtaggtgagaccgtccttttttgaagcccgaacggttgtaggaacgttgagttcgcataagcaaggaagggagcaaaggacatgtccgaattatttgcgggaatcgatgtatcgggccataggctggatgtggcggtgacagaggcgacagcgccgtggcaggtaagcaacgatacgcttgggatagacgagctggttggcaggctccgtgcgctgagtccggccttggtggtgctggaggccacggggggctacgagttcgaggcggcgtgtgcgttgcaggcagcggggctgtcggttgccgtcgtgaaccctcggatggcgcgagacttcgcacgggcgttaggcggcctggccaagaccgatgcgttggacgcgcggatgctggccgagtttgcgcgggtggtgcaccagcacccggagcgagaacgctttgtcaagcctttggccacagctgaattacagcgcttgcaggcgttggtgcagcgtcgtcgtcaactggtgcagatgctgacctcggagcggctgcgtctacgggtcgcgcatgtggccgcgcgtcctagcctgcagcggcatattgcctacctgaaggccgagctcgacgagagtgatggcgaggtggccagccatgttcaacggcatcatgctgaactggcgcaggctctgagcagcgtgccaggtattggtgcggccagcgttgccgtgctgctggccgagttgccggaactgggccagttggaccgaaggcgtattgcctgcctggtcggggtggctcccttgaatcacgactcggggcggatgcgcggacagcgccacatctggggcgggcgtgccacagtacgcggtgtgctctacatggcgacgctgaccgccgtgcgccataacccggtgctcaaagcgttctaccagcgcttggttgccgctggaaaaagcaagaaggtggccctggtggcggctatgcgcaagctgctgaccatcctcaatgcgatcgtcaaacaccgaacctcatggtgcccctccatgcaaaacacttgactagcaagacggttg

SEQ ID NO: 7491 - DNA, 1369 bp, unidentified
  source 1..1369: mol_type = unassigned DNA; note = element_b9e02d0
  misc_feature 1..2: note = core
  misc_feature 3..93: note = LE
  misc_feature 94..1110: note = CDS
  misc_feature 1111..1369: note = RE
  misc_feature 1124..1367: note = bridgeRNA
cgatgtaatggtctcctcccccttaacaatcggcgtcacaatgcgccatgatggagttgacaacaaccatcgataagtaaggaggaagaaaccatgactcacattacgacaattggactcgatttggcaaaaaatgtctttcatctggtaggctgcaattcgcatggaaaagtcatcattaagaaaagattacgccgagtacagcttacccggttcattgttaacctatcgccttgcttgattgggatggaggcctgtagtggtgcccaccactgggcacgtcaattcagggcgatgggacaccaatgtaaattgatgccagcacaatatgtgaaagcttttgtgcgtggcaataaaaatgattataacgatgcgctggggatttctgaagcggtcagacagccagaaatgcgttttgttgccatcaaaaccgaagcgcagcaagatacccaggcgctataccgcctccgtgagcagcgtatcaaggaacgtactggtctgggtaatcaactccgaggcctgctggcagagcatgggattgtggtgggtcgaggtattaacgtgttgagacgccaactccccgaactattgggcgcgactgataacggcttaagtccactgtttcgagaattattaaaccaggggtatcagcaattacagcagttggataagcacatcattgactatacaaaaatactcacgaggcttaaccagcaaaacgaggcctgccagcgattgcagaccatccccggctttggcccgattaacgccagcgtttttgccagtgtggtcggcaatggcagcgcctatcgatgtgggcgtgatgtatccgccagcctgggtatcgtccctggacagcatagtaccggtggaaaaaacacgttgttgggcatcagtaaacggggagacagctatttgcgatgtttgctcattcatggcgcacgtgcggtggtcatacaggccgccacaaagacagaccgcttaagtctgtggattaaccgcattcgggcagaacgaggctataataaggccaccgtggcgctggccaataagatggcgcgaatgggctgggccatcttacggaataacacgacctatcaaatagcgtaaaaatagacaaacaacatcctaccaacgattgcggagacattgatacagacgatgacaccacaggttagaccggcacattgaaaacctgatcattgcgacgatctaaatttaagatcgcaacctcgtaaaggacaatgtgtgcgcatttcatcaaggccagagagcacatgctgctttcatcaacaggccggatatacgagagcaatcctgtcactgtcattaatgatcattgtcttgcaaaatgggaggagaccatata

SEQ ID NO: 7492 - DNA, 1616 bp, unidentified
  source 1..1616: mol_type = unassigned DNA; note = element_b9e221f
  misc_feature 1..3: note = core
  misc_feature 4..279: note = LE
  misc_feature 280..1500: note = CDS
  misc_feature 1501..1616: note = RE
  misc_feature 11..299: note = bridgeRNA
tttggtacaataattacatagcttgcagccggtaccacggcaagatttacaagctatgcttgtttttagtataatgagaaggtaatggtctgacggtcactccttagaacttcgcgttcgttgatgaaagtgtcagccgccttcttattataaagattcgattaagcaggttgttctggttttttggaaaaccacgttcgtgtcactaaccaaaatgaatcgtaataagctctgtgcggaaacattacacatcttaaattcagaaagaaggaatgttttatgattagtgttggtattgatgtatccaaaggtaaaagcatggtttgcattatgaaaccctgtggcgaagtgttaaaaacgccttttgaaatgcttcactctatggaatcaatactccgccttgttaagctcatcaactcctacgatgaggaagtccgtgttattttggaagataccggacactaccacttacctgtggtaactctgcttgttgaaaacggtatctttgtctgctgcgtaaacgccttgcgaatgaaaaagttttgttctcaaagtattcgccgtgcaaagacggataagatcgactctgttcatatcgccgtttttggtcttacatactgggaagaattatctccggtactgccaacaggcgatgtttatcacgaattaaaattgctcgcacggcagtattatcaaactgtttctatccttgtaaaagctaaagtaaacctcggcaatttgctcgaccaagtgatacctaacattcaaactgttatgcaggataatccaagtaaccataagctaacagactttgttaagcgttattaccactacggtcatatccttgcgatgggcaaaagcaaattcacctcggattattgcaaatgggcaaaaaaacagggatactatttgtgcgaacgctcagcagagaaaatctttgctttggttcaaaatagtatccctgtgcttcctaactcatccgtcactaagattgtagttgtggaagcgatacgaatgcttcatgaaattgaggcatcccgtgacactattttagcacaaatgcaggactttgccaagaccttacccgaatattctgttgtaagagaaatgccttgtatcggcgatactcttgcgcctcgcgttattgctgagattggcgatgtgcgccgttttaaaaacaaacattctctgatcgcgtatgcaggtattgacgcaccgccttatcaatcgggcgcttttaatgctgccgaaagacacatctcaaagcgcggcaacagctaccttcgcaagacaggttatgaaatcatgcagagtcttatcaagcataagcccattggcaaccctgtttatgatttcatatgcaagaagcgtctggagggaaaatgcgctaaagaagctatgatagccggacttaacaaattcttacgcatttactatggcaaagttaccgaactttacaataatattgataagcagttagctgataaaaatatcatctaaaacattttctctgctggacggtaaaactactttcttgccgtcttatttgctttgctcttttttactttgaaaatatataatttttttcatttcacctcttgactttatttagcagg

SEQ ID NO: 7493 - DNA, 1358 bp, unidentified
  source 1..1358: mol_type = unassigned DNA; note = element_b9edd7d
  misc_feature 1: note = core
  misc_feature 2..73: note = LE
  misc_feature 74..1099: note = CDS
  misc_feature 1100..1358: note = RE
  misc_feature 1124..1354: note = bridgeRNA
taatgagatggtcaccctccaccctataagttactaaacttatagggtgttttcatttctgaaggaggccatcatggaaaacgtcatgctcatcggcatcgatctcggcaaacacagctttcatgtccacggacaggatcgtcaaggtaaaacactgctgcgcaagaagttcagccgcccacaactgatcgcgtttctcgccacttttcatccctgtaccatcgtcatggaggcctgtgccggagcgcactgcatcgcccggcaactggccagctttggccatgaggccaagctgatctcgccgcagttcgtgcgccccttcgtcaagagcaataagaacgacttcatcgatgcagaagccatttgtgaggcggccagccgtcctgccatgcgttttgtcacgcccaagaacgaggcccaacagacgctttcggcgctgcaccgcgtgcgcgaatcgctggtacgcgagcgtgtcaaggcgagcaaccaaatccacggctttctgctggagttcggtatcagcttgcccgtcggccacgcggcgatcaagcgcttgccttccgtgctggcagaacagcgcctgccagcacggctggtacaagtgctggagcgactgcatgcccatttcaagtacctcgaccagcagatcgccgagatcgagaaggatctgacccggcaagtcactgaagatgatctgggccagcggctcatgacggtaccgggtatcggaccgatcaccgccagcgtgctggccgccgaagtcggtgacggcaagcactaccgctgcgggcgtgacttcgccgccgccgtcgggctggtgccacgccagtacagtaccggcggtaaaaacaagttgctgggcatcagcaagcgcggcgacaagaatctgcggcgcctgctggtgcagtgcgcgcgggcctacatgcagcgactggagcgccaacgcggacagctggcacaatgggtccgctctatgctcacgcgtcgccactcgaatgtggtggcgtgcgccctggccaacaaactggcgcgcatggcatgggccatcgcggcccaccataccgaatttgaaataaaagaggcccccatgacaacatgagggcctcccagactcaccgtttgacagcacacctacctggttttgcgactgctgatattggatgacgtgaacggcacaccggcctgccggatactctggctaaaaaatcggctgtgaaagccgagcgggttttcaggaccgacaggcgcgactctcatcgtggcgcggagatccatctccaaccagacgccggatagatttaagcaagcctactcacatcatacaaaatcagcttgcaaaaaggagggtgaccatagat

SEQ ID NO: 7494 - DNA, 1278 bp, unidentified
  source 1..1278: mol_type = unassigned DNA; note = element_b9f0648
  misc_feature 1..2: note = core
  misc_feature 3..238: note = LE
  misc_feature 239..1264: note = CDS
  misc_feature 1265..1278: note = RE
  misc_feature 62..220: note = bridgeRNA
tccattagactaataactatgaatattttaaaataaaataaagtttaaaaataaatcatataccgaataaagaaggctgaacaagtctaatcgggctcaaaagtaaaaagcttaaattgcgaaaaagacccagccttttgatgattaaagctaaataggctttcattgccaataaagcgattattaatggagtaagctcatatcatcgtttattcggttatagaaaggaattattattatgaaaaagaacctcttttttatcggtcttgatatctcaaaagatgattttgctgccagcatttacgagactcccggaaagagtgtgatcaccaaagtagccattcccaataaaccaaagggttttagccagttgatctcgtggttgaaagaacatcatatcaccaaatccaattgttgtatctgcatggaagccaccggcgtctattcacaagcgatagcctattatcttttatttcagggttttccggtcagtgttgaaccacctcttaaagtgaaacgggcctttgatccgatcggtcataagaccgatccggtagacagtcaacagattgctgaatatgcctaccgctttcaggatgagctgaccacctggaaaccaaaagaggaaatcctggaaaagatccggcaattactgagtgtccgggaacagtttaccaaacagaaaacagccatcaaaaatgccatgcatgcctacagcctgcaaagggtccaggtaaaactcattcctaaagcccatcaggagaccctggcacagattgaaaaacagattgctagaatcgataaggaacttgcccggtatatcaatgaagatcccctgatctcccagagggtcagccatctgggaagcatccccggttacggtatgcttttggctgcccatctattggttatgaccgagaactttaccaagattcagcaatacaaacgattggcagcttttataggtatcgtaccctatcagcatcaaagcggtagttctgtgcgaaaacgagctaaaatccagcattttggacccatgcccagccgcaaactcctgcggcttgctgcccaatcggtagccacccatgatgccacctttagacactattacctgcgtaaactggctcaggggaaggccaagggtctggtgttgaacaatattgccaataaattgctcaaagtggcttgttcgatcattcggaataatacccgttatattaaggatcatcgatctatacatccaatgtatttaaaaagtgcttgacaaagtcatagtgt

SEQ ID NO: 7495 - DNA, 1719 bp, unidentified
  source 1..1719: mol_type = unassigned DNA; note = element_b9f0dbf
  misc_feature 1..2: note = core
  misc_feature 3..352: note = LE
  misc_feature 353..1582: note = CDS
  misc_feature 1583..1719: note = RE
  misc_feature 46..320: note = bridgeRNA
ctcgtattatataaatcagtccttacggattttgatactttactacttgctttctggtcactgcatgataacctctaatcatcattggcgttggtcaactggtataggttatcgtctcctgtagttttaactacttaattagtctgccgcccaggcaatcagctaatttacgaactcacatgctatatcgattagtgaatcacctaattctgagtaggattaggtgcagctttgattcgctaaccaatgaaatactgatacttgcgaggatgtctttagcgattgtaattaggggttatcatgcagtgatcagattaagaccagtaaattttaatgaaaggaggccattccaatgaaactatttgtcggtattgacgttagctcaaaagatcttgtgacttcaataatttccaaagaaaaacacgaagttgttttccgaggtaactttgtcaatgatttgaaagacgcaactgaattaaagaaacagactattaacacggcgaattcaaatcaaattgaccaagttattatcggaatggaagctacttccatttatagttttcacccagcaatgttctttcaagaagacattgatctgaaagcttttaatactcaatcagtcgtcgttgatcccaagaaaactaaacgttttcacgatgttttcgctgaagacaaaaatgatcaaattgatgcttattacattgcagattacttacgtgttggtcattattcgattggaattgttcgtcaagaaaattacattgctcttcagcgcttaacccgttctagatatgagattgttcaaagcctggttcgagctaaacaacactttattgaaaacttatactataagctcaataagcttgttatctctgatgaacttaatacttctatatttggttcaaccatgatgcagttattaactgaagatctgactactgatgacttactcaatatttcaatcaatgatttaaccgactatttggctgaacacggtcgaggtcgcttcgcagaccccgaagctttagcgaaaatgattcaaaaggctgttcggtcttcgtaccggctagataaagtcgtagctaattcggttgacgcggttctttctgtctatgctgaagagattaaggcatttcaaaagatgattaaggatcttgataagtcaattgagaaagtcgttaaagtaactgatgatgaacaaattctgcgctcaattcccggtatcggaccagtctatgcagctggtattttagctaaaattggtcaaatcgatcgatttgacaacgaagctaaattagctaaatatgctgggctttcctggagagaaaagcaatcgggaagttacactagtgataatacaccgttaaagagaactggtaatacctatcttcgttattacttggttgaagctgccaacctagttcgaacgcacgatccagcctttggcgagtattatcagcgtaaatacaaagaagtaaaacatactccttctaaacgagccctcgttcttaccgcacgtaaattaatcagggtgatttacttcctactcaaaaatcaccaaatttatcaagaaaagaggtaattggtataggaagataaaatgattttcgacgcttagttttaaaatcaccttggaaccaaggcttatttaagtacgccaaaaatctggtcaaagcaatcaagccagtggtaattccatcttgacttattaccacatga

SEQ ID NO: 7496 - DNA, 1418 bp, unidentified
  source 1..1418: mol_type = unassigned DNA; note = element_b9f1b03
  misc_feature 1: note = core
  misc_feature 2..80: note = LE
  misc_feature 81..1106: note = CDS
  misc_feature 1107..1418: note = RE
  misc_feature 1196..1412: note = bridgeRNA
taatgagatggtccgccgcttgattctcccgtgttaccaggaggatcgtagaagcaggttcgacaaggaggatcatcgctatgcagatacagtccgttggcatcgacctggggaagacgacctttcatcttgtggcattgggagcggctggcaagctgctggtgaaaaaaaagttttcgaagaagcagctgttggcctatacggccaacttgcagtcttccctgatcggtttggaagcctgctcgggagctcatttcctcggccgtgccttgcggagtcagggccatgatgttcgtctgatcgcggcgcagtttgtgaagcctttcgtgaagtcgaacaagaacgacttcgttgatgcggaagcgatcgctgaggcggtggatcgcaagaacatgcgcttcgtcccgatcaagacagatgaccagctggatctgcaggcgatccaccgtgttcgtgaccggctgatctctcgacggacggccgtgatcaaccaactgcgcgcgttcctgcttgaaagaggtctggtgtttgcaaagacgccggcgaagctcaaggctgccatggccgacatcctcgagaacgcggaagccggcctgacgccattgatgcgtaacctgatcaacacgctgtgggatgagtggaagaccgtcgagcggcaggtcgaagaactcaatgacgaactggagcggatctccgcggcagatgctggctgcacgcgcatccggcagatcccaggcatcgggccggtggttgcgacagccatcgttgctgcaatcggcaacggcgctgctttccgcaagggccgcgagttcgctgcgtggctgggcgttgtgccgcgacagtattcgactggaggcaaggcgaagctgctcggcatcagcaagcgaggcaacgtctacctgcgcaagatcctgatccacggcgcccgagctgccgtgctgcgcatccggcgagaccgtgcgcccatcggggcctggctagacaagctggacgccagggctcataagaacgtcgtcgtagtcgccatggccaacaagctcgcccgtgtcgcctgggcggtactgtcgagcggcaacgagtacaggtcaacaaccgtgccagcctgagcaagtgaggaaaagacgccttcggcttggaaacgcttcgcgttcccactttccctcactccgacgacggatctataaactttccccaccgaagtctgcataggacagcaaggacgaaagaacagtcacaacggcgtgtctaagagcctgatcctgataatggtcttcaacgaccgaggcgtttataaggccacacacacgcgcatctcatcatggccaggaggaagcatctccactcaaaggccgaatacatttgcgcagacttgtcttctcgcccaaactaacccttgcagtcgcgcggcggaccataca

SEQ ID NO: 7497 - DNA, 1478 bp, unidentified
  source 1..1478: mol_type = unassigned DNA; note = element_b9f7592
  misc_feature 1: note = core
  misc_feature 2..135: note = LE
  misc_feature 136..990: note = CDS
  misc_feature 991..1478: note = RE
  misc_feature 1215..1476: note = bridgeRNA
atggtatggacgcctccccctcgctgatcgactgcggacggtggagatacaggtgatgaggggggcctcgcagtcgacggcatcgagtgccaaagtggaagttcgatctacccacttacagacggaggccccgaaatggatcgtacgacgtatggcttggacattgcaaagaacgtgatgcaactgcactgggttgatggcgagacgggcgagatcgggcgcaggaagctcactcgagccaggctgggcgagttcttcgcgcagcggcagcccgcatgcgtggcgatggaggcgtgcggcagtgcgcaccactgggcgcgcgtgctgggcggcctcggacaccaggtggagttgctgccggcgcgccaagtgcgcgcgtttgtgcgcagcaacaaggacgacgctgccgatgcacgcgcgatctggctggcggcgcggcaatcggatatccgtcgcgtaccggtcaagaccgtggagcagcaagcggtgatgtcgctgcaccgggcacgttcgcactgggtgagcgtgcgcacggccacgatcaacatgctgagaggcttgctgtacgagttcggagtgttgctgccggggggcaagaaggtgggactgaagacgataggagtcaagcgggccgagatcgacgatcgactgccgctgctgatgcgccggctggtggacctgcagctcgaaacgctcaagggggtcgagcgaagtatcgatcagctcgaagccgagatcgccgagcagcaacgccagatcggccaggcgcgcacgctgcgcgaggtgcccggcatcggtgtgctcggtgcgacggcgctggccgccacgctgggagatgcgagcggctggcgctcggggcgagagttcgcagccagcctggggttggttcctgcgcacagcggaacgggcggcaagacgcgcatcggccacctgagcaagcgcggtgacccctacctgcggacatgctcatccacggggcgcgggcggtgatcgcgcaggcgaagctcaagcccgcatggctggaagaactgctgcgacgccggccgctgaacgtggcggtggtggcgttggccaacaagatggctcgcacggcctgggcgctggtggcgcacgcgcgggcgtatcgatcggagtggaaaagaactccgccaagtggctgcggcgcgcaagcgcaggcagcttagatcatcaacctaagacaacaacctataggagtggatgccgcaaagagtgcgtgagtcgagtcgatgaagtgatggtggagcggtcggaccgcgggtcgggtaaagctggatgtttgtctgggcaagccctggtgcaaagcccactcaggagatgagcaccggccctgcgaatgaccatcaaggccagcggcgggcttcggtccgatctgcaccaacaggccggatatgagaccgcagtcataccgccagccggaacttcaagaactcgcttgccacacgggaggcgtccatata

SEQ ID NO: 7498 - DNA, 1511 bp, unidentified
  source 1..1511: mol_type = unassigned DNA; note = element_b9f7e5e
  misc_feature 1..4: note = core
  misc_feature 5..241: note = LE
  misc_feature 242..1495: note = CDS
  misc_feature 1496..1511: note = RE
  misc_feature 34..205: note = bridgeRNA
gtcactagggcaccatccttcctacggagccggatgagagggttccattaggaactcggcgagggccgggagatggcttggttgggtcgcccttcgagggccaagatgacaccgccactcccagctcttgccggggctgccgaccggccacagggagacgcgccgcagagcgccggttagtgaccatccggcttgcagccccggtcgtcgggccacatcgttgccacgttaaggagaactggtgtccctgaacgtttctggagcgcttctgttcgtcgggatcgactgggccgccgatacgcatgctgtctgcgtactcgatgccgccggacggcgggtcaccgccttcaccgtcgagcacactgcaatggggttggccgggctgacacagcgcttggcccgtctcggtgatccggagcaggtgcctgtcgcgattgagcgcccggacgggcgcttggtcgacgtgctcttggaggcgggccatccggttgtgccggtcaagccgaatgcgatcaaggtctggcgcagcggtgaagtgctgtccggcgcgaagtccgacgccggcgacgcggaggtcatcgccgaatacctgcggttgcgtcaccacaagctgaatctggcgacgccctactcggccgagacaaaggcactgcgcactgttgttcgttcgcgcggctaccttgtcgacatgcgcatcgcagccaccaaccagctgacggcactgctcgacctgcactggcccggagccaaagcgattttcgccaacgttgagtcgtcgatcgccttggagttcttgacctgctaccccaccgcccgcgacgctcagcgccttggtgccaagcgattggccgcgttctgcgccaagcacggctacagcggccgacggacgggcgagcagctgctggcacgattgcgcgccgccccggccggcaccctcgacatcacgttgtgcaaagctgtccgcgatgcagttcttgcgctcgtgaccgtcctcaaagctctcggcgctgcgctgaaggatatgggccacagtgtcctggcccatctcgaagagcatccggacagcgcggtcttcacctcgctgccgaggtctggccagatcaacgccgcccagatacttgccgaatggggggacagccgccatgcctacgaaggccccgactcggtcgccgcactcgccggcgcgacacccgtcaccaaggagtccggcaggcatcgagccgtgcacttccgctgggcttgcaacaagcgcttccggcatgccatcacgatctttgccgacaacagccgccatgcaagcccttgggccgcagccgtctacgccgcagcacgcgcccgcggtcacgaccatgcccacgccgtgcgggcgctggcacgcgcatggatccgcgtcatttggcgctgctggatcgaccgtaggccatacgaaccggcccgacacggcaacgcggcgcggatgctcgaaactgcacaatccgaactcgttgccgcctgaggttgacacagggagt

SEQ ID NO: 7499 - DNA, 1393 bp, unidentified
  source 1..1393: mol_type = unassigned DNA; note = element_b9f9220
  misc_feature 1: note = core
  misc_feature 2..97: note = LE
  misc_feature 98..1129: note = CDS
  misc_feature 1130..1393: note = RE
  misc_feature 1165..1391: note = bridgeRNA
taatgtaatgaaccatccccacctacgccgctagaccggcggggtcttccagactagctttagtctgatggaccttaacttcggatgggagatcgacatgactattagtctgctgggcattgatattgccaagaacacttttcagctccacggcgccgataattccggcaaggccgttcacaaaaagcgcatggctcggcgtgaactggccgctcatgtggccaacctctcaccttgcactattgtgatggaggcatgcggaggagccaactactgggcgcgagtctttcaacgcagcggtcattcagtgaagctgatcagtccccagtttgtaaagcccttcgtgaagacgaataaaaatgatgctaacgatgcgcaggctattgtcgaggcggcgagtaggccatcgatgaattttgtcccgataaagcaggttgaacaacaggacatccaatcaatccaccgaatacgcactcgaatcgtcaagaaccgaacagcgttgatcaatgagataagaggtctgtgcctggagtacggtgtcgttcttatcccaggtgccgcacgagtcaaatcttcactgtgcgtagctattgccgacggcgataacgaactgacgccctcatcacgggagtccttccagagtctctatgaagaacttgtcgatgttgaagccagagtgaaatacctgaacaccaagattcggcaattatgtcgtcagaatgaaagctgtcagcgcatactgaagatcccgggcataggtgaactgacagccaccgctattgtagcggctgttccagatccaggagagttccgcaatggccgccatatgtcagcatggctgggactggttccccggcaatcgtccagtggggacaagcaggttctcttaggtatcagcaaacgaggcgaccgctatttacggacattattgattcacggcgccagatcagtactgagtcactataaagatctggataacgactataatcgttgggtgggcagaaaaaaggcagcgctcagccataacaaggccgcagttgccttggccaataagaatacccggatcatctggtcgatgctgagctcgggagaggagtttaactatggagtacaaacggcggcggcctgatactcaatatcggttcgctttatttaactaactggaaactaccaagagtttgcttaagttgatttgaatgatggtgaataggtcataccgactcctttagaacctggaagttgccacggcccttagaggtcttggttctgatgaggtggaggagcgcggatttacatcagggcacaagcttggcttgaatgccgaatatatgactgcaactcagacctataaaaaccatcggtaatcgacttgcaaaaggggatggttcatata

SEQ ID NO: 7500 - DNA, 1354 bp, unidentified
  source 1..1354: mol_type = unassigned DNA; note = element_b9fca4f
  misc_feature 1: note = core
  misc_feature 2..66: note = LE
  misc_feature 67..1089: note = CDS
  misc_feature 1090..1354: note = RE
  misc_feature 1121..1342: note = bridgeRNA
tgatgctgtggacggctctccaacccaccggcagcatcggcttccggttagagctggaggagagccatgggtccggtagtcacgattggtttggacatcgcgaagtcggtgttccaggtgcacggcgtcgatgctgaaggcggcgtcgtcattcgacagaagctgacgcgagcgcggctgctgaagttcttcggcaagctggatccatgtctggtggggattgaggcctgcggaacctcgcatcactgggcgcgcgaactgatcgagctcggccacgacgtgcggctgatgccgccgagctatgtgaagccctacgtgaagcgccagaagaacgacatggccgatgcggaggcgatctgcgaggcggtcactcggccgaccatgcggttcgtgccggtgaagtcgcccgagcagcagagcgtcatggtgctgcatcgaacccggtcgatcctgatccgccagcgcatccagatctcgaacgcgatccgcagccatatggcagagttcggcatggccgccgcggtcggccgtcagggcctccaggcgttgatcgcggtcgtggaagagtcgtctgatccccgcgtgccgacggaggcacgaggctgtctcggcatgttggccgcgcagctgcggctcgtgaacgagcagatcctggacacggatcgactgatcaggaccaacgcccgctcgactgaggtcggccgccggctgatggagatcccgggtgtgggtccgctactggccagcgctctggtcggtacgatcgccgatccgagggccttcaagaccggccgtaacctggcggcttggatcggcctcgtcccgcgacaaaactccagcggcggcaaggagcggctcggcggcatcaccaaacagggcgatcgatacttgcgacagatgttggtcgtcggcgccttggccgtcgttcgatacgccgtccgtaacggcgcgcgccgaccttggctcctccagttgctcgcgcgccgaacacctaaggtcgccgccgtcgcgctcgccaacaagaccgcccggatggtctgggcgatcatgacctctggcgaacgctaccgggagccgttggcggcatagagatcaggccgaggcggagcgcttaggtcgacgaacttgggaagggcggacaggatgtaatgcgacagccggtcgataccggaaggcgggaaaacccacttgcgccagagcgccttgagcgcgtgcttttggtcgggacccgccttcgcggaaggcattatggccagcggtcatgcgtaccgcaccaacaggtcgaacacatggccgcaccgaccagctcagcagaacgtcagatcacccttgccaacggggagccgtccacaca

SEQ ID NO: 7501 - DNA, 1597 bp, unidentified
  source 1..1597: mol_type = unassigned DNA; note = element_ba09502
  misc_feature 1..2: note = core
  misc_feature 3..263: note = LE
  misc_feature 264..1466: note = CDS
  misc_feature 1467..1597: note = RE
  misc_feature 13..283: note = bridgeRNA
ctattacaatataaattggttggaaccctcggcagccagccggaggtttcgtccgtctcgtgccaaagctacaataaggggagcaactggctgacgactcctttcttgggcgttgatgtccgtgatttagactgtcagccatccccttattgcagcgttcgatttgagcaggttgagccatagagttcgtgtcacccaatagattgaatcggcaatgagaaaaagatggattccggttgcaaattcgtatgggaggtagatatatgaactctgttggcattgacatttccaaaggcggaagcacagttgcagtcatgcgtccctttggagaggtcgttatctcgccctttgaagttcgtcacaccgacagtgaactgagcaaactggcaaggcagctcaaaagcctagacggtgtgacgcgcgtggtcatggaggccacagggaactaccatgcgccggtggcaaaactgcttcacgacgcagggttatatgtttccgtcatcaatgcaaagctggtgcatagctacgggaacaacgatttgagacgggtcaagaccgaccgaaaggatgccataaagccgacaaactacggccttgaccgctggcttgctttgccgaggtatgtccctgaggaaaatacccggctgctgctgaagaactgctaccgtcagtaccgacagtattccaaggtacagacggttctgaagaacaatctgatttccttgctggataccgtctttcccaatgcaaaccgtttattcagcagtcccgcccgtgcggatggaagtgagaaatgggtggactttgtggcagagttttggcattgtgaatgcgtcagtggacgcacagaaaaggcattcatcagcaagtaccagaagtggtgcaggaagcatggttacaatttcagcgagggaaaagcctgcgatatttatgctgaaactggcggacacattggcgtcatgccaaagtctgaaactactaagctacttgtggagcaggcagtgtcacaactcagggcaacttctgctgcactcgctgctctcaaacaggaaatgcactcacttacttctcaactgccggaatatccagtcgtcatgaagatgttcggtgtaggaccaactctcggtccgcaactcatagccgaaattggggatgtgcgccgcttttattccaagaaagcgctcgtggcctacgctggactggatgctccaccaaacgattccggtgatgttaccggcaggcacaaaaacatgagcaaaatcggtgcatcatcactgtgccggacgctgttccttgtcatgagcgtctatttgcagaactcacccctggatgaaccggtctaccagttcatggacagaaagcgagccgagggcaagccctaccgtgtctacatgatggcctccgccaacaagttcctacgaatctactacgccactgtgaaagcctatctggaagcgttagactgagtctaaaattagctgaataggtatttggctggccgcctttcaattttgagacgcaaagcggcttagtttaatgcgccctttttccttactctaaaattttcaatttttacgcttgacttttcttagcaggt

SEQ ID NO: 7502 - DNA, 1530 bp, unidentified
  source 1..1530: mol_type = unassigned DNA; note = element_ba098b0
  misc_feature 1..2: note = core
  misc_feature 3..242: note = LE
  misc_feature 243..1178: note = CDS
  misc_feature 1179..1530: note = RE
  misc_feature 3..221: note = bridgeRNA
cttgtattatagagtagtagtttttagtgaccctctccaaggtcatgtgctacactgcaagggatgctgtggattggtaacaatctcctaccgcacagacggttccagaaagcctccaaccacagccctttgcagttttgttaatcagttagataccgccagacggtttatgaggaacaaggttacaaagcaaagtgttctgtggatgcaacatcataaatctttactctggaggtatcattatggtttgcgttgaaattgatgtggcgaaggacaagcaccactgctttattctcagttcggaaggagaggttctggccgatgtatttaccgtcgccaacaacagagacggctttgagaccttgctgccgcgtattcaatcctgtacccaccctacagacaaaataaaagtaaggcttgaggctaccggacactacagctacaacatcctcgggtttcttcttgagaaaggtctggccaccttcctcatcaacccgctgcacaccaatctctaccggaaaagcctaagtctttgtcagactaagaccgaccggatcgacgcacagacgattgcatctatgctcatgtctaatgtggacctcaagtcctacacagacacagcataccacaacgaggagctaaagtcactcacaagatacagattcgacaaggtgaaagagagagccaagctcaagcagtccgtttctcgcctggtcaacatcctgttcccggagctggaaacgctggtgccaacgctgcacatggcgtccgtttatgccatgctgggcgagtttcccggtgccaggcagatcgctgacgcccatttgacgcacttcaaggctgtactctccgacgcctcaaaaggccgctatgatcgagacaaggccgctgagatccgcgaggccgccaggcgctcccttggctccgccatgcccgccaagtcgcttgagcttcagcatacgattcgtctgatccgtgagctggacaaagagatcgacgagatcgaatccaccatcaaagcaatcattgacgagatggctccgccgatccttatcatccccggaatcagctaccgtatgggcgccatgatcctggctgagatcggtgacatcactcgcttcgactcaccggacaagttgctggcctttcgccgtctacttacgaatccggcaagctaaagactaccggcgcttacgctcacatggagaagcgaggttcacgctgcctgcgatatgcccttttcaacgctgccaagtacgtctgccattgggaaccatcattcgccgcctatctcgccaagaagcgcgccgagggcaagcactacaacgtcgcaatctctcacgctgcgaagaaggtcgtgcgccttatctttgctttacagacttccggcaaggctttccatccagcttgatttcacacagtccataccgctcagagcgccccgctggacgctcagctttctatacccttttcaccgcctacaccaattcacaacttcttgtattttggggcttgactttaatagttagt

SEQ ID NO: 7503 - DNA, 1581 bp, unidentified
  source 1..1581: mol_type = unassigned DNA; note = element_ba12776
  misc_feature 1: note = core
  misc_feature 2..247: note = LE
  misc_feature 248..1447: note = CDS
  misc_feature 1448..1581: note = RE
  misc_feature 6..223: note = bridgeRNA
tcgtattatatggttagtcagtcattgtactggctgacctattttaataggttttatccttggggaagccggggtaggacgctcgcgcccgtgggacactgatcccgtccgtaatactgtccaccccttccttatagaaacatgtttgaggctggttgggacatgatcccgtataacacacgaagctatgaaactataagtgaaagaggggcgcaccggcgaatttattaaaggagttgtgattttcatggatcctgttattggtctggatatcgctaaaggcgaaagccaggtccaagcctttttaaaaaggaaacaaacttataagcagagctttaaatttgctcacgatctacagggacttcatgctttttatcgattttatcaagaagtggaacaggtttctggccaaacaccagctgtaatctttgaatctactggacactatcatgagcctgtgcttcaatttcttgagaatcatgatgtaacgtattatttaatcaatccggtggtttcctatgaagccagaaaaacgagtctacgcaaagtgaaaacggacaaaattgatgctttccatctaggggagctgtactacaaagaagatttggaagttttccagagaaaaacagagcagtatttaaatctgcggcagttaaccagacaacatagtgctttaacagacagctatgtcgaaatcaaacttcagtttcaggctgctctggatcagattttcccggaatatcatggtgttttcagtgatctttatggcaagatgtcgctcaacaccttactgcattatccgacttctgtggatgttcaaaagatctcgcaggaaaccttggccaccgaaatgcgtcaatttggagccaaacgttctgatgcatggtttaggaacaaagctgctcaattaaaggatgcggcggatcgcaatccatttcaacagccagtctgtcatggtcatattgtcagcatacagatgtatattcaaatgctctttcaataccaggagcacctatctaagttacaaaaagagatagacgccctggctgaatccttttatgattatgaattgatccaatccattcccggcatcggaggcaagattgcggcaacaatcctctctgaaacaggtggaatgaatcagttcgaacaccccaagcaactagctgcctatgcgggtgtagacccttccgtttttgaatccgggaagtttaaggcctccatcaacaaaatcacaaaaagggggtcatcaagattgcgtcagactctttatacggctgtacaatgcggtctcgccaaaaatcggaacaagaagcttatagccttctatgatcgcaaacgaaacgagggtaagccacacaaagtcgctgtaatcgcttgtgctaataaactaattcattggattcatgccatgttgaaacggcaagaagtttttgtagatcaataatatagagtttgatttattgccaattttcaaaaccttattggcctcacaataaggctatttggattgtttaattttagtctgacatgttttttataacttttttagaccgaattgttgacagctattagctggta

SEQ ID NO: 7504 - DNA, 1210 bp, unidentified
  source 1..1210: mol_type = unassigned DNA; note = element_ba1a9e5
  misc_feature 1..4: note = core
  misc_feature 5..243: note = LE
  misc_feature 244..1197: note = CDS
  misc_feature 1198..1210: note = RE
  misc_feature 85..254: note = bridgeRNA
agtcctagtatctcgggtacgagcggcattggaccaggcttacagaattgatgtggctggttatattgataagagctcatccctgatggccatcagggatgagctgcgactttgtagatcgtcgagtcctgggtgctgatagacaccgtgggtcagttggatcgcagagccgcatcgttttcaacccgaacagtcgctagagccactcaggtgagctcgtattttactaggatgggacacacgatgaaagactcctcttcaatttctgtggttggcattgatgtttctaaagattcactcgatctcttccatacgattaatggccagcagcagaagatcgcttatcagcaggattccctcaagctgcttgcccggcagatcatcaagctcaacgcaaccgtcgtcatggaagccacgggtggctacgaaaagaaactggtcaaatatttacagagccagggaattgcatgtgccgtggtgaatccgaagctgattcgtgactttgccagagcctgtgggaagcttgagaaaaacgatgccatcgacgccaggatcatcgcctcttttggacagatgatgcaaccgaggacgatgggaaaaatcgatcgaaacagggagaaactcaagttgctggcaactcgtcgagaacaggttcaaagtatgattacccaggaatccaatcgtcagcagcaaattgaggatcggcaaattcgggccttcattcaacgggcgatccaactctatcagaaacagcttaaaaaactggacaatgaaatgctgaaggtcattgaagccgaccagaccatgaaacagaagtccgaaattctgctctctgcgaaaggtgtcggcccggcaacaaccgctaacctgattgccgggctgcctgaactcgggcaactgaatcggcagcagatcgccaagctcgtcggcctggctcctctcgttcgggacagtggcaaattcaaagggcagcgcagaacatatgccggcagaagccagatacggcggatcctttatatggcgaccttagtagccacgcgctggaacagtcgcatcaaagcattttacttgtccttattggaaagaggtaaaccgaagaagctggccatcacagcctgcatgagaaagtttatcaccatcctgaattccatgatgaaaaacaatcagacgtgggatcaaaatcttcttgcttcttgacataatccaagac

SEQ ID NO: 7505 - DNA, 1343 bp, unidentified
  source 1..1343: mol_type = unassigned DNA; note = element_ba2268e
  misc_feature 1: note = core
  misc_feature 2..66: note = LE
  misc_feature 67..1071: note = CDS
  misc_feature 1072..1343: note = RE
  misc_feature 1110..1341: note = bridgeRNA
taatgagatggtcacccccaccctgtgagcggtaagctgacagggttttcttttggagggatcatcatgcaaaacgttacgctcatcggcatcgatcttggtaagaattcattccatattcattgccaggaaaaacacggcaacccattattacgcaagaagttttctcgcactcaactcacccagtttctcgccacctgccagccttgcattgtcgcgatggagtcctgtgccggtgctcatttcatggcccgtcatatcagccagttagggcatcaggttaaacttatttctccacagtttgtccggccattcgttaaaagtaataaaaatgatttcatcgacgctgaggccatctgcgaagccgcttcccgtccctccatgcgctttgtgacaccccgaactgaagatcagcaggccatgtcggctctgcatcgcgtccgcgattcactggtcagggaacgggtcaaaaccaccaaccaaatgcatgcttttctacttgagtttggggtcagcatgccacgtggtattgccgtgataagacggctggcggttgtgctggaagagcacgaactgccgccttatttagcgcgtttactcacccgacttcatcagcattatggctatctctgtgaacaaattgaagaagtcgaaaaagagttgaaaaatcatatagctgatgatgaaaccgcacagcgactgctctctattcccggcgtcgggccagtcactgccagcctgctcgccaccaaactgggggacgggaaaaactacgccagcagccgggattttgcggcatcaacgggattagccccccgccagtacagtactggcgggaaaagtaccctgatgggtatcagtaaacggggagataaaaatctgcgacggctgctggtgcaatgcgcccgtgtgtatatgcagcggctggaatatcagtcggggcgactggcagagtgggttcagaggcaactgacgcggcatcactcgaatgtggtggcctgcgcactggcgaacaaactggcgcgaatcgcctgggcggtaaccacacaacaaaccgtcttctgtaaataaaagagctaaccgttaatccactgtcagctcaatgagttaccaagtgactttctggttttgcgacgactgattattgatgacatgaacggcacagcggcctgatgataaacctgaaataaaaaatggctctttgaagccgacgggatttttaaggttcatcaggcgcggaactcatcatggcgcggacatccttgtccaccagacgccgaatagatttacgcaagcccatcataaatcaaaatcggtgttgcaaaaaagggggtgaccataga

SEQ ID NO: 7506 - DNA, 1413 bp, unidentified
  source 1..1413: mol_type = unassigned DNA; note = element_ba24367
  misc_feature 1: note = core
  misc_feature 2..63: note = LE
  misc_feature 64..1092: note = CDS
  misc_feature 1093..1413: note = RE
  misc_feature 1185..1407: note = bridgeRNA
tattggaatggtccgccgcttgtaccccagatcggattatcttctctggcaggaggtttcaacatggaaatttcgacgattggcatcgacctaagcaagaccacctttcacctcattggccacagccctcgtggtgagatcgtgcttcgcaggaagctatctcgcaagcaactcttgatctacacagccaacaaacagccgatgctgattgggatggaggcgtgcggaggagcgcactaccttgctcgtgcacttagggaccaaggccacgatgcccgattgatgccggcacagtatgtgaagccctacgtgaagacgaacaagaacgactacctcgacgcagaagcgatcgcggaagcagtgcagcgaccgacgatgcgcttcgtgccgatcaaaactgatgagcagctggatctccaggctctacaccgggtgcgcgatcgttgggtagcaaggcgcactgcggtcatgaaccaaatacgcggcttcctgctcgaacgcggcatcacgatgcgcaaagggccttcacacctgacgacagcgctacagatcatcttcagggatggtgattcttctttctctggaaggttgctgcatctgattattgaactaaagcacgaatgggatgagctagagaggaaggttgcggaagcgaccgccgagcttgcacggatcgcaaaacaggatgacggatgccacaggttgatggaggtaccaggcttcgggccgatcgtttcgaccgcactggttgcggcgatcggtaatggaattagcttccgaaaaggcagggatcttgctgcctggttaggactcgttcctcgacagcattcgacaggcgggaagactagattgcttggcatcagtaagcgaggaaacgaatacctgcgacgtatgatgcttcatggcgctcgatctgtagtaatgcagatggagcgaaatccttctgctcttggggagtggctaaccggtctttcggcgaggagccatcgcaacgtcacggtagttgccctggccaacaagatggcgagaattgcatgggcgatccttagcaagggcactcactactctgcgcctgcactcgtggcagcttaaaacgagggccggaaaagatgcccgctgatgcgggcttggaaatcgcatacgcgattcccactttaccaaccctccgacgacgaagtgtcctctcgagtttgcgagacaaaatcgatgtgtgagtgaacggtctcaaccggcgttgcttaagtctgtgtgggaatgagaacccttagggagttcgacccactttgtagaccagcgacgcgcggactccattatggccaggagctcagctccacaaacaggccggatacatttgcgcagaccaaaaacacttgccacaaagatttaacttgcaatctggcggcggaccataca

SEQ ID NO: 7507 - DNA, 1593 bp, unidentified
  source 1..1593: mol_type = unassigned DNA; note = element_ba2928e
  misc_feature 1..3: note = core
  misc_feature 4..263: note = LE
  misc_feature 264..1463: note = CDS
  misc_feature 1464..1593: note = RE
  misc_feature 35..283: note = bridgeRNA
tttggtactataaaagtgtagttgttaagtcagtatacctgataagataactgcacttatttttattataattaagggagtaattggtctagcggggtcgtttttgtattaaccacatccgtcataaaaactgttagccatcccttattataagcattcgattaagcaggttgaaaccaatagtggctttcgtgtaacgaaccaaaatgagtggtaataagtgtaggtggagacaattacaaaacttatattggaggttgtatatgattagcgtagggattgatatttctaaggggaaaagtacagtgtgtattctaaaaccctatggagaagtgataagtaaaccttttgaaataagtcatacagaaaaggatttatccgagttagcaaggatgattgaaagattagatgatgaagttaggatagtgatggaagccacagggaattatcatcttccagtgttggcctttttaaaagttcaaggcttttttgtagctgtaattaatccattagtgatgaagaagtatgcaagtactgttttgcgcaaaggaaagaccgataaactagatgcaataaagattgctaattatggattggattattggtttcatttaagaagtcaggaaatgagcgaagaaacatatatacaattacgattgcttggacgtcagtatgctcactatataaaattacgtatagaaagtaaacaagcattgacacatatgctagattatacaatgccaggaataaaatctctattaaaaaaccgttcggataaaccagaaaaagataaactatgtgactttgtggaaaaatattggcactatgataacatcacaaataaaagtgaaaaacagtttattaacagttataaaatctgggcaaaaaataaaggataccatcaaagcgaaagcaaagcattaactatctatgccttagctcagcaaggtatcccaacgttagactccaatgccccatcgaccaaaatgttagtattggaagccgttagagttcttcgcgaagtggatagaactctatttatgattttagcacaaatgcaagaattagcaagaagtcttaaagagtatccagtggtacgagcaatggaaggtgtgggagaaatcttagcaccaagactaattgctgagataggagatgtacgacgtttttataatggtaaggcacttatagcttatgcaggcatagatgccccgccttaccaatcgggacagtttactggaacgaagcggaggatttcaaaacgtggatcatcgacattgaggaagactggatatgaagtaatgaaatgtcttaaaagtaaaaaaccagagacagatgcagtttatatgtttataataaaaaaggaaaatgaaggtaaagcaagtaaagtagctaaagtggctggattaaataagtttttaagaatttattatgcaagagtaaaagaggtatatcaagaataatggtattataaatgaatgatagctaagctgggacaaaaagcaaaagatgtgctggcttattagcgtgcaaaaaaatgaagagcaataaatttaagaacttgctataaaagtattgatttttcttagcagg

SEQ ID NO: 7508 - DNA, 1373 bp, unidentified
  source 1..1373: mol_type = unassigned DNA; note = element_ba316aa
  misc_feature 1..3: note = core
  misc_feature 4..92: note = LE
  misc_feature 93..980: note = CDS
  misc_feature 981..1373: note = RE
  misc_feature 1146..1360: note = bridgeRNA
tgatggggtggacggcccccgacccctgacggcatcgcgatgtgccacggtggtgctgtcaatcggaccacccgcgcagaggagccgtccccatgcaggttagcaccgtcggtttggatatcgcgaagaacgtcttccaggttcatggcgtcgacgatcggggccggatcgtgctgcggcgcaaggtccgccgcgatcagctggtggcgttattcagcgggtttgagccatgccgagttggcatcgaggcgtgcgcgacggcgcattattgggcccgcgagctgagcgcgcttgggcacgatgtgcggctgatgccgccggcctatgtgaaggcttacgtcaagcgaaacaaaaatgatggggcggacgctgaggcgatctgcgaggcggtgacacggcccaccatgcgcttcgtacccatcaagtcggccgaagcacaaagcgttctgatgctgcatcgtgctcgccatcttttggtgcgacagcgtaccgctaaagtgagcgcgatgcgggcgcatcttgccgaatacggcttcgtcgcggcgaaaggcatatcgcggctgcgcgatttgctgccgttgctggaggacgacgctggcatgctgcccgagctggctcgccaaacattgcggctgatcgctcagctgatcgaggcgctgacgatccagatccgaaagatcgaaaccgagctattgcactggcatcgtaataatgcagcaagccagcggctcgaaaccattcccggcatcggcttcatcacggcaacggcgctggccgccaccgtacatgacgcaggcgctttccggtcgggccgacaattcgccgcctggctgggcttggtgccgcggcagaactccagcggcggcaaggaacgactcggcgggatatcaaagatgggcgattcgttatctatgccacctgctcgtggtcggcggaaccgcggttactcgctatacgcggcgcaagaacaccagcattagtcgttgggccaaccagctgctcgaacgcaaacctgcccggctggttaccgtcgccgtggccaacaaaatggcccgcgtcgcatgggccgtcatggccagggaggagaactacaaggtcacactcgccgccgcgtaattgatccagggcgaacagcgacaacggttttggcaggagagaacgacgaacgtgatgccgatcggtcaagccgggagcgggacaacctgcgtgattcaaacacgcatcgagcgcggcagcttgatgaggacccactccaccgacaccatcatggccagcggcctggcgccgcatacaacaggccggacacatgaatgtacctgacccgatcgcccgcgcgccgcagtccctcttgctcaacggggaccgtccacaca

SEQ ID NO: 7509 - DNA, 1204 bp, unidentified
  source 1..1204: mol_type = unassigned DNA; note = element_ba35933
  misc_feature 1..2: note = core
  misc_feature 3..211: note = LE
  misc_feature 212..1189: note = CDS
  misc_feature 1190..1204: note = RE
  misc_feature 6..225: note = bridgeRNA
cttgtatgttcagcccagaccggcgcggtaaagttcgattgccgttgaggcaaccggaccggaccgtgcagcctggtaccgccttgggccggcgagcgtgctcgcaagcccgtcactgagttgattgcgcacggaccccgtgctggtcttcctgatgcccgaacggttagtcgagcggcggcgcgccggctcgcatgcacaaggaagggagatgaagaccatgtctggatcagccgtgatgataggtatcgacgtggccagtgcgcacgtcgatgtggcggcaatcggcggtgaacttccggcagcgctcggtcacgtcggcaacgatgccgacggacatagcgcgctggccgacgggttggcacgcctgaagccggaattggtgctgatggaagccactggcggctatgaggcggcgctggcgtgcgcgctgcaagcggccggactgcgcgtggcggtggttaatccgcgcatggcgcgcgatttcgcccgcgcgatgcagcggttggccaagaccgaccggatcgatgcggcgacgttggccgagttcgccggcgtgctggcgcgccggcccgactgcgcgcgtttcatccgcccgttgagcgagcccgaacagcaggacctggccgccttggtgacgcggcgccgccagttggtatccatgcagttggccgagcgccagcggctgcggctggcgcgtccggtggcacgacccagcatcgaagccttgctcgaggcgatcgcacgccaactcgacgaggtcgaggccgagatggcacgccatgtcgagcaacaccacgcccagatggccaagctgctgcagagcgtggccggcatcggccgggtggctgcggccaccttgatcgcggaactgcccgaactcgggcgactgaaccgccgccagatctgcgcgctggtgggcgtggcgccttatgccaatgattcgggcgccagtcgcggccgaagacgcatcgtcggcgggcgtttcgaggttcgccgagcgctgtatatggccaccctcaccgcaacacggcacaacgccgcgatccgcgcgttctacgagcgcttggtggccgcgggcaaactcaagaaagtggccttgatcgcctgcatgcgcaagctgatcatccacctcaatgccctcacccgtgaccacttgaacgctcaaaatcgctccatcatcgcttgacagccaacacggtta

SEQ ID NO: 7510 - DNA, 1388 bp, unidentified
  source 1..1388: mol_type = unassigned DNA; note = element_ba3d94f
  misc_feature 1..3: note = core
  misc_feature 4..85: note = LE
  misc_feature 86..1114: note = CDS
  misc_feature 1115..1388: note = RE
  misc_feature 1088..1375: note = bridgeRNA
tgatggagtggatgccccctcccgacggcatcgcaatgtgccaagctggtaatcttcgaaagcaccagagaaggagaaggcacccatggaccaagttagcatcatcggcatcgatctcgcaaagcgggtttttcaggcacatggttcggcaccggacggctcggttgtgttccgcaagaagctgtcgcgagcgcaactgctattgtttctcgcggcgcagccgcgctgcacggtggcgatggaggcttgcgcgacggcacatggctggggccgggagattggcgagctcgggcatgaggttcggctgataccgccgatctatgtgaagccgtttgtgaagcgccaaaagaacgatgcggctgacgccgaggcgatcgcggaggcggcatcgcgcccgacaatgcgctttgtcgcagtgaagagcgaagaccagcaggcacgatcgatgatctttcggacccgcgatcttctggtgcgtcagcgcacccagttgatcaacgcgctgcgcggccatctcgccgagcatggcgtggtggcaccgcaggggaccgcgcatgtgaagcggctggccgatgtgatcggcgacgagacagctgtattgcccgccacggtccgggagatcggccggctctatctcgaacagatcggtttgctcactggaaggatcgaagagttggagaagaagctgcgcacagaggccggtcaggccgaggcgacgcgacgcctgcagacgatgccgggcgtggggccaatcacggcggttgccatcgaaagcttcgccccgccgatggagaccttccgccgggggcgggacttcgcggcctgggtggggctggtcccgcgccagaactcgacaggtggcaagcagaggctcggacgaacggcgaagatgggccagcgtgacattcgcagattgctcatcatcggtgcgatggcagtcgtcaattcagccgcgcgccacggcgcccccgagggctcatggcttgagcgcatgctggcaaaaaaaccgaagatgctggtcgccatagccttggcgaacaagatggcgcggggcgtctgggccatgatgacgaagcaggaggactaccggtatccggcggcggttgcagcctgagcacaccgatcaggaagcgaagccccggtgcgtcgggggtgtgaggaggtcgatgagcagtaagggcacatgatcggcaaggtccggatcagacgaagcagtttgggtcaaggagccagggagctcgggttcatgatttgcctctgatccgcgtatctccataccggccggcggccatgatcagcgccgcacaaaaaggtctgacacatgaccgcactcgatcacacgccaaaacggctcagaaaagccttgcatcaacgggggcatccacaca

SEQ ID NO: 7511 - DNA, 1332 bp, unidentified
  source 1..1332: mol_type = unassigned DNA; note = element_ba49799
  misc_feature 1: note = core
  misc_feature 2..72: note = LE
  misc_feature 73..978: note = CDS
  misc_feature 979..1332: note = RE
  misc_feature 1111..1327: note = bridgeRNA
taatgaaatggccagcccgatcccagcgaccgatttaccatgagatttcgggcaaccgaagaggagagcgtcatgaacgaggtcacgctaatcggtatcgatctgggcaagcatgtctttcacgtccatgggcaagatgcaaagggacacgcgatattccgcaagaagctctcgcgcctgcagttgcttccattctttagcaacctcaaggcggtcaccgtggtcatggaggcgtgcactggctctcactggctggcacgcaagctcattgcaatggggcacgtcgcgcggctaatttcgccacaatatgtgcgtcccttcgtaaagagcaacaagaacgactacattgatgccgaagcgatctgcgaggcagcgtcgcgcccttcaatgcgcttcgtcgaaccgcgaacggaagcgcaacagctgcttgccgcgttgcaccgggcgtgcgagggtctggtgaccgaacgcacggccacgatcaaccggattcacgcactactgctggagtttggaatcatcgtccctctgtccagagccacgcttcgccggctgtctgatgcgctcgccgtgcatgatttgccgctacgaccggcccagatgattcaccggctccatgagcactatcgatatctcgaccaggaggtcgcagatatcgaacgagacctgacggtacaactgcgcgaggacgagaacgcggctcgtttactgtcaattcctggcattggcaccattacggcgagcttgctggcttccgagatcggaaacgtcgcacagttcgcgggcggtcggaatttcgcagcatcaatagggcttgttccgtggcagcacagtacgggcggtcggagcactctgtgtgggatcagcaagcgcggtgacaagcattacgtcatttgctcgtgcaaggagcaagagcggttatacagcgtgcagaccagcgaaccgacaggcttggtgagtggatccgatcaatgctgagccgacgtcactccaacgtggtggcccgtgccgtcgccaacaagttggcgcggatcgcgtgggcggttttgactaaacacaccgtgtacgatgcctcacatttgaatttggaagtctgattcacctgtgttcatccaacgaggttctgcgactgctggaaatttgatggtccaacggcacagcgaccggacgaagaacctgacaagctgtacagcaactgccgacattttgaggatcgaccggtgcggttttcatcgcggaacggagagcaacctccaagacgattccgaatagatttgcgcaagccaaaagacttcagaaccaacgcttgcaaaattcgggctgaccatagat

SEQ ID NO: 7512 - DNA, 1750 bp, unidentified
  source 1..1750: mol_type = unassigned DNA; note = element_ba5d784
  misc_feature 1: note = core
  misc_feature 2..282: note = LE
  misc_feature 283..1518: note = CDS
  misc_feature 1519..1750: note = RE
  misc_feature 13..302: note = bridgeRNA
cctgttactataaatttgcccccgcgtgtatggcatccagccaaaggccggggacactcgttgcctaagctgttagaatgagagcgcaatggtctgacctacacctccaagggttaatgcgtccgtagcaaagtcagtcagccatcctctcattcgcagcgttcgatttgtgcaggtagagccatcggggaaccgatacgctcgcgtcagcaaacagatggaatcggcaatgggagaagatggattcgtccattgcaaatctgtagacaggagcgtgtcctcatgaacgcagtcggaatcgacgtatccaagggaaagagcatgatttcggtgctccgcccactaggaatcaccgtggcccaaccattcgaagttcctcacaccgtccttgaactgaacaagttggcagactatatcagcaggctggatggtgaaagcaaggtcattatggagcatacaggccgttactatgagccaatagcccatgtcatccataatcgtggagtgttcgtcagcgcggtcaacccgctgctgattcgagagtatggcgggaattctctgcgtcgggtcgagacggacaaggcggacgctcggaagatcgccaaatacggtcttgacaactgggctgaactgcgcgaatatactcccatggatatgattcgttacgagctcaagacattaaaccggcagttccaattggcctccaagaatcggacagcttgctccaacaatctgatctccctgttggatcaatccttccccggcgtgcgcggctggtttgacagtcccgttcgcaaggacggcagtcagaagtgggtggactttaccatgacattttggcacatggactgcgtgcgttgcgtcagtcaattcgcctttgtggagcgctaccgcaagtggtgcaagcgcaacggctacaacttcgaccctgtcaaggccgagcggattcacttggaaaccaagaacatgatcgcgctggttcccaagtccgataccacaaagctattgattcaggaaagtgcagctcagttgaccggcatctcccgcatggcggaagtccttcgcgccgagatgaaccgtttggccgcccagttgccggaatatcccgtcgtgatgggcatgtacggcgttggagaatcgcttgggccacagctcatggcggagatcggcgacattcggcgctttgcggggaagcagtcgctggtcgctttcgcgggcgttgaccccatgccgaatcagtcgggtacgaaagatgttcgcagcaaccgttcctccaagcgcggctctccctatctgcgtaagacgctgttcgtcattatgaccgtccttttgcagaaagctcctgccgatgttcccgtttacctgttccttgaccgcaagcgttcccagggcaaaccttactatgtttacatgaccgccggagccaacaagttccttcgcatctactatggcaaggtgcgggattatctcgcttcgatagatgctgttgcttcttctgttcagggtaatccgcagtgattggcagaggttgccttgcaacctcttgactgctttacagcaccgatggcatggcctgtcaaggacgccgcaggcgcggctttagccgtttatccttgactggacatgacggctgtgctactccttcttcttgggtcggcgctttggcggtggcctgtttgccgtcctatctgtctcttctccttcttccttgcggtcaaggtcattttgggcttgactttttatttgcagg

SEQ ID NO: 7513 - DNA, 1454 bp, unidentified
  source 1..1454: mol_type = unassigned DNA; note = element_ba5f4f4
  misc_feature 1: note = core
  misc_feature 2..90: note = LE
  misc_feature 91..1131: note = CDS
  misc_feature 1132..1454: note = RE
  misc_feature 1224..1446: note = bridgeRNA
caatgggatggacgctcccaccttaacggcatcgcaatgtgccaaagtggaggtgtctaccaaccacttaaaccgacaggagcgtccaccatgaaggttacaacactgggcatcgatctggcaaagaacgtcttccaactccacggcgtcaacgcgtacggcaagaccattcttaagaagcaattaaagcgcgagcaaatggccgcgttctttgtgaacctgcccccctgcttgattggcatggaagcctgtggcagcgcccactactgggcgcgcaaactccaagacttaggccacaccgtcaaactcatggccccccaattcgtcaaaccctacgtcaaatccaataaaaacgacgcagccgatgcagaagccatctgcgaggcagtagcccgccccaacatgcgctttgtacccatcaagagcgttgagcagcaaagcgtgctggcattgcacacggtgcgccaaagcttcgtcaaagccagaaccgcccaggccaaccagatcagaggcctgctggcagaagtcggcctgatcattccccaaggcatagggcacatcgcccgccgagtccccgaactcctggaagacgccagcaacgaactgcctggcacctttagactcctgatccaacgcctcttggaccacctcaaggtcttggacacccaagtcgatgagctagagacccagatcgtcaagtggcatcgcagcagtgcactgagcagcaaactcgcaggcgtacccggcattggccccatcaccgccagcgctttggtagccaccattggggatgccaagaactttgacaacggcagacaagtatcggcctggctgggtttggtgccacgccagcattccagtgggggcaagcaaaacctgctgggaatcagcaagcggggtgacacctacttgcgcaccttgttgatccacggtgcacgttcggtgattcactggcagagcaagagagcagagactgacgcctgcagttgggtcgctggagtccttgcgcggcgtaacaagaacgtggctgcggtggcgctggccaacaagaacgcgcgcattgtgtgggcgttgatggcgtacgacagggagttccgcagtgactacgtggccgccagggcgaccccgtaatcacagcggtcgatgactcagacgatgacaggctaggctagcgcttggggattacaggctagggcaacaggcaaaaggagcaaaactgaaccaccgattgcgcaggcgatcatgaagtgatggcaagacaggtcagaccgtggtgggcaaaacccgtagtagctgcagcactgtgagtgcgtgggagcaatagaggagccgaccagcgaatcccatcagggacagtgacggggagtcacacctaaagtccgaatgtacgggtgcaatctttaccttcgagccagaatgaattgagagcttggcaaaccgggagcgtccatgta

SEQ ID NO: 7514 - DNA, 1327 bp, unidentified
  source 1..1327: mol_type = unassigned DNA; note = element_ba61dc7
  misc_feature 1..2: note = core
  misc_feature 3..247: note = LE
  misc_feature 248..1072: note = CDS
  misc_feature 1073..1327: note = RE
  misc_feature 1094..1325: note = bridgeRNA
ttaatgagatggtcactccctccttcccggtactatgctgaggacaggctttcattcggagaactatcatggaaaacattgcgctcattggtatcgatctgggtaaaaactctttccatattcattgccaggatcgtcgcgggaaggctgtttaccgtaaaaatttacccggccaaagttgatcgaatttttggcgacatgccccgctacaaccatcgcaatggaagcctgtggcggttctcactttatggcacgcaagttggaagggttggggcattccccaaagctgatatcaccacaatttgtccgcccgttcgttaaaagcaataaaaacgactttgtcgacgccgaagctatttgtgaagctgcatcgcgtccgtctatgcgttttgtgcagcccagaacggaatctcagcaggcaatgcgggctctgcatcgtgtccgtgaatccctggttcaggataaggtaaaaacaaccaatcaaatgcatgcttttctgctggaatttggcattagcgttccccgaggagctgccgttattagccgactgagtaccattcttgaggataatagtttgcctctttacctcagccagttattgctgaaattacaacagcattatcactatcttgttgagcagattaaagatttggaatcccagttgaaacgaaagttggacgaagatgaggttggacagcgcttgctgagcattccctgcgtcggaacactgacagcgagtactatttcaactgagattggcgacgggaagcagtacgccagcagccgtgactttgcggcggcaacagggcttgtacctcggcagtacagtacgggaggtaggacgacattgctgggaattagtaagcgaggtaataaaaagatccgaactttgttggttcaatgtgccagggtattcatacaaaaactggaacaccagtctggcaaattggccgattgggtcagggatttactgtgccggaaaagcaactttgtcgtcacttgtgctctggcaaacaagctggccagaatagcctgggccctaacggcacgacagcaaacttatgtagcataacggcagaaatacaccggtttaaagaattactgatctggttttgcgaatactgatattgatgatactaacggcccaccggcctgttgaggaacctgtaaaacggaaaggctcattgaagccgtatattttctggaggttcatcaggcgcggaactcatcaaggcgcgggaataaaatcccattcagacgccggatagattcaagcaagccaacttgtcgtcaaaatcggtgttgcaaaaacgggagtgaccataga

SEQ ID NO: 7515 - DNA, 1631 bp, unidentified
  source 1..1631: mol_type = unassigned DNA; note = element_ba61f81
  misc_feature 1..2: note = core
  misc_feature 3..124: note = LE
  misc_feature 125..1165: note = CDS
  misc_feature 1166..1631: note = RE
  misc_feature 1383..1583: note = bridgeRNA
agatggggtattcggcttgagccccatccttcagcggtgatgccatgaaggtgcggcgcttcgagctgatggtaaccgtggtctgttctggaacagccacaagcatcaggaaaggaagcgcagcatgaaacattatgccggattggacgtcgcagtcaaagagaccgccatttgcatcgtcgacgaaacgggcgcgatctgccgtgaggggaaggtgccgagccatcccgaagatcttgtgcgggccctcaccgatcctgcctgggcccttgagcggatcgggcttgaagccgggcccttatcgcaatggctattcagcgggctggcggaagccggattgccggtgacctgcatcgagacgcggcacaccaaggcattcttgaaggcacagccgaacaaatccgaccgcattgacgcccgaggcattgcccagatgatgcgggtcaacctgttccgcccggtgcatgtcaagacgctgacgagccagaaacgcctggccttgctgacggcgcgcaagctcctacaggaaaaggcgattgccatcgacaacgacatccgcgggctgttgcgcaacttcgggctcaaggtcggcatggtcggagccgtcaaattcgcgcaccgcatccgcgagctcaccgaagacatgcccgaactggccgagatcctggagccgctgctcgacgcacgcgacaagctacgccagcattttggcgccctgcaccgcaaggttctgatgcttgtccggaaggatgagacgtgccgccgactgatgtcgatccccggtgtcgggccggtgacctcgatggcctataccgcgacgatcgacattcctcagcggttcaggaattccaaggcggtagggccgatattggggctgacgccggtactgcatgagtcgggcgaaagtcgccgcatcggccgcatcacactgtgcggcgacggcttgcttcgatccctgctctacgagtcggcgcaggtgcttctgacgcgggccacgaaatggtcctggttgaaggcctgggcgatgaacgtcgccaagcggcgtggtgcgcgcaaggccattgtcgcgcttgcccgccgactggcggtgatcatgcaccggatctggatcgacggcacccagttccgctggaccaggcaggacctcgtgccggtcgctggctgacgtcccgaccagtgcagcctgccgcggcgctcgtgcccgtcaagggcaagtcgctgcgcgatggccccgctgggcctcccttgacgaccactgcgtgccgacggccagcgcgaaatcaggtcgggacgagaagatggtcgcccaatcggccgaacaagaagatgggagatgaaccacgatcaaatgtgacaattatcaccccgatggaaggtgagacacagttccaccatgccggtggaaacctgtccttcgcgggacggtggatgaggtgagttcgccgcagaaagctgtaccgatgccccttgcatcaggacgctcccgagattgttccacctcattcatttgaatcccatggagggagggccgaggcgccgatcccgtagagaagcaagaccccgcgaaggacatcaaatgccggcaagccggaacgctcgagagcgcttgacctcaacacgccgaatagaga

SEQ ID NO: 7516 - DNA, 1431 bp, unidentified
  source 1..1431: mol_type = unassigned DNA; note = element_ba62864
  misc_feature 1: note = core
  misc_feature 2..131: note = LE
  misc_feature 132..1151: note = CDS
  misc_feature 1152..1431: note = RE
  misc_feature 1192..1431: note = bridgeRNA
gaattgaaatgaacgcgtcccaccctgtggtcgagtgagaggaaaaagaagggtggatcctcacgggccgacggcatcgaagtgcccaagtggaaaatgcacgcatttcccaagcaaccggaggatccacgatgaacagtatggcagtgggtgtggacatcgccaagcaggtgttccaggtgcattacatcgatcaggaaacaggcgagatcgtaaacaagccgatcaggcgagccaggtttctagaacattttgccaaccgggcgaagtgccggattgggatggaagcctgcggcggagcgcaccactgggcccggcagttgatccagatgggccatgaagtccggttgatgccggcggagttcgtgaaggcgttcaacatccgcaacaagaacgatgcggctgatgcgaaggcgatctggctggccgtacagcagcccggtaagccggtggcggtgaagacggaaatgcaacaggccatgctggcgctgcaccggatgcgcgagcagttggtgaaattccgcacgatgcagatcaacggactgcgtgggctactgacggaatacggcgaggtaatgagccggggccgggcgaagctggacggtgagattccgacagtgctggggcggcttgcggagcgactgcccgccgccttgatcgacacgctgcgcgagcagtggaatgggctggcgaaactggacgaacagatcgccgggatcgagcggcgtatgcgcgagtggaaaaaggaagaccgggcggtaaaggcgatcagcgagatacccggtgtgggtctactgacagggacggcagcggtagccatgatgggtgaggcgaaagccttcaaatcagggcgggagtttgctgcctgggcggggctggtgccgaagcaaacaggctcaggcggcaaggtaagcctgcacggcatcagcaagcgcggcgacacctatttacgcacgctgctgattcacggcgcacgtagcgttctgtcgcacgcgaaagatccgggtccgtgggtcgagcagatgaagaagcggcggccgacgaacgtgattgtcgtggcattggccaacaagatagcaagaacgatctgggccgtgctggctcacgaccggcagtaccagaaaggctacgtgagcgtgaagcccgtttaaacaggccgacatcacgtggaagattaacgtttagcacagggtgaacgtcgaaaggttgcgcagcaatcgagtgggatgacaaaccaggtaggaccgggactcgttaaacctgtatggcttgaagagcttcgagctcgccaggagaatgaggtgcgagtcagcgaatttcataggggcccgcagcggctgtaccgtctgcatcaaggccggatatagagctgcagcccatcctgtcagtctgaacacgcgaaaactgttgcaaacgggacgcgttcatata

SEQ ID NO: 7517 - DNA, 1166 bp, unidentified
  source 1..1166: mol_type = unassigned DNA; note = element_ba65ca5
  misc_feature 1..2: note = core
  misc_feature 3..158: note = LE
  misc_feature 159..1160: note = CDS
  misc_feature 1161..1166: note = RE
  misc_feature 3..192: note = bridgeRNA
cttgtattagcgcgaatggctatcgtggacctgttccgagaggaatgacctgctccgggcggccacccggagcaggtcgctggtcgtcggatcgtccgctcctgagccgcaagggctgcccctgagcaagatcgcgatcagctcttcatcggacccggatggttgaaggaaccgtgggttcgcatcacaaggaagggtcgacgaagatgaagcattatagcgctgtgtgcgccggcatcgacactggcaaacacaaactcgacgttgccgtcgacggcagcgatgagcggctgcaactcgacaacagccccgagggccaccggctgttgtcggcctggttgcggaagcgtggggtcgagcgcctcggcatcgaggcgagcggcggttacgagcaggtggtggtctcagctctgcgggcggatggctttgttgtcatcgttttccagcccgcccaagtgcgggcctacgccaagttcgtgctgcagcacgccaagaacgacaagatcgacgctgcactgatcgcccgctgtacggcggcagccaccgagatccgcgagccgccggatgcccgattagccccattggctcagcatctgacgatgatcgagcaactgaccgaggacgtggcccagatcaaaactcgccgggaaacctgccaagaccagcgcatccgcgacttctggacggacgagatcaacaggctcaagcggcttatcaaacaagagctcaagctcctggtcgccgctatccgcacgcatcgcgatctctccaatcggctcgacctcatcgccagtgtcgatggtgtcggcctgcgcaccgccgttgccatcctggtgcgaatgcctgagatcggtcggatcagccgcgagcatgcagccgccatcgccggcctcgcccccttcgatgacgacagtggcttgcggcgcggcttgcgacacatcaagggcggccggcagcgactgcggcaaagcctctacgccgctgccttgccagcggccttctattggaatccccaattgaaagccctctaccggcgactgattgagcgccgaaaagctcataaagccgctctcgtcgcctgcgcccgaaagcttctgatcttcgtcaacaccgtcgtcgctcgaggcaccccctgggagcccaccttagcggccgactaatggttg

SEQ ID NO: 7518 - DNA, 1143 bp, unidentified
  source 1..1143: mol_type = unassigned DNA; note = element_ba688b7
  misc_feature 1..2: note = core
  misc_feature 3..208: note = LE
  misc_feature 209..1129: note = CDS
  misc_feature 1130..1143: note = RE
  misc_feature 12..184: note = bridgeRNA
cttatctctcgccaatttgcgaatgtgggagtcgagagccggcgtgggcgatcgataaattccagatcgcacgatcgtgacggagcgtggatccccacgccggatctcccttacacgcccgaacagttgctcgagtcgccactcggaatgataaggccgggctagcagggatctctctcgacaccttctaggctactggagtctgccgatgcttgcttgtggagtggatgtcagcaaggccacgttggatgtggcgattcatggctcatcccaagtccgctcgtttgccaacagtatcgctggctttcgcaagctggcggcgtggttgctgccgcaggcgccgagccaggtcgtgctggaagccacgggcggctacgaacaagcagcgctggatgcgttgtttcgctcgggcttgcccatggtcagagtaaatccacgtcaggttcgcgacttcgccaaggcgtcgggccagctcgccaagaccgacagactcgatgcgcgggttctcgcacacctggccgcgaccattccactgatgcgctatcagcccaagcgcgattggcagcggcggctcactgagtggcaccagcggcgcggccatctcgtcgagatgatgggcgcggagcggcagcggctggagcggatcaccgattccgcgctgcgtacctggtcgcgacgacatctggcatcgctgcaaaaggaagtcagacgcatggacgtcgaaatcaaaagccaggtcgcggcccaagcttcgctcgatccgttgcgttctctcaaaggcgtaggcccggtcctgcagacgacactggcctgccaacttcccgagttgggcacccttgacggtaaggccattgccaagctggtgggtgtggccccgctggcgcgcgatagcggtctgatgcgcggcaggcgccacgtatggggagggcgcagtgaaatccgcgctgtcctctacatggcaacgctcacaaccatccgctacgaaccaaagttacgcgatttctatcagggcctccgcgcaagaggcaaagctccgaaagtcgctatcgtggcagccatgaggaaactgctggtgatcctcaacgcaaggatgcgcgacgctctcgccttgcacctgcgggccgcctgaacacaagacagttg

SEQ ID NO: 7519 - DNA, 1353 bp, unidentified
  source 1..1353: mol_type = unassigned DNA; note = element_ba7a197
  misc_feature 1..3: note = core
  misc_feature 4..83: note = LE
  misc_feature 84..1103: note = CDS
  misc_feature 1104..1353: note = RE
  misc_feature 1123..1340: note = bridgeRNA
tgatggggtggacggcccctgctcaccggcgtcgtaatgcgccaaggtggtcgtagtgacacaccacatagagggggccgtccatgaacgagattagcatgatcgggttggatctggcgaaaggggccttccaggtccacggtgtcgatggcggaggcgaggtggtggtgcggcggcggctgcggcggggccaggtgctcggcttcttcgccaagctggggccgtgcgtggtggggatggaggcctgcgcctcgtcccattactgggcgcgggagctgcggaggctcggccacgaggtgcgcctgatcccgccggcctacgtcaagccctacgtcaagcgggggcgcaagaacgacgccaccgacgcggcggcgatctgcgaggcgatgacgagcaagggcatgagcttggtgccggtgaagacgccggagcaacaggcggggctgatgctgcaccgggcccggcgactgctggtcaggcagcgcgtcatgctggccaacgcggtgcggtcgcatctcgccgaattcggcatcgtcgatgcccagggcgaggcgggtctcgaccggctgatcggcgtggccgtcgatgccgacgacccctcgctgccggccgccgcccgcgaggccctggcgatgctggcggcgcaactcagggacgccgaggccaaggtcgaggcgctggaccgggaaatcctcgcccggcatcgcgccgacgacgccagccggcgcctcgcctccatccccggcatcgggccggtgagtgccagcgccatcgtcgccaccgtcggcgatgcccgccgcttccgcaccgggcgcgacttcgccgcctggctggggctggtgccatcgcagcactccagcggcggcaagaccgtgctcggccccatcaccaagatgggcgaccgctacctgcgctcgctgctggtgctgggggccaccgccatgctgcgccgacgcgacagcggctacggcccctggctcgccgggctgttggcccgcaagccggcccgccaagcctcggtcgccctggccaacaagatggcccgcatcgcctgggccatcctggcccggggcggcgtctaccgcaaaccggcggcggcctgagaccaagccccacggggcaccagattgcgagggcgatgacagcgtgatggcgaccggacgatcccacgaaccgcaaaacccttccttcgtcacggccgctcgaggccgaaggcatgattcgggagcggctcgcggatcacatcatggccagcggtcaatcgaaccgcgcaaacaggccggacacatgactgctcccagcccggtcgcccacaacgtcgttttcccttgcaacccaggggccgtccacaca

SEQ ID NO: 7520 - DNA, 1319 bp, unidentified
  source 1..1319: mol_type = unassigned DNA; note = element_ba7f880
  misc_feature 1..2: note = core
  misc_feature 3..59: note = LE
  misc_feature 60..1067: note = CDS
  misc_feature 1068..1319: note = RE
  misc_feature 1101..1307: note = bridgeRNA
ttatgggatggacgtctcccgcttttctgccagcatcgttggccgcaaaggagggaagcatgtcgcttaaattacttgctatcgatcttgggaaacgctcgtttcactgccatggcgtcgatagcgatggcgtgatcatttcgcgcaagacgagtcgttccaaactgctcgagacgatcaaggaactggctccggagaccatcgcgatggaggcctgcgccagcgcgcactattggggtcggcgctttcttgcggatggccatcgggttctgctgatcaatcctcgttttgtgaagccgttcgtcaagggatccaagaacgatgcggcggatgcagagggaatttatgaagcagctttgcgcccgacgatgcgcttcgttccggtcaaatcgactgaacaacaggatttacaatcgctccatcgcacacgtgaccgcatcacttgtactcgaaccgcgctcatcaatcatatgcggggacttcttggcgagtacggcgttattttgccgcagggcgcgtggcgttttctgaggcaagcgcacgacgccatcgccgcagccgaggtttccgatctcacacgtgaactcttcaccgacatgctcgatgagctccgcgccctcgatctccggctcgacaagctcgaccgacaactcgtggccctttgccggacgaacgatgcctgcaggcggctctctaagctgccaggcgtggggcctgtgatcgcaacagcgctcgtcgccgcggttgacgacggccgccattttcgctctggacgggagctcgcagcttggatcggccttgtacctcgtcaatacacgactggcggcaaacctcggctcggcggaatcggcaggcgggccaatcattatcttcgacgtcagatgatccatggagcccggtcggtgatgtttcgattggcgaagcatgacgatcgccgttcccaatggctgaaggggcttacggcgaggcgaggattcaaccgggcgatcgtcgcactcgccaacaagacgtcaaggatcgcctgggccgtgcttgcgcgtaaggaggactatttggccgccgcatgaccgcaacgcgccagcgctagagcagaggctgtcttggatgcgaggtgacaactgatggcacgtcggcaaggaccgcaacttccaagcctgatttacgacaaggcccttgtggccgatcatgttatgaggccagaagcagcggactcccatcaaggccaggggcgcgatccgtcccgcaaaaggccggatagattcgtgcattccaaccgccgaagccaacaggtcgagccttgcgcgggagacgtccataga

SEQ ID NO: 7521 - DNA, 1252 bp, unidentified
  source 1..1252: mol_type = unassigned DNA; note = element_ba886f1
  misc_feature 1..2: note = core
  misc_feature 3..244: note = LE
  misc_feature 245..1237: note = CDS
  misc_feature 1238..1252: note = RE
  misc_feature 13..185: note = bridgeRNA
cttgtatgttcgatctggagatttaggtaaggtttagcccggttaccggggaggccgttcgctcctggaagcagcgtcgtctgacttcgtccgtagagcggctccccgcctcattgcccactccgaagggtatccagaagcccttttacgggacttcgcatagacaaggtcggtagcggcaaccagtgcgaggtcggggaaccggtgaccattgtccccaatcgattgcagggagtgaagaggcatgtccgtttacgcaggtttggatatcggtgcttactcagtggatctggtcacacggcaagcggataagccctccaaggcgagacgctacaagcagaccgccgacgggcataatgccctgatcgcgcagctcaagaagtccaagcccgccctgatcgtcatggaagccaccggcatctattacttcgatctggccgtcaccctcgccgaagcgggcttgccggtcgcggtgatcaaccccaagagctttcgccatttcgccgagttgaagctgcagaccagtaaaaccgacgcgatcgacagtgagctgttggccgaatacggccagcggatggccccggcgccgtggacgccgccagaccaccaccaccaggcgctgagaagcctggggcgccagattaatcggttggtgggctgtcgagctcaggccaggaaccggctgcacgcactgaaggcgacccgctccacacccggtctgttgatcgaggacgagaaggacggtattgccatgctggagcgccggatcgaccggctccgccaggcggctctggacctgctggccgaggcaccagaactgcaacgccgctatcaccacctgctggcggccaagggcatcggggaggcctctgccttgtcgattctcgccgagctgtgcgtgctgcccacttctctgaagtctggccagatcagccggcatgcggggctggacgtgcgtcagcaccagtccggcaccagcgtcaaccggccagccaggatcagcaaggcgggcaacgtatacctacgctcggcgctgtacatgccggcgctgtcggcggtcgatatgaccccacgccaaggccttctacgaggccctggtggcccggggaagaaaaagatccaggctctggtggcggtgatgcgaaagtacctcaccggcctgtgggccagcttgaagaccgataccccgttcgattcggcccgcctttttcaaaccgctggcctgaaaaacacttgaccgcgaacagggtat

SEQ ID NO: 7522 - DNA, 1569 bp, unidentified
  source 1..1569: mol_type = unassigned DNA; note = element_ba8fbec
  misc_feature 1..2: note = core
  misc_feature 3..254: note = LE
  misc_feature 255..1466: note = CDS
  misc_feature 1467..1569: note = RE
cacgtataatgaacttagtaaattgatgagattttaaattcgatttactatataatattttttacctatatttaggtaattttattttaagagtcaagtcagattatatcaagggtctatgaatccattcttatgacagactattctcttattttttttattaatttagttttagattgtgaagataataacttatatgtgcgtgatgaaataataggaaagcaaagagaacttaaaattagaaagggagaaatatgaaaagtgtactaagtgttgatgtagctaatggaaaaagcatagtattattaattactgaacatggcgaaattttaattgaaccttatgaagtaaaacattgtttaagtgattttaattcattaaagaataaaattgatacatttaaaatcgacgatttaactatctttatggaatcaacttctacttatcatttacctattcaaagattctttactaaaaacaattataatgtgcaagtaataaatccaatattagggaaaaataatactaggaatttaagaaaaactaaaacagatattgaagattgttataatttagctgatttattttttaaaaatactgttaaaatccatactaaaaatatgaatgatatttattcaagtatgctcgaattatcaaggcaagaaaaacatttaactgaatcattagttagatcaaaaaatatatttaagcaaataattgctaattcatttcctgaatatataaagtgttttacagctaatgatattttcggaagaacttcgcttaattttattaaagaatttcctcatgccgatatcattaaagaaaaacgtattgatgcattagccaataatttatataaaagttgtaaaaatggatgttcatataatagatgtttaactaaggcaaaaaagataaaggaacttgctaacaattcttatccaggtattgataaaaattcttatgaagttaataatctaattaatattgtagaaattatttcatatagcgactttaaattaactgaagtaaagcaagatattattaaacttgctaaacaaacaccttattttgatatcattaattcaatttatggtattggcgaaacttctgctgctcagatcattgctgaacttggagatattaatagatttgaaaatattaaacaattaaatgccttttgcggacttgatccaacaatagttcaatcaggaaaatcaattaattatcatggaccaatttctaagcgaggaaatagaaatgctagaaaaatcttatttatcacatgttgcagtattattagagcttcagttcttcataatgttgatagcgaaattcttctttattacagaaaaaaacaagctgagaataaacattttaaagaatgtatcacagcttgttccaccaaattattaagaattatttttgcaatgtgtaaaaataattccctatatgtgcaaaaataatataacatatattttttaaaaaatctactatcgtaggtgtttttgctgtgcaataatttttaaaatattatctaaaatcactacttgactttatttagattgt

SEQ ID NO: 7523 - DNA, 1454 bp, unidentified
  source 1..1454: mol_type = unassigned DNA; note = element_ba99c5e
  misc_feature 1..2: note = core
  misc_feature 3..163: note = LE
  misc_feature 164..1204: note = CDS
  misc_feature 1205..1454: note = RE
  misc_feature 1221..1423: note = bridgeRNA
agatggggtaacgggcgcggaggccttccaagccagccgcgctagctacggcgctatttggaggcgcgcgtcgcgcggctggcttggaaggcggtcgtccctcaaactgatggtgttgaacagagtcgggcaagcccgctccaaacatcgatgaggaacgaccatgaaccactatgccggaatcgacgtatcattggaatgctcgagcgtgtgtgttgttgacgccagcggcaagattttacgcgaggccaaggtggcgagcgagccggaggcgctgatcgcctggttccgcagcctgggttttgcccttgagcggatcggtctggaggctggaccgctgtcgcaatggttgtttgcggcgatgaaggctgccggtcttgccgtggagctattggagacgcggcacgtccgcaaagcctttgaggcgatgccggtgaagtcggaccgcaacgatgcgcgcggcatcgcccagctgatgcggctcggctggttccgcccggtgcattgcaagtcgctgggggcgcaggagacgcgcacggtattgaccgcccgcaagctggtgcagtcgaagctgcgcgatgttgagaacagcctgcgcgggatcttgcgcgggtttggtctcaaagtcgggccgacgacagagcgaagtttttgcggacggatccgtgagctggtggcaggccacccgagccttgagacagtcacagaggcgctgctggcggtgcacgccgtgctgctgcgcgagttcaacggttttgagaagcaggttcgccggatggcgcgctccgatgccaacgccaagttactgatgtcgaccccatgcgtcggcccggttgtgtcactcacctatgcttcggcaattgacgatccggcccggttcagatcgtccaagcaagtgggggcgcatttcgggatgaccccgaagaagtatcagtccggcgagaccgattataccggtcggatcagcaagatcggcgatgcttcggtgcgcacggcactctacgaggccgcacacatcatgctgaccaaaccggtcaaaggctgctccgagctgaagagctgggcgatgcggatcgcccggcgagccggcatgagcaaggcgaaagtcgcgttggcgcgcagactggccgtgatcatgcatcggatgctggtggacggaacgccgttcgatccagcccacaagcaagtcactgctgcagcttaaacaaggagacggaggttttcgagcgggccacgacaccagcctctcgaagcgaagtcccttcgccgggacgagggatcaggccagaccgttacccatccagtcgctttacaagcacgcgaatgtagattggtcgaccttatcctcttcagaccccatcaggtggcggccctgcgccgaccccgtacagaagcaagaccccggcgataggtacgacgcaaaaagggattgacctttcgaggcccgttacaga

SEQ ID NO: 7524 - DNA, 1429 bp, unidentified
  source 1..1429: mol_type = unassigned DNA; note = element_ba9ae09
  misc_feature 1..3: note = core
  misc_feature 4..86: note = LE
  misc_feature 87..1139: note = CDS
  misc_feature 1140..1429: note = RE
  misc_feature 1172..1416: note = bridgeRNA
atgatgtggtggacggcccctgttgcggcatcgatgtgccaagatgaggtcgttggaaacgacacatcatctgagaggagccgtccatgagcgagactatcacaattggtttggatattgcgaagaacgtgtttcaggttcacggggttgacgggaacggcgcggttaccgttcgccggcaattgcggcgtgcccagctgctgaagtatttcggttcgctttctccctgcattgtgggcatcgaggcttgcgccacgtctcaccattgggcgcggcagattgcggcgctgggtcatacggttcgcctgctgccgccggcccatgtgaagccctatgtcaagcgcggcaagaagaacgatgcggcggatgcggctgcgatttgcgaagcggtcacgcggccgcacatgcgggctgtcccggtgaagacggaagttcagcaggcagttttgctgctccatcgcacccgcgatcttcttgtgaggcaacgcacgatgctgatctgcgcgctgcgctctcacatggctgagttcggcgtgatcgccggccagggccgcggcaacttcgccaggctcaaggcgcggctcgcgagcgaggcagacggatctgtgcctgaactcgcgcgatcggcgttgcaattgattgcggcgcagatcgacgacgccaacatgaagatcgaagccctggagaaagagatcgtggctcgtcatcgtcacgacgaagccggccgcaggctcgccaccattcccggcatcgggccgatcatcgcatcggcgctcgcggcttcggtgccggatgcgagcgcgttcaaatccggtcgtcagtttgcggcctggctcggtctggtgccgagacagaactcgaccggcggcaaagagcggctgggcggcattaccaaggccggcgatcgctatttgcggaagctccttgtcatcggcgctaccggtctcatccgctacaagcgcaagaccattcccggaggcatcgagtgggtcgcaaaacttctcgcgcgcaaacctgttcgtctcgtcacggtggcgctcgccaacaagatggcgcgcattgcgtgggcgatattgagccgtggggagatttatcgtcatgcggatgcgactgtggatacacaacccgcctccgcctgactcgttggtggtcgctgcggcgggctgtgcatccacagccccagcaccgcggttcgaattgcgagggtgacgatgtgacatgatggcaaacgggttgaaccccggggattggaaaactccgctagctgtcctgcgctcaaagcgcgctacggtgatgggaatccgaacccgcggacttcatcagggccagcggtcatgtgaaccgcgcaaacaggccggatacatgactgcacccgaccaaattgccattaccagcaaaatcatccttgcaacgcaggggccgtccatac

SEQ ID NO: 7525 - DNA, 1491 bp, unidentified
  source 1..1491: mol_type = unassigned DNA; note = element_baa782f
  misc_feature 1..3: note = core
  misc_feature 4..230: note = LE
  misc_feature 231..1445: note = CDS
  misc_feature 1446..1491: note = RE
  misc_feature 13..197: note = bridgeRNA
atccataccgttcgtcgtgggccgttccggtcattcgtaggatcggagcatccaggggtgctgggtatggctgtcacccgatagccgatgatgtggcttccactgattggccgcccggcaccccgcgacgactcggccgctaattgggatacgcgaactgaatcgctcgtatggatgcgtcggcgaggtcgtctgctggtgggacacaacaccacgtcggaggaggatcggtgccggaattgtgggccgggacggacgcggggaaggccgagcaccactgcacggtcatcgatgccaacgggacgacgctgctgtcgcggcgtgtgccgaacagcgaggctgaactgctcgaactcctcggtgatgtattggggatagccgacggcggcctggtcacctgggccgtcgacctgaacgccggcggggcctcattgtggatcgcgctgctggtcaaccacggccagaagctgctctacatccccggccggaccgtgcaccacgcctcagcggcctaccggggcagcgggaagacggacgcgaaggacgcgttcatcatcgccgacaccgcccgcatgcgccgtgacctgcagcctctgcaggagctcggtgagatcgcagtagacctgcggattctgaccgcgcgccggatcgacctcgcggccgaccgcactcgcgcgatcaaccgcctccgcgcgcagctgctggagtacttccccgccctggagcgtgccttcgatctgagcacctccaagagcgcgctgattctgctggccggctaccaaaccccggcagccctgcgaaggatcggccggtcgcggctcacgacctggttgaagaaccacggcgtgcgcaccagcaccgctgccaggagcacggccgaggccgcggtgaccgccggagaagcccagttcaccgtcgttcccggggaaaggacctgcgcgcggatggtccacacgctggccgcagcggtgacggccctcgacgaggaaatctcggaactcgaagcccagatcgaggcccggttccgggagcatcccgacgcagaggtgatcaccagcatgcccggcatcggcatgacgctgggcgccgagttcatcgccgctaccggtggagacatgtccgtgttcggtagctccgaccggctcgccggtgtggccggcctggccccggtcccccgtgactcgggcaaggtcagcggtaacctccgcaggccccggcgctacagcaggcgactgttacgaatgttctatctctctgcccaggtcgccgccgtgcattgccctgaatcgaagcggtactaccagcgcaaacgcgcggagggaaagtcccacaagcaagccgtcctggccctcgcccggcgccgcctaaacgtgctctgggccctcctgcgcgaccacaagctcttcgagaccgctgcggcccgcgcaggcgcgacagcgatatgacccgaccacagtgggtcactaccgccgcttgacaacaccattggga

SEQ ID NO: 7526 - DNA, 1515 bp, unidentified
  source 1..1515: mol_type = unassigned DNA; note = element_bab1acd
  misc_feature 1: note = core
  misc_feature 2..460: note = LE
  misc_feature 461..1255: note = CDS
  misc_feature 1256..1515: note = RE
  misc_feature 1285..1509: note = bridgeRNA
gaatgacatggactccccctcatcaggctctgccacacttggtaagtctgactacgaaattaccggaggccaccatgtcacaatctatttatggcattgatttagccaaacatagcttcagtatccacggtgaagatcatcaaggcaaggtgttgatccacggaccactttaaaaggacatcaattcttgctggtcatatgtcgcgcttgagttcggtgcttctctcatcattttctgacgcgcgccagttactctttgctggcacaaacagtaaccagaaatgcctttgtttctctgatgttggccggggcggttgtaggcgctcccggcgccgacaacctaaaaatacatccatgtatttttcccctgatctgtgaatacatctaagttttaaaatcaatagtagaaatttgttacagggcacaataactggcgaagctcggccatacgccaaagatcatggcatcgaagtatgtggcacctttcagaacgggtgccaaaaacgatctcaatgacgccattgccatttgcacagctgtcatccgtccatcaacgcgcttcgtccggataaaatcggccgatcagcaagcgattttgctcctgcatcgtgcgcgtgatcattgggtccatgaacgaacggcattgctgaatcaaattcgcgccatgctggccgagttcggcattatcgcgccaaaaggacgccacgcattacaaaccgctatccctgaagcgcttgaagatggtgacaacctactgcctgatctcgccagagcaatcatttctgattactttgggcatttactgagtttgaatcagcgtattgctgaacaagagcaatgcttcgatatgctggtttctcgcagccgccaagccaagaaaattatgaaagtggcaggcattgggccaattacagcgacagccgtcatcgccagcattggcagaggtgaacagttcgataaaggacgggatttcgccgccaggctcgggttggttcccacccagtatccaaccggtggtaagccaaggctcggacgaattaccaaaaaaggcgaccgatatctgcggacactcttggttcatggtgtacgtgctgtgatcgccagtctcagcgataaaactgaccgactcagcttgtggtgcaaaagtctggtcgaacgccgtggctttaaacgggcgattgtcgcactggcggcaaagaacgctcggatcatttggtcgctgctgagaaacgatactgagtaccaaacgatttaaaacggaacattttttcaacggagtcacttgcttcaccgggtcattgcaatagctaatgatggtgtaaggttcagaccttttgcgggaaaacctgatagcgcggcgggcactttcgatgccgtctaacgaatgaggaaccgcaaccgcgtagtgtcatcagggtcatgacatgaatgccagttaacagaccgaatgtagagcggcagtcccaaaccttgcattacctgacgctgttgttgacaaccgggagagtccatgta

SEQ ID NO: 7527 - DNA, 1161 bp, unidentified
  source 1..1161: mol_type = unassigned DNA; note = element_bab3007
  misc_feature 1..2: note = core
  misc_feature 3..192: note = LE
  misc_feature 193..1149: note = CDS
  misc_feature 1150..1161: note = RE
  misc_feature 15..216: note = bridgeRNA
cttgtctgttgaagaggcgttaggctggtttggtcttccgggacgtccgcctggtgttcacagcaccaggcggaccgccggcggagggaccgataacccctgagcgtttaggcgctgcgggtgagcctggtcgccgctggcatatccatgacccggatggttgcagggacttttaggtccggagccacaaggatgggatcgatggataggagcaagtctagcacgacgatcgccgggatcgatgtgggcaaacgccagctggatgcggcggtgcacggtcgcgccgagcagcaccaggtggccaacgacccggccggctgggaggcgctggtcgcctggctgggcgatcggggcgtggcgcgggtggggctggaggcgccggccggctacgagcgcggtgtgcgggccaggctggaggcggcgggcctggaggtggtggtgcatcagccgctggaggtgaagctgttcgcgcggctcaagcggcggcgggccaagaccgaccggctggacgcggccctgatcgcggcggcgacggcgcaggtcgatacggtgcgggcggcccaggatccgcgcctggccgagttggccgaacgcctgacggcctacgagcagatcaccgatcaggccgcccagttgaaaaccttcatggagcacgtggctctgcccgaccttgtggccagcctgggcgaacagatccaaagcctgtcgcgactgaaagcccgcctcgcgcgcgagatcctggcgcggctcaaggcttggcccgacctgctggcccgttggcgcctgctgcagtcgttgccgggcgtgggaccactggtggccgccagcctcgtcgtgcgcatgcccgagctgggcgtcctgcggcgcggccagcccgcagccttgctcggcgtggctcccttcgaccgccagtccggccaatggcgaggccagagcttcattgggggcggccgaagccgaccgcgccgcatgctctatctcgccgccatcgccgccaagcgcttcgatcccggcttcaaggccttcgccgagcgcctcctgagcgccggcaagccccccaaggtcgccatcgtcgccgtcatgcgaaaactcatcgaggccgccaacctcatcctcgcacgccagcaaccctgggtccgacacccctgatcaacatggttg

SEQ ID NO: 7528 - DNA, 1598 bp, unidentified
  source 1..1598: mol_type = unassigned DNA; note = element_bab31f5
  misc_feature 1..5: note = core
  misc_feature 6..225: note = LE
  misc_feature 226..1470: note = CDS
  misc_feature 1471..1598: note = RE
  misc_feature 18..240: note = bridgeRNA
tttttagtaccataaaagtgtaagtgttaagcacatcattagtgctgaaacatttgcacttattttttataataaagggagtaattggtctggcgtgccgctttttggatcaagcatccgtcataaaaaccgtcagccaccccttattataagcattcgattaggcaggttgaaactcttttgagctttcgtgtaacgaactaaaatgaattgtaataagtgcggatggtaacaattacaacaaatttagatcgaggaggaaaagcatccgtgattagtgttggcattgatatctcaaaagagaaaagtactgtgtgtgtattgaaaccttatggtgaagtggtttgctcgccttttgagataaatcatacggagaaggatttatcagagctatcagctatgctgttgaggcttaatgaggatgtcaagattgtaatagaggcaacaggcatctaccatcttccggttctcagttatttgcaggatcgagggctattcgtgtctgtgataaatccatttgagatgaagcagtacaggagccaagggttgaggtctgtgaaaacagataaaaaggattccattgcaattgcaaactatggtatcgatcactggtttagacttaaagattatgaaatagcggaaggcctttatcaagaactaaaaatattgggaaggcaatattcgcattacatgtgcatgagaatagaaagcgtgcagtcgctgacacatttgttggattatacaatgccaggcattaaaaatctgctgaaaggatggcaagattcaaccgaaaaagataaactatcagactttgttgaagcgtactggcattttgataacatcacaaaattatcattagaagaatttaccgaaagctataaaacatgggcaaaaacaaaaggataccaccaaagccagaataaagccgtcaagatttattccctggcacaagatggtatccctacgttgcctgccgaaatggaatcaacacagattatgattcagcagtcagtaagtgtattgaggcaaatcaatacaactttaaagactattttaacacgaatgcaagaactcgccaagaagctgccagaataccccgttgtaagagcaatgggcggtgttggagatatactcgccccaaaactaattgcagaaataggcgatatccgaagatttcacagcagcaaggcacttatagcatatgctggaattgatgcgccgccgtatcaatcagggcagtttatcggaacaaaccgtaaaatcagcaagcgaggatcctcaacgctaagaaagataggatatgaagtaatgagggttttaaagacacacaatgcccctgaagatagcgcggtttattggtatatcctaaaaaaagaatctgagggcaaatcaaaaaaggtttcaaagattgcagggctcaataaatttttacggatctattatgcacgagtaaaagaagtataccagtaaaatcaagcttcgtaagcaagactggctgaatgaatcgagtctttttgtcgtgcgaaaaaatagcagaagtccaaagcaaagaaaaacctgcaagaaatcaaagataactcttgatttttcttagcagg

SEQ ID NO: 7529 - DNA, 1361 bp, unidentified
  source 1..1361: mol_type = unassigned DNA; note = element_babd4e5
  misc_feature 1..2: note = core
  misc_feature 3..74: note = LE
  misc_feature 75..908: note = CDS
  misc_feature 909..1361: note = RE
  misc_feature 1078..1349: note = bridgeRNA
tgatgatgtgaccgccccccgacggcatcgctgtgccaaggtgggtctttgaggatccacaaaggagggcggtcatgtcggagattaccacggtcgggctcgatctggcgaagaatgtgtttcaggcgcacggagctgactcctcggcacgggcggtgctgcgcaggaagctgcggcgggaccaagtgctggcgttcttcagccagttgcccccttgtgtggtggcgatggaagcgtgcggcggtgtgcacttctggggtcgcgagatcgggaaactggggcacgaggttcggctgatcccgcccgcctatgtgaagccgttcgtgaagcgacagaagaatgatgccgccgatgcggaagcgatctgtgaagctgcgctgcgcccgacgatgcgcttcgtgccggtgaagagcgaggagacccaaggggccgcgatggtcttccgcgtgcgcgagcttctgatccggcagcggacgcaggcgatcaatgccctgcgcggacacctggccgagttcgggcagatcgtgccccagggagcggccaatgccgcgcggctgatcgccatcgtcgaggacccggacagcggcctgcccgccgatgccaccgacacgctgaaggtgctggtcgcggcgctcgccaatctcgaggcggagatcgcccggctcgattccgagatcgcccggggggcgaaggagagcgaggtcgcccgacgtctgatgacggtcccgggcatcggcccgctgatcggcacggccatcgcggttctggcccctccacccgagacattccgccgggggcgagactttgcggcctggctcgggctggtgccccggcagcattcgaccggcggcaagcagcggctcggggccacgacgaagatggagagcggtccctcaggcggctgctgatcattggcgccaacagcgtcatcatcaagcggcatgtccacgccacggcccgaccgggcacatggctgggcgggatgctgacccgcaagccgccgatgctggtgcgcgtagcgctggctaacaagatggcgcggatcgtctgggcgctgatggcccgcggcggcgtctaccagtctccggtcgcggcggcataagccgaccgccggccgcgagagcgtcggcgcggaagagggcaaggagcggtatggcgcaacggtcgtgagacgggatcgggaaaaccagggcgcaacagagtgccatcgagcacgcggctttgatctggaccggacctgcgaacaccatacgggcccgcggcatgtaggcggccgcattagaggccggacacatgtcagcactcgacgacgcgccagattcagctcgcaaaatccctcttgcgcatggggcggttacaca

SEQ ID NO: 7530 - DNA, 1974 bp, unidentified
  source 1..1974: mol_type = unassigned DNA; note = element_bada46d
  misc_feature 1..2: note = core
  misc_feature 3..272: note = LE
  misc_feature 273..1484: note = CDS
  misc_feature 1485..1974: note = RE
  misc_feature 11..247: note = bridgeRNA
ctcgtataatgtatttacggtttagatgtggtgggaaccgcatgaaacccacttgttgtttcatcagccagatgagataataaggccagcagacagagggcgcaggtatgctccttgaagtacggcttccacggaaagaattgcgcctctgtctttgcgggtggacacgaatgagctggatagcgaagatgcgctgaatgtctaacgaggttgtgttccgcaaagaagtgtgagggaactctgtctggaatttcgaaacaggaggtttcgccatgttctactgcgggatcgacatcgccaaatacagacatgaagccacggtcattgaccaggccggggcggctgtgcaggagagcatttcatttgccaacagcaaagagggctgcgagaagctgctggcgctattccagcggctggacatctccaaagaggggctgctcatcgggatggaagccaccggtcactactggctgagtgtgtacgggtatctgttggagcagggctttgaggtaaaggtcatcaatcccatccagtccgaggcgttccggaagatgtacatccgtcagacaaagaatgaccggaaggacagcttcattattgcccagatcatgcgcttcgggcagttctctgccacgaacctggcggaggagggtatcgtagcgatgcggcagctgagccggtaccggctggctctggtggatacctgcggggactgcaagcgtcgggtcattgcgctgctggatcaggtcttcccggagtatgactcattgttttcagatactttcggcgtcacatccaaggaggttctctcccaataccctaccccggagggtatgcttactgtatccatccggaagctcacaacactgctggagaaggccagccatggccggtttggaaaagagaaagcggaacagctgaaggctgcggcggccagttcctttggggtgaacttcgccaaagacgcttttgcctttcagatccggcagctcatcgagcagctggagttcctggagaggcaggttgcggagttggaggagcagatcttttctctactgaagcagaccggcagctatatcaccaccatccccggcattggggacaccctgggggctattattttgagcgaaatcggagacatccaccgctttgacgcacccaataaattggtggcttttgccgggctggatgtgcgggtcacacagtccggtgagtttaccggaacaaggcagaagatttccaaacggggctcaccgtatctcaggcgggccatctggctggccgcctccagggcggctttttgtgaccctatcctctcggagtattaccagggactgagagccagggggaagcaccatctcactgctgtcggagccgtctccagaaaactctgcaacactatctacactatcctcaaagaagacagaccttggcaaccgatccctcccaaaggcaaaaaagtgtcgaattataccgaagaatagcgacagagagcggttttcctgtttttggccgtattatcttctcaaatctttacatttggggggatatacacatgatgtccatccaggaaactttgcgtctattcggaattaccagatgctacaaagggtttctgcacactgcttatgccattcagctagctgttgaaaatgagaaccgcttggaggctgtcacaaaagaaatctacatggagaccgctttccacttcaactgtacttggactgcggtggaacgcaatatccgcactgccgtagcgagggcatggaaaatcaaccacgctctgctatgtgatatggccggttatccgctgacttgtgcccccaccgcctctgaatttattgagattatcgcctcttacatacttcgttcatctcagccacagctaccgctgcggcctcttgtcatgctttaattatttcacgtctttcctttctctttttcactttttgctattgactttttatagctggt

SEQ ID NO: 7531 - DNA, 1385 bp, unidentified
  source 1..1385: mol_type = unassigned DNA; note = element_badeba4
  misc_feature 1..2: note = core
  misc_feature 3..85: note = LE
  misc_feature 86..1114: note = CDS
  misc_feature 1115..1385: note = RE
  misc_feature 1088..1372: note = bridgeRNA
tgatggggtggatgcccctcccgacggcatctcaatgtgccaggatgttgatgaacgtcatcagcaaaacgaggagtaggcatccatgtgcgaagttagcattatcgggattgatctggcaaaacggagcttccagctgcacggcgctggtgtggacgggtcggcggccttccgacggaaggtgtcgcgggagaagcttcttcagtttctggaacgacagccgacttgcctggtggcgatggaggcttgtgcgacttcgcacttgtggggccgtgagattgcaaagctcggccatgaggtgaagctcattccgccgatttatgtgaagcctttcgtcaaacggcagaagaacgatacggctgatgcggaggcgattgccgaggcggcgtcacgcaagaacatgcgctttgtggccgtgaaggccgaagagcagcaggcgcagagcatggtgttccgcacgcgggatctgctggtgcgccagcgaacgcagatgatcaatgcgctgaggggccacctggccgaatacggtgtcatcgctccccaaggtgccgctcatgtccgacggttggcgcaggagatcgagaaccccacctcctgcctgccagatctggtccggaaactgggccgtatgtatctgaagcagatcacggaatacgacaccaggatcaaaggtctggagcagcacatccgcaagcttgcaaaagccgatgaagatgtctgtcgactgatgaccataccaggtatcggccccatctgcgctatggccatccgggcctttgccccgccgatggaaaccttcaagaacggtcgtgactttgctgcttggaccgggctcgtgccgcggcagaaatctactgggggcaagcagatactcgggaagacatcgaagatgggtcagagagacatccgcaggcttctgatcatcggcgccatggcggtggtttgctgggcatcccgaagaggtgcgccagaggggtcttggctcgcacgaatgatggcacgcaagcctcgcatgctcgtcgccaccgccttggccaacaggatggcaagggctgtttgggccatgacaataaagaatgaggactaccgtaatccggcggtggcagcagcctgaacaggcagtcattcgtcgtttgccgtcggggatgtgagaaggtcggaggaaaggtaaggaacaacggtcatcgagacgggatcaggaaaaccagggtcacccaatgagctgagagctcgcgaatttgatttggacctgatctgcgcatctccatacaggcccgcggcgtatgaaaggccgcgactcagaggtcggacacatgactgcacctgatcgcatgttccaaagctggcccgaagaaaagtcttgcatcacctggggcatccacaca

SEQ ID NO: 7532 - DNA, 1420 bp, unidentified
  source 1..1420: mol_type = unassigned DNA; note = element_bae28b3
  misc_feature 1..2: note = core
  misc_feature 3..265: note = LE
  misc_feature 266..1174: note = CDS
  misc_feature 1175..1420: note = RE
  misc_feature 1189..1385: note = bridgeRNA
acatggggtaatcgcgggagcgagtcgccccatcgttccgacagtgtcggagccggcgtggagccgactgctgctcttccgatcatgttggtgccgcgagaccgtcgcgcgattgcgtgtgctcgggtgctggagaccggaggatgaagatggctgagtctgtgggtctggacgtgtcgatgaaggaaacggcggtgtcgatccgccgcgacggcaagcggatctggcgcggcaagtgcggctcgatcctaaactcgtcgccgaggtgatccgccgtcgcgcacctgacgccgcgcgggtggtgttcgagaccgggcccttgtcggtgtggttctttcatgcgctgacagcggaagggctgccggggatctgcattgatgcgcgccatgccaaggcggctctcgacatggcccccaacaagacggatgcaaacgatgccgatggtctggcgcaactcgccgaggttggcttttttcgtgaggtgcgggtcaagggcttcgacagcatgctcggacgcacgttggtggcggcgcggaaccggctggtgcagatcacgaccgagctctccaaccagatccgcgggctgatgaagacattcgggctcgtggtgccggccggcaagggcagccggttcgaggcccatgtccgcgcgctcctggctgatcaggagggacttgcccccatcatgcttccgctccttgacgcgtggcgggccgtgcgcgtgcgcgcggccgagcttggacggcaactcgtcgccagcgcccgccaaagcgaggcatgccagatcctgatgtcggtgccgggcgtcggcgccgtgaccgcgacctcgtttgcgaccgcggttgaggatcctgagaacttccgcaggtcccgatcggtcggcgcctggctcgggctgacgacaaggcgttaccaatcgggcgaagtcgactatgacggccacatctcgcgacgcggcgacactcacctgcgagggctcctctatgaggccgcgaccgtcctcttgacgcggacctccgctgagagctcccttcggacatgggggctcaagctccaggagcggatcggctttaagcgtgccgccgtcgccgtcgcccgaaagctcgcggtggtgatgcacgcgatgctgcggtccggccagctctttgaccggaccgccggcgtggccgcttaagccgcaccgggcgacggcgttcgcctgcgaaggctgaccggacgtcccggccgggacgtgggccggatcatcccgcttgatggtgtgcactgctgagcccagcggagtgcgtcgtccaccttgggaggtcctaccctcgcgaagacccatcgtgcagcggccccgtgccgactgcgaagacgaccctgaacccggcacacatccgtccagaaaaaagggccttgcacaaggagccgcgatgagacg

SEQ ID NO: 7533 - DNA, 1663 bp, unidentified
  source 1..1663: mol_type = unassigned DNA; note = element_baf5ab2
  misc_feature 1..2: note = core
  misc_feature 3..362: note = LE
  misc_feature 363..1526: note = CDS
  misc_feature 1527..1663: note = RE
  misc_feature 108..337: note = bridgeRNA
cttgtataatataataaagtttaaaatttaatatattatacttacctttctccattaattattttatttttatttctaaaaattttggtttaatggtaccgttattttatattttaattttaaataattaacataattttactttgaattaaattcattgtataattaatttattaacactgtggacttttataaactccttatagctagactatttaaaggagactattgccacagttttacgctttattggttattagttagatagggctttgactctttatatccagcaaggttacaaggctaaaactaagtggaatcgtcacaagtgttaaaatacaaattcaaggagttgatcttttatgatctttatcggcattgatattgccaaatctactcactttgcttctgctgttaactcagatggtgaagtgcttattaacccatttaaatttactaatgataatcaaggtttcaatttattcattaatacttttaaggattttgatttgtctaattgtttagtaggcttagaatctactggtatttatggcgacaatctcactacttttctttttgaaaaaggtttcaagattggtcgtattaatccaattcaaactgattctcttcgttcttctaatattagaaaaactaagaatgataagattgatacttttttaatagctcaatgtcttatgttaggacattatactttaattactgaaaaagatattcagcttatcaaattaaaaactatttgcagatttaaatttgatattaagaaatctcagtctaaatccaaagttcaattagttacatgcttagatattgcctttcctgaattagccaatttctttaataataatttgcatattaagtcatcttatgcattactttctaaatatccaacagctagaattattgctaatactagaatcgatgctttaacaaatttattatattctgcatcaaagggacattttaaacaagataaagcaattgctcttaaagaacttgccaaaaactctattgcaatggacaaccctgcaatcggtattcaaattaaaatgttaatcgagcaaatccaaatgcttgaaaaacaaatagatttgctcgatattgaaataaccaatattatggaaagtctaaattccccaatttcttctattccaggtattggtaattggttaggttccatcattattagtgaaattggcgatattactcgcttcagcacatctacaaaattacttgcttttgctggtttagatccatctgttagacaatctggaaattttaatgctactaataccaaaatatctaaaagaggctctaaatacttgcgttatgcaattaatcgtgcagcacaactaattatttggaatgatgataccttctaccaatattataccacgaaattggctcagggcaaatcatatttaaatgtaattggacatgtttctcataaattaacaagggtaatatttaaattgcttacaacaaacactacatttaaaaatagttaacaattttcaaagtacatatttccaattattaccagttttaaaaattaccttaaaactgttattaatcatggaaatttttatttataaaaaatattaaaaattttttttaatatttctattgacaattaatagttagt

SEQ ID NO: 7534 - DNA, 1406 bp, unidentified
  source 1..1406: mol_type = unassigned DNA; note = element_bb02d3c
  misc_feature 1: note = core
  misc_feature 2..229: note = LE
  misc_feature 230..1393: note = CDS
  misc_feature 1394..1406: note = RE
  misc_feature 13..241: note = bridgeRNA
ctacttagagacttcactcaggatcgacgtccggccagactcggtccaggtgtccggcgagacgctctcaattcgcggctgcccaccggtgtcattggtgtggctctcatctggcttgcggtctcgccgggcaccgcgcgaggagaggctcaaaaggggtttgttctgctcgaagtagcggtgccctccttgctgacaacccgtccggttcagcattgaggaggcactgatggccgtcatcatcgggatggacccacacaagcgatcggccacgattgaggtcgtcgacaaacgcgctcagatcctcgcggtaggtcggtatggaacagacaaggccggctatggcgagatgctcgtcgccgggcgtgagcacccggatcggacctgggcggtcgagggctgcaacggcatcggcaaacacatcgcccaccggctcgtgcatgacggggagacggtggtggacgtgcctccgaagctgtccgcgcaggtgcgggtgttcgccaccggcaacggccgcaagaccgacccggtggatgcgcactcggtcgcgatggtcgcccttcgcaccccggggctggtccgcgtcaacgtcgacgacgacctggtcgtgatgggcatgctcgccgacaggcgtgatgagctcggccgcgcgaggacccagacgatcaaccggctgcaccggctgctgcttgagctgttccccggcggggcaaagcaattcctgtcctcccagcaggcacgtgcgctcatcgcgacgatcaaaccgcgcgaccttgtcggcaagacccggcgccggctcgcggtcgagctgatagtcgaactcgagggcatcgacaaaaagatcaaagcgatcaagaaggaactgaccgagttagtgaccgagcgcggctccaccctgctcgagctacacggcatcggcccgtccggcgccgcccgcctgctggccgacgtcggtgacatccaccggttcgccgaccgggatcggttcgcgtcctggaacggtacggcacccttggacgcctcgtccggcaaccagcaacgccaccgactctcccgagccggcaaccggcgaatcaaccgggcgctgcacatcatggcgatcgtccagctgcgccacgcaaccgagggccgggcctattacgacggcaggaaggctggcgggatgccgtcgatgatggcgatgcgcgcgctgaaacgacgcctgtccaacgtcgtgttcgcccggatgctcgccgaccagaaccgacgtgaggcagcgggcccgggagggcaatcggggacgactctgttatccagcgcgaccgacctgaccccggacatcggctcttcggataagccacttcccggacccgccacgacccagcctagaaccgcgatccccagcgcgtcttgacacaaaggggtgc

SEQ ID NO: 7535 - DNA, 1175 bp, unidentified
  source 1..1175: mol_type = unassigned DNA; note = element_bb0a9d8
  misc_feature 1..3: note = core
  misc_feature 4..388: note = LE
  misc_feature 389..1162: note = CDS
  misc_feature 1163..1175: note = RE
  misc_feature 6..201: note = bridgeRNA
cttgcataagaaatgttgtaaaggattcggtatgcctttggccgggcggccgcccggccaaaggcgccgaccgtcggatcgccggcaccagaacctttgggggttacggagaagcaggatcgcggtcggttcctcatcgtggcccgaatggttgctggaacaacctggttcgtatgcaaggcagggacgacaaggatgaccgagattagcatgaaagcggccggtattgataccgggaagatatggcttgatgtcgccacctacccggtgagcgacaaacagaaagtgcccaacaacgccgacggctggcagactctggctgactggctcgagcggcagggggatcggacgggtcgggatcgaagcgtccggcggatatgagcgcgacgtgattgcgtatctgcatcagagaggctttgaggtcgtcctgctgcagccgcggcaagtgcgcgctttcggcctctataagctgcgccgagccaagaacgaccagctcgacgccgcgctgatcgccgagtgcgctgcccgttcggatgcgcgatgccatgcgccggatagccggctgatcgcgtttggcgaatggctgctgttcatcgagcagatcgaagccgatatagcctgcctcaagacccgccgcgagcgtttcaccgacaggcggatcctcgaggagatcgatcgttccatcggtgagctcaagagccgttgcaaagcccagctcgcgctgttgcaggccgctgtccgcgagcatgacgatctcgcccggaagcttgatctgatcgaaagcatcgacggcatcggcatccgtacggcactcaccctggtcattctgatgcccgaactcggcagggtcgaccgtgaggagatcgccgcgctgaccggcgtggcgccttatgacgaccagagcggcaagcgtgaaggcgagcgccatatcgccggcggacgggcgcgcgtccgcagggccctgttcaatgccgccttaccggcgtcgcagcgctggaacgagacgctggttgagctctacgatcgtctcaccgcaaaaggcaaatcccacaaagcggcgctcatcgcctgcgtccgcaaactcatcatcttcgccaacaccgtcgtcaagcgccaaaccccatggacgaaaagcgcgccacaacaaaattcttgcgcttagtctaatggttgcg

SEQ ID NO: 7536 - DNA, 1578 bp, unidentified
  source 1..1578: mol_type = unassigned DNA; note = element_bb0bdb6
  misc_feature 1..2: note = core
  misc_feature 3..247: note = LE
  misc_feature 248..1450: note = CDS
  misc_feature 1451..1578: note = RE
  misc_feature 7..225: note = bridgeRNA
ttcgtattatagagttaaccagtttttactggttgctcttttttttataggacctattatttcagtagccagggtagaacgtacgggtgcgtgggagttagatctcgtcaactaaactgttcgccccctacttgtagaatgatgtttgaggctggttgggacaaatgatctcgtataacaagcgaagctatggaactacaggaaggtataggggttactggtgagtaaaactaagggagagatattaatgaatccagtcattggcctagatgtagccaaaggagaaagtgaggttcaagcctttttagataaagacaagccgttcgggaaaagtttcagtgtaaagcataccaaggaggatttagattcgcttatttcttttttgagagagatagagggacataatggggttagaccagcagttattcttgaatctacaggacattaccatacaccgattattcaatgtcttgagggatgtcagtatctaaacatcttggtaaatcccatcatttcttatcaagctaagaaaacaagccttagaaaggtaaagactgatgccgttgatgcatatcacctttgtgttctttactacaaggaagaatttgagccatataagaaaagaggactgagacttctaaacctgagaacattgtcaaggcaatacgaaaccgttacgaacctttacatccaggcaaaacttcagtttcatactcttcttgatcagatatttcctgaatacaggggagtcttcggggatttattttcgaaagtttctcttaaaatattaaaggagtttccaacatccgaagatgtactgatggcaggaaaagcaaagattttggcacgaattaaggaaatgcgtattaaacgatccccaagttggatgagggagaaggcacacaaattaatggcttcagctaagaggaatccattccaacaaggtgtttatgaaagccagttgttcagtttggatatgtatatcaatatgcttcttcaataccaagaacacctatcaagcttggagaggcagatagatgtcctggcagaagaaattgaagaatgtaagataatccaatcaattcccggtataggagaaaaaatcgcggcaacgattatttctgaaatcggggaaattgaccggtttaatcaccctaaaaaacttgtggcttacgcaggaattgatccaagtgtccattcatcaggtaagttcaccgctacgataaatcatattaccaaacgaggttcaagccgattacggcacgctttatatatggccgttttatgcggtataagaagctcgaggaacaagaagctaaaagagtattatgatcggaaacgaaatgaaggaaagccttcaaaagtagcaatgatagcttgtgtaaacaagcttttacactgtatttatgcaatcctaaaaaggaatgagcagttcctagatatggcttaatcaacaagaaaaagcagctaataaaaaaccttccaaaaggtatttggagggttatttggcgtgccttccaaagtataacacggaagaaaaaaatttttaataagaagttcttgactcctattagctgg

SEQ ID NO: 7537 - DNA, 1461 bp, unidentified
  source 1..1461: mol_type = unassigned DNA; note = element_bb0d414
  misc_feature 1..2: note = core
  misc_feature 3..138: note = LE
  misc_feature 139..1185: note = CDS
  misc_feature 1186..1461: note = RE
  misc_feature 1225..1457: note = bridgeRNA
agatggcatggtcgtcccacctacacgttgctgttgaagtgaggcaataaccccctggagggtggtacctcgcagtaacagcatcaaagtgccaaagtgatgtttcgacgaaaccacttaacttttggaggctgcgccatgcaatctaccgcacaactgccagtcattggaatggatattgccaaaaatgtttttcagctccatatcgtggatgccgagacaggggagatacagcgacgccagctcaagcgcgccaaggtagcagagttcttctccaaccgccaaccgtccctggtggcgattgaagcttgcggcggagcccaccactgggcacgcaccctgcaaggcatgggtcatcaggtcaaactgctgccggccaagcatgtgcgcgcctttgtgctgcgcgacaagaccgacgcccttgatgcgcaggccatttgggtggcggcccagcaaccgcacatccgggaggtgcccgttaaaagcgagcagcagcaagcctgcctgagcctgcaccgcatacgagcccagttgatgaagatgcgcatcatgcagaccaacgccctgcgtggcttgctctacgagttcggcatggtgctgcctgagggacacaagaaattgctgcaatccatccagggcgaactggctaaagcccagcaggacaaccgcttgtgcgacgtggtggtgttgagcgtgcaggagcagctgaagcgaatcgatgcgatgcaagatgacatcgaccggcttgataagcggctggctgccatggtcaggcaaaaccagcacatgctggccgtgcaggcgattccaggcataggtccgttgacggcaacggcattgatagccaccgttgcggacgtgtcgacattcaagagcgggcggcagtttgccgcctggctgggcttgacgccgcggcaagtgggcacgggtggcaagacgcaacaattggggatttccaagcggggcgatacctacttgcgcagcttgctggtcaacggggcaagagccgtcgtcggtcgaagcgcgcacaacagctggctcgaacgattgttgcagcgacgccacttcaacgtggtggttgcggcgctggccaacaagatggcacgcacggcctgggcggtcctggccaaaggcaaagcctttgactcactcaagtggaatccgaccgaggctgccgcgacctgaaatctaaagccaagtctggatcagttgattacgaaatactaattttttgaaggagagcctgcaccaagcgatgtgatgggtcacaggtcaaaccggggcgggggcattccgaactatcccttgggcaataagcccgaccatcagataggaaccccgcccgcgaatgccatcagggccagcaggaaatcaagcctgcacaaacaggccgaatgtaagactgcaagccctttgaaacttcacgccgcccaatcttgctttccttgggacgaccatgta

SEQ ID NO: 7538 - DNA, 1416 bp, unidentified
  source 1..1416: mol_type = unassigned DNA; note = element_bb10a9f
  misc_feature 1..3: note = core
  misc_feature 4..83: note = LE
  misc_feature 84..1145: note = CDS
  misc_feature 1146..1416: note = RE
  misc_feature 1161..1404: note = bridgeRNA
atgatggggtagacggcccccggcggcatctctgtgccaatctggccggtgatgaactcgttccggaagcggagccgtccacgatgagcattcccatgattgggttggaccttgcgaagacgatcttccacgtgcacgggatcgatgcatccgggacggtggtgctccggcggtcgttgaggcggggccaggtggagcgcttcttcgccgcgctgtcgccgtgcgtggtcgagatggaaggcgtgtggcggatcgcaccattggggcggctgttgcagcggctcgggcacgcggtgcggatgatgccggcgcactacgtgaagccctccgtcaagcgcaacaagaccgacgggcgcgacgccgaggcgatctgcgaggcggcgagccggccgaccatgcggttcgtagcgatcaagagcgaggacgcgcagacggttttggcgctgcatcgcaaccgggcgctgctggtgcgccagcggaccatgacggcgaacgcgatgcgggccgggctggccgagttcggcatcgtcgccgcccagggcaaagccggactggatgcgctgctgaaggaactcgcggccggcccgcagggcctcccggaggcggcgcgtgcggcgctgtcgctgctggctgttcaatgggagaccgtggatgcgctggtgcgcaagctcgaggcgcagattgcgcggctcgcccgggcggacgcggcggcgcgtcgactgatggagataccaggcgtcgggccgatcacggccagcatggtggtcgccaaggtgcccgatgcgggcctgttcgacggtgcccgcgacttcgccgcctggatcggcctcacgccgcgccaggacagcaccggcggcaagcagcgctcggtcggcatctccaagcagggtgaccgcaccctgcggcagttgctcgtgctgggtgccacctcgcagcttcgccaggcgcgtgccaagggcatccgcgacccctggctgcgcgatcttctggcgcggcgccccgccaaggtggtggccgtcgcgctcgccgccaagacggcgcgcatcatctgggcgctgctcgagacgggcgagcgttatcgcgccaaggacctccccgagaacctccccgaggggcgccaccagagccttcccgcggccgcctgaaccagacgtcgaaggatcgctgtccggccccgaacaggccggtcggcggagcaagggagccgaaggcacgacggtaaacggtcaggaaccgggatcgggacactcctcgtcgtcatcgcaccgcgaatgcgtcggaatgttcggagcccgatccgcgaagtccctcagggccagcggtcatcgaccgcatccaaaggccggatacatgaccgctcccgatccgccccgccaagcccacaaagcacccttgccaaccaggggccgtccatac

SEQ ID NO: 7539 - DNA, 1520 bp, unidentified
  source 1..1520: mol_type = unassigned DNA; note = element_bb1ff81
  misc_feature 1..5: note = core
  misc_feature 6..256: note = LE
  misc_feature 257..1510: note = CDS
  misc_feature 1511..1520: note = RE
ctcactggtgcaccatgcttgtgtcggtagctgtgaggctgctgatgcacccgaggtgccgcctggccaccgccccgctcgcttgacagagctgatgtccactgtgagttctgcggggcccggcggttacccgggacgtgccgaccgtcgacagggctgagcgccatcgagcgccgatcagtgagcgaacaggcagccacgtcccggcaccgcatgagggtgcctccccactgggactagcagcgaggaggcaggcttgaagtctgccagaaacaccctgcccgaagaaccggccggcggcgttaccggcgggattgactgggcgagcgaagaccatgcggtgtcggtcgtcgatgcccgcggccgcgagaccgggcggcacacagtccagcacaatgctgctggcctgcgcgagctgatcgatgtcctggcccgggccggtgtgcgggagaccgcgatcgaacgccccgacgggccggtcgtcgacgccttgctcgaggccgggatcatcgtggtggtgatcagcccgaaccaggtcaagaacctgcgtggacgttacgggtcggccggcagcaaagacgaccgcttcgatgcctacgtcctggccgacaccctgcgcaccgaccgcgcccggctgcgcccgctcatcccggacagccccgcgaccgtcgcgctgcgccgcgcctgccgggcccgcaaggacctcgtcagtcaccgcgtcggcctggccaaccagctgcgcgcgcacctgcgcaacaccctgcccggtgcggtcggcctcttccaggagatcgactccccggtcagcctggcgttcctggctcgcttcggcacccaggaccgcgccgactggctcaccccggcccggctgggcaagtggctgtccggcatcggctactccggccgcaccgatcccaccgtgctgcatgcccgcctcaccgctgcgccccgcggcgccaccggccccgacggccaggccagtgcctgcatcacgcgcgccctgctggccgtcctgaccagcctgaccagccagatcaagctcttgtccagtcagatcggcgaccagctcaccgcccacaccgaccagcacatcttcaccagcctgccccgctccggaaccgtccgcgccgcccgcctcctcgccgagatcggcgactgccgcgcccggttcccgacccccgaagccctcgcctgcctcgccggcgccgcgccctccacccgccagtccggcaaaatgcgcgccgtcaccttccgctggtcctgcgacaagcaactccgcgacgccgtcaccgacttcgccggcgactcccgccgggccagcccctgggccgccgacctctacaacaaggcccgcgcccgcggccacgaccacccccacgccgtccgcatcctcgcccgcgcctggctgttcgtcatctggcactgctggcaagaccacaccgcctacaaccccgcccggcacaacgccctccagcgactcctcgaccaagatcaacttgtggcggcttgacacagggcta

SEQ ID NO: 7540 - DNA, 1353 bp, unidentified
  source 1..1353: mol_type = unassigned DNA; note = element_bb2fbb7
  misc_feature 1: note = core
  misc_feature 2..71: note = LE
  misc_feature 72..1106: note = CDS
  misc_feature 1107..1353: note = RE
  misc_feature 1109..1343: note = bridgeRNA
tatgggatggcccgccctttcacccagcatcgagtacaatgctgatatcgggaaagggaaaggaccaaccaatgtctattgctattcttggaattgatttgggcaagaactcctgcagcgtggtcggcgtcgatgcggcgggagctgtggtcgttcgtcgaacaatgcgtcgacagacgctgatcgactatgttgtgaagcttcctgcttgtgtggttgcgatggaagcatgctgcggcgcgcatcatctcggtcggcggtttgcggaacagggtcacgagatccgtttgatgtcgccggaatacgttcgtccgtatatcaaggctcagaagaacgatgaccgcgatgccgaggggatcgctgaagccgcctcacggccgacaatgcgcttcgttgatctcaagagccaggagcaattagatattcagacgttacatcgggtacgttcacgccttgtcgcggaaagaacaaaccttctcaaccagatgcgggcgatcctacttgagcgtgggctaattttccctgccggcaggctgaagtttgagcatgagcttgatcaaatgctttccgagcgcaatgagacactgtcgccgcgcatgcaagatctcatcggcggcctacgtgcagaatggaaggagctcgacaaaaaaattggagcactgaatcgcgagttcgttcagttggctcggaatgacgctgccgcgcatcgtttaaccttgatcccaggtataggcgttctcaatgccacagccctaatcgccgcggtaggcgatgctagcagctttgctaaagcgcgagatctcggctcctggcttggattggtgccgagacaatacagcaccggcggtaaacctcgcctccttgggatatcgaagcgcggcaacacgtatctacggacgctactaatccatggtgctcgggcagcattgccatcgctttcgaagagcgacacgccgatagggcgatggttgacggagatgatcgaacgaggtgtgcatcgcaatgccatcgttgtggccctggccaacaaattggcccgcatcgcgtgggcggttttgcggaaaaagacatcatttgaacgtggctacctggcggctgcggcatagtcgagacggctatgctatcgcacatgtagctcaacgaggtttgcaggaaggatcgtgaagatggcctgacagtttaccggcttcggaaagcccgtttaaaaaaatggcactaggtgccgacggtcttattgggctctgaacgcgcggatgtccatcttggccatggggacttcccatgagaccgtatacgttgacgcaaactgatcagaacaccgtaaaatcctcttgcagacgggcgggccatacg

SEQ ID NO: 7541 - DNA, 1619 bp, unidentified
  source 1..1619: mol_type = unassigned DNA; note = element_bb3767f
  misc_feature 1..2: note = core
  misc_feature 3..237: note = LE
  misc_feature 238..1485: note = CDS
  misc_feature 1486..1619: note = RE
  misc_feature 14..302: note = bridgeRNA
ttgctacaatgctaacagccgggtgaagcacgccagccaggcgtgcttttctcgtactcacgcctaagctacaatggaagggaaattggcctgacgagactttttatggactaaccatgtccggctgctaaacagtcagccatccttccactgtagcgttcggttggggcaggttgaaccactggaagcccaggatgttcgtgtgaccaagcaatttgaatcggcagtgagaaaacgatggccgccaatttgaaactgattggattgagaggaatacaggaaatgaacgcagtagggatcgatgtttccaaggggaaaagcacggtagccattatgcggcctttcggcgaagtggttgcggaaccgtttgaggtgtcccatacggatgcagagctgaggaaactggcctgctttctggagaagctgcccggagaaacaaggatcgtcatggagtacactgggagctactggcagcccatagctaaggtgctgcacgatgcaggcctgtttgtctccgtcgtaaatgcactgctgatctacaaatacggcaataactccattcggaagggcaagacagacaagctggacgctgtgaaaattgcgaattactgtcttgaccgttggacgactctcgaaagctacacccctgtggaccagatccgacaaacactaaaaacatgtcgccgtcagtatgatcagtacataaaactgaaagtcaacctcaaaaataatctgatctctctgctggatgagacgtttcccggtgtcaacacacttttcaaaagtgctcccagagatgcggatggacatgaaaaatggatagattttgccggcaaattctggcaccgcgagtgtgtctgtggaaagtctgagaaagcgtttacaaaccagtaccgaaagtggtgtgccaaagctggatacagattcagctcagaaaaggctgtgtccatttatgcccacgccgcctcgcaggtggatacgcttccgatgaccgatgcgatccgctgcctcattacccatgcggtagctcaactgaatacaatcatagaaacaatctccgctatccaacatgagatgctcacactggcttcacagcttccagagtatccaatcgtgatgcagatgttcggtgtcggccccgttctcggtccacagctcatggcagaaattggcgatgtccgccgttttgaccgtaagcaatccttagtggcctttgctggtgtagatgccccaccctgccagtccggcacctttgactcgaagaacaggcacatctccaagcgcggttctcccagattgcgcaagacacttttccaagttatgaccactctcattcaacacgcccccgctgatgaccctgttttccaattccttgaccgtaaaagacgggagggcaagcactactatgtctacatgactgctgcagcgaacaagttcctgagaatctattatggaactgtcacggcttatttagagaagttgtaacgcatcataaacgctgattttcaatccaattccatggccgtctaagcaggacggtctgctttactgcgcccagcttcatacaaccattttcttgaaatttttccgcttttggcccttgacaactcttggcaggt

SEQ ID NO: 7542 - DNA, 1394 bp, unidentified
  source 1..1394: mol_type = unassigned DNA; note = element_bb3d6c4
  misc_feature 1..2: note = core
  misc_feature 3..78: note = LE
  misc_feature 79..1155: note = CDS
  misc_feature 1156..1394: note = RE
  misc_feature 1109..1381: note = bridgeRNA
tgttggtgtggacggcctccgtacggcatctatgtgtcagaatgagtccgttgagatctcagacagaggagaccgtccatggaacagattagcagaattggaatggatacgtcgaagcattttttccagcttcacggggtgaatgcggcggaggagccgatcttgcgcaagacgttgcggcgcaaggaaatggtggagtttttcgaggcgttagcgccgacgaaggtggcaattgaagcgtgcggtagctcccatcactgggcccgtctgctgcagtcgtttgggcatgaggtaaagctaattccaccccaatttgttaagccgtacgtcaaaaggaataagaatgacgccgcggacgccgaagcgctttgcgaagcgatgagccggccgacaatgcgcttcataccagtgaagaccgccgaacgacaagcggctttgatgttggttggggtgcgtgagcggctggtccacaatcgtacgcagctgagcaacgccatccgtggctacgctgcggagtttggtctgaccaccgcaaagggcttgagccggatcgatcagttgctggagcgcatcgcgacggatgagacgctcccggctctagcgcgggaactgttcgggctccttggcaaagaatatgcgcagctgcaggtgcaacttgaaaagatagaagccaggctgatggcgtggcaccgcgccgacgcctgtagccagcgactggcccaaattcctggcattggcccgattggggggtccatgttggtgatgaagacaccagccccagagaccttccgatcaggacggcacttcgctgcttggcttggtctgacgccgaaagatcattcgactgcaggcaaatccaggctaggcgggatcacccgcgccggcgacgaggctttgcgaagtgttctggtggtagggtctacctcggttctccatcgtgtccgacagcgaggaactggctcgccctggctcatcgatctattgaagcgcaagccaccgaagctggctgccgtagcactggcgaacaaaaatgcccgcatcgcctggaagctgatggtgcgtggcgagcgctaccgaacaaacccaacaccggctgccaagcccaatacaggattcaacccaccacgcagagcgcttcaagcgcaatcgtgttgagttgatgcgaaacttgcaagaaaacgagtaggtggcgtgatcgatcgatccaacacgcgtgacactccgaaatttacactggctgttagaggccgagatagtgttaggaactcgcgtcgcggaaaaccatcttggccagcggtcatgtgcgaccgcacaaaacaggccgcacatatgatcgcaagcgatccgatcaaatcaccgctcaatgttcttgcaagtcagaggccgtccacata

SEQ ID NO: 7543 - DNA, 1531 bp, unidentified
  source 1..1531: mol_type = unassigned DNA; note = element_bb3d9f2
  misc_feature 1..4: note = core
  misc_feature 5..263: note = LE
  misc_feature 264..1433: note = CDS
  misc_feature 1434..1531: note = RE
  misc_feature 8..254: note = bridgeRNA
ccccattacagtctgagtcgtccataagggcggcccttcaccttcaaggcattacgattgggccgtaccgatggtcgccgaccgaccgccccggatggccgtctgcccctgccccgtagagggcccggggggtgttgccaccggggcgggacggcgcgcgggaaacgactgatagagatgtgccgggcccgatccgggccacggccgggtaatgtgggtgtcgcctccgcgctctccggccggctcaagggagaggatgcaccatgggcgaagcgatccgggccaccgttgcctacctggggatcgacgtcgggaagcggtcgcacagcgcgtgcggcctcggcgaggacggagaggtggccttcaggtccgacctcgagaaccggcccgccgacatcgaccggctgctcgagcgcgccggcgccggcgcgctggtcgtcgtcgaccagaagcgcaacatcggcgcgctcgtgctcgcccgcgcgttcgcgcacggaaacccctgcgcccacctgcccggatacgccgagaggcaggcccgtggcatgttcccgggcatcgccaagaccgatgccatcgacgccgaggtgatcgcgaggaccgcgcgcggcatgcccggcgcgctcaggccgctcgccgaggagcccgagggcgccgcgtcgctgcgcatcctgtcgtcgcagcgcgagttcgcggccgccgcgcgcaccagggcgaagaaccgcctgcgcgcgaccctgctggaggccgaccccgcgctcgagcgggccgtcgacccgtcgcgcggctggcatgtggcgccgctcgccgagttcggctcggcggcggggtgctccgcggccggctggcgcaggttctccgcggcggccaggcgcgcgggtgcgcccgcggccggcgccagcgcgccctgggagtcgatgctcgcctcagcggggtcgggcagggccctccccgccggggaggacgtcgcggtgcgcatgctcgcgcgcgagatcgccgcgctcgacgccgacgtcgccgagctggaggggctcgtcgccgactcgctggcgggcgacgaggtctacgagtgcctgctcacggtccccgggatcggccccaagacggcggcggcgctcgtcacgtcggtcgacgtctcgatgttccgcggccacgacgagctcgcgagctgctgcggcgtggcgcccgccgacagcaggtccggcaccagcgtgaggtcgacctccccgcagcgcgggggcaacaagcagctcaagaacctgctgatattcagctgcaactccctcatcggcacgcagaacagattcggaaggtactacgacgagtgcagggcgagggggatgaggcacaacaaggcgctgaaggccgtggcgagaaagaggctcaaggtcatctacgcggtcatgcgcgacgcggtcccgtacgcggcctaggccgcggtcggacaacctagcggacgaggggcgcccggcgccctgatgggccatgctgaaaaacgaaagccgctatggttgacaaaaccatagagaca

SEQ ID NO: 7544 - DNA, 1506 bp, unidentified
  source 1..1506: mol_type = unassigned DNA; note = element_bb40a03
  misc_feature 1..2: note = core
  misc_feature 3..255: note = LE
  misc_feature 256..1485: note = CDS
  misc_feature 1486..1506: note = RE
  misc_feature 6..230: note = bridgeRNA
ctaatggggcctaccgggtcggccgtcgggcagactgcggtccggtagccgccggtgggtgagcactcggactacctggacgctggtgagtcctggggtgagaccgtgccctcgctggtggtcgggaggattgactgctgatgggatggcgtgccggccggtgacggcgttgagcactcgaccattagggcgctgcttctcccgcaggctgctgagggatcgtcggaggacgtcactgtccagagtggaggaaggttgctgctcatcggggacgactgggccgaggaccaccatgacgtggaggtgcaggacgagaccgggcggcggctggcgaagacccggctgccggagggagtggccgggctggctcggctgcacgcgttggtcggcgagcatctgggtgagcacggcgaggcggggcaggtcgtggtcgggatcgagaccgaccggggtccgtgggtggccgcgctggtggccgccggctaccaggtctatgcgatcaacccgctgcaggtggcccggtaccgggagcggcagtcgacctcgggggccaaaagcgacgccggcgacgcgcacacactggccgatatggtccgcaccgaccggcaccagctgcggccggtggccggggactccggccaggccgaggcggtgaaggtcctcgcccgcgcgcatcagaacctggtctgggagcggacccggcacacgctgcggctgcgggccgggctgcgggaattcttccccgccgcgctgcacgccttcgccgacctgaccgccccggacaccctcgcgctgctggccgccgctcccgacccggtctccgcggcgcggctgtcagtcgaccagatcgccaccgcgctgtccgcggcccgccgccgccgggtgagtgagaaggccgcggcgatcgccgccgcgctgcgggccaagcagctgacccaacccgaggtgctcaccgccgcttacgcggccaccgtgcgggcgcaggtggcggtcctgaccaccctcaacgccgagatcgccaccctggaagggcgggtcgaggcgtgttttggacagcacccggacgctgagatctacctgtcccagcccggcctgggcccggtcaccggcgcccgggtgctcggtgagttcggcgacgaccccgaccggtacgccgacgccaaagcccgcaagaactacgccggcaccagcccgatcacccgccagtcgggcaagaagaagaccgtgctggcccgctacgtccacaacgaccggctcgtcgacgccctccacagccaggcgttcagcgcgctcagcagctcaccaggcgcccgccggtactacgacgcgctgcgcgcccgcggcatcggccacagcgcggcgctgcgccagctggccaaccggctcgtcggcatcctgcacggctgcctgaagaccggcaccctctacaacgagaccaaggcctgggcgcaccacaccaacaaagatcaagaagctgctgcttgacatccaaatgccatgggatgt

SEQ ID NO: 7545 - DNA, 1608 bp, unidentified
  source 1..1608: mol_type = unassigned DNA; note = element_bb48fb1
  misc_feature 1..3: note = core
  misc_feature 4..264: note = LE
  misc_feature 265..1470: note = CDS
  misc_feature 1471..1608: note = RE
  misc_feature 14..284: note = bridgeRNA
tctattacaatataagttggttggaaccctcggcagccagccgggggtttcgtccgtctcgcaccaaagctacaataagaggagcaactggctgaccactcctttcttgggctatgaagtccgaaccgcagactgtcagccatcctcttgttgcagcgttcggtttaagcaggttgagccttgagttcgcgtcacccaatagattgaatcggcagtgagaaaaagatgggttccggttgcaaaatttgtgttgggggaatgaacatgaactgtgtaggcgttgacgtttccaaaggcaagagcatgatcgccgtcatgcggcctttgggagaactggtgatcccgccctttgaggtggcgcacaacgatgctgagttgcgcaagttgtcaaggctgctgggtgacttggatggcgagacccgcgtggtgatggaggccacgggaaactatcacctgccggtggccagcttcctttgcgattccgggttttatgtctccgtagtgaatgccatgctggtgcatggttacgggaacaacagcctgcggcgggccaagaccgataagaaggacgcgatcaagctgtccaactatggcctcgaccattggctggcgctgcccaagtacatcccggaggatgaagtgcggctcatgctgaaaaccacgtaccggcagtaccagcaatgtgctaaggtacagaccatgctcaaaaacaatctgatctccttgcttgacaccgcattcccagatgtaaaccgcctgtttaccagtcctgccagggcggacggcagcgagaagtgggtggattttgtagcggctttcccgcattgcgaatgtgtctgcgggctgtccgaaaaagcgtttacagccaagtatcagaaatggtgcaagaaacacggttacaacttcagccaggacaaagcgcttgacatctacgcctccgcctgtggacatttcagcgtcatgccaaggaccgataccgccaaactcctggtggatcaggcagtgtcccagcttcgggccgcttctgccgccttggccgcgctcaggaacgaaatgcagtccctggcggcatcgttgccggagtaccctgttgtgatggggatgttcggcgttggacctgccctcggtccccaactcatggcagagatcggcgatgtgcgccgcttccactctaagaaagcgctggtggcctttgcaggcattgacgcactgccgtatcagtccggccagatggaagtccgtagccgcagtatatccaagcgcggatcttccgctctacgcaggacgttgttcctggtgatgagtacaatcctccggcgttctcctgccgatgagcctgtgtaccagttcatggacaagaagcgtgctgagggcaagccttatcgcgtctacatgatagcctccgccaacaagtttctacgcatttactacgccaccgtgaagcggcatctggacagcctcgaagcctaacatccaacctcagattcgcttatccaaggccagcgccaaaaattttcaatggcggtggcctggttttctgtaccctttttgcggggcctaaaaaaatagcggtcctcttcaatttagcccttgacttttgttagcagg

SEQ ID NO: 7546 - DNA, 1651 bp, unidentified
  source 1..1651: mol_type = unassigned DNA; note = element_bb4b500
  misc_feature 1..2: note = core
  misc_feature 3..292: note = LE
  misc_feature 293..1477: note = CDS
  misc_feature 1478..1651: note = RE
  misc_feature 55..266: note = bridgeRNA
ctggtatattataaatgactcatttagttggtcatctacagtatactttttctatcaaccttattgatccgtggttgattacggttagctttacttgtaaaatattgaagtatgtgaatgtggatttgtatcgctccttgtggcttgactactttagaaaggatcttaccacaccttatttctaaacaatgattagttagatgagtcttgaattcctattttgaaccaggttttgtgatctaagtgttgtggatgccatttcacatgattgaattgaaaggatgttttcattatgaaattaattggtattgatatcggaaagaacaagcacttcttttgtattatggataaagatactggtgaagttgtcgtttcgccatcttcttttcccaacaataaagaagggttcgattctctgattcaaaaaattaaactttattccaaggactctgtcctcatcggtatggaagataccggtcattatcactttgctttgctgaaataccttttggacaaccattttgctgttgctttaatcaatcctaaaaccactgattttgctcgtaagatgcagggcggcattactaaaaacgataaacttgatactataactatctgtgatgtcctggatactcacgaacgcaagaagcagtatcgtatcaccagagtcgatcgcttcgatctttatgaacagaagcagctgaccagacatcatcataatctaaaagaagaattgaacgtctatacgaatcgtcttcaaaaatctatcgatatcgtatttcctgagttcaatcgtctgttcaagagcaagtacggttccgtctacatgaatatccttaaaacattcggaagtgctgacaatatcgccaatactgatataagaacgcttcgcaaatgttttgaatcaaaaggcagaggaagacgtatatctttgacacctgagcagctcaaagaatgtgcgaaaatatcaatcggcatcccatcagctgctgaagtgattcagatcagacatctcatcagccagatcgagcttgtcaatgagcagattgccgaaatagataaaaaaatagaagagttttccgtccaaaacaactctcctatcctaaccataccaggaatttcacatttttctggtacctctattttagccgaattaggagagatatgcaactattccaaaccgtcccaaatcattaaatttgcaggagtagctccttatcattacgagtcaagtcaatataatgcacagcatactgccattaccaagaaaggatctaaatacttgcgaaagaccttgtaccagataatacttcctgtaatcaggttcaatcctgtattcaaagaatattatcagttgaagatttctcaaggcaaaggccatcgatgtgcacaagggcattgtgtaaggaagctgcttagaatcgtttatcatctgctgagtacaaatcagcagttcaatcctggacttctaagataatcgattgagaaaaataaaattttaaaaattggacctagaaggttgttttcgtcatgcctaaaattgcaaatccgtattcacttttcaaataactttactatctaactgttagaatcaaaatatttactattttcaaactttttcattaaaaacacttgatttttatatagttag

SEQ ID NO: 7547 - DNA, 1472 bp, unidentified
  source 1..1472: mol_type = unassigned DNA; note = element_bb4e037
  misc_feature 1..6: note = core
  misc_feature 7..223: note = LE
  misc_feature 224..1429: note = CDS
  misc_feature 1430..1472: note = RE
  misc_feature 11..224: note = bridgeRNA
ttccttagggttgtaggtgtttgggattggatgtcctggatgcgcaggacggtggggtgtggctaatgcgttgttgcaacggttgttgctcgaaaggaatggccgccccgccgttttggacggtcctggccactgattgagatctgacgcgtactcgacgacgctgctctaaggacctgttggcggggttgtccgcggggacggcaatgtcaggagcagcggtatggccgaaacgaaccaggtgtgggttggcatcgatgtcggtaagtccactcatcatgcgtgcgcgatcgatgacaccggaaacgtgctgtggtcgagaaaggtcccgaacgaacaggccgcgatcgaagagttgatcactctggccggcgggactgctgaccgggtggtgtgggcgattgatttgacctcgccgccggcggccttgctcatcgccactttgctgagcgcgaacgctgcggtggtgtatgtgccgggccgcacggtcaacacgatgagtcatgcgtttcgtggggaaggcaagaccgacgccaaagacgctcgggtgatcgccgaaaccgcaaggcaccgacgagatctgtcccccgtcgtgcctggcgaggacctggtggctgagttgcggtcactgaccgcctaccgttcggatctgatggccgactgggtgcgtggcgtgaaccggctgcgctcgatgctcaccgccatcttccctgctctggaagccgccttcgactactccagccgcgcgccgttgatcctggtctccgggatgtgcactcccgccgaaatccggtcggcgaaaagagccggagtcatcaagcacctccggaaacaccaggcgtggcccaacagcatcgaatcgatcgccgacaaggccctcgccgcagcagtagggcagacgatcacccttcccggcgaagccggaaccgccgcgctcatcaaacagctcgcagtacgcctgctggacctggaccgacagatcaaagacatcgacaagcagatcaccacgaaattccgtgagcatcccagcgccgccatcatcgagtcgatgcccggcatgggaccacatttgggcgccgagttcctcgtgatcaccggcggcaacatggcagcgttcaccaacgccggacggctggcatccttcgctggattggtgcccgtccccagggattccggccgtatcagcggcaatctgcaccgccccaagcgctacaaccgccggctgcgccgggtcttctacctcgcggctctttccagcctcaagatcgaaggcccctcgcgagccttctacgaccgcaagcgatccgagaaccacatccacacccaggccctgctggccctggcgcgccgccacgtcgacgtcctgtgggcattgctgcgcgacaaccgaacctggcaaccccagcaaccagctgccgcagccccctgacccacgcatcaagcgtcctcacccgttgacacgctcattgaga

SEQ ID NO: 7548 - DNA, 1388 bp, unidentified
  source 1..1388: mol_type = unassigned DNA; note = element_bb59b40
  misc_feature 1..3: note = core
  misc_feature 4..81: note = LE
  misc_feature 82..1107: note = CDS
  misc_feature 1108..1388: note = RE
  misc_feature 1153..1375: note = bridgeRNA
tgatgtggtggacggcgcccgctcccggcgacgaatcgccgtaaggtgatcgttgctacatcacatcagggagccgtccacatgcagattaccacgatcggtttggatatcgccaagaacgtattccaggttcatggcatcgacgcggccgaaaaagtcgtcgtcaggaagcagcttcgccgcggtcaggtgatgaagttcttcgcggcgctgccgccctgcctgattggcatggaggcctgcgccagcgcgcactattgggcacgtgagttgaggaagctcggtcaccaggttcgtttgatgccggcgaaggacgtgaaggcttacgtcaagcgcagcaagaacgatgcggccgacgccgaggcgatctgcgaggcggttggccggccgacgatgcgatttgtggaggtcaagtcggcggcgcagcagggccggctgatgcagcaccgcacccgcgatttgctgctgcggcaacggacccaggtgatcaatgcgttgcgggcgcatatggccgaactcggtattgtggcggcgcaagggcgcgaggggctcaagagtttgctgacgatcatcgcggacgaaaaggacgaacgcttgccggtcgacgcgcgcgcgagcctgatcgtgttggcggcgcagcttcaggcgctgcaaacgatgattggatcaatcgagaaacggattatcgtgcaacatcgtgcgagcgaggagagcaaacgagttgcgaccgttcctgggatcggcacgttgggtgcgagcgcgatcaccgctacggtcacggatgcgagcgcattccggtcggggcgtgattttgcagcctggatcggattggtgcctcgacaggattcaaccgggggcaaaccgaagcttgggccgatttcgaagcaaggcgaccgctacctgcggcgtattcttgtggtcggggcgcattccgtgctgcggcgggccaagcaaaacccggagaaacatccgtggctgatgcagctcctggcacggcgaccgttcaaggtcgtggccattgcgctcgccaacaagatggcgcgcgtcgcctgggcgctgttggccaggggaggcatctaccaggcgccgcggcttgcggcagcgtaagaaggggtagccaacgggaggatgaggttgcgtcagtgcgtttcatgaactgcaaggggtgatgaagacgttgatgcgaaacggtcgagaccgtcgatcggaaaacccgcgatgggtcacgccagcaaagagcgcgtggttttgattgggaccgatcagcgaatcacatcagggcccgcagcccagaacggctgcattcagaggccgaaacatggctgcacccgaacgatttgcggaaacgtcagattcttttcccttgcaccgcgggcgccgtccataca

SEQ ID NO: 7549 - DNA, 1384 bp, unidentified
  source 1..1384: mol_type = unassigned DNA; note = element_bb5b6a7
  misc_feature 1..2: note = core
  misc_feature 3..84: note = LE
  misc_feature 85..1107: note = CDS
  misc_feature 1108..1384: note = RE
  misc_feature 1145..1379: note = bridgeRNA
cgatgtgatggacacctcccaccttacggcatcaaagtgccagactgaggtgttaaccccagatccccggaggaggtgtccatcatgaatattaaacgtattggtctcgacctggctaaaaatatcttccagatacatgccgtggatcaccatgaacatgttgtcctgcgtaaaaccctgcgccgggaccgcatgaccgcctttttctctcaactctctccctgccttatcgggattgaagcctgcggcgccgcccactactgggcccgcgagctgacccgtatggggcataccgtacgcattatcccgcctcagcgggtcaagtcctatcttaaagggcagaagaatgacgccaacgacgcggaagctatctgcgaggctatcagccgtcccggaatgcgctttgtggccatgaagacagagcggcagcagacgctgcaggcagagcaccgcgtccgggcccggctcgtccgcgcccggacagccctgagtaatgagatgcggggactgctgggtgagtttggtctggtactgccggtgggaataaggcagctacgtaaggcattgccggagatactgtcgcaacaagagctgtgggatgaccgctttatccgcctgctgagcgaactggcggaagagctgcagatgctggatgagcgggtcgcccgccatgacaggcggcttgagcagtcagcacgggatgatatccggataaaaaggctgctggcgatagagggtatggggccggtggtggccagtgcgctggtggcggcggtcggcgatggcagacagttcaaaagtggtcgggagatggcggcgtatctgggtctggtcccgcggcagcactccagtggcgggaaagcgcggctggggtctatcagcaaacggggagacagttacctgcggacgctgataatccacggtgcgcgtgcggtgctgaacgcgtgtcagaataaaaccgacagacgcagccagtggctgaaggcgttatcggaaaggcgaaaccggaatatcgcgacggtggcgctggcgaacaagaatgcgcgaatagcatgggcgatactgagccgcgaagaagattaccatgggttacaggccgccggttaaccggcggcctgtaacccatgcagtaaaagagcaataacctgccgtgagagtgcagtcagcaaagtgtgatgagtaacaggtaagaccggcatctgtcattccgacttatccgaaggctccctggaaaacaaagccgctagcccgaatggaaacagatgcgcagataacatcatggcccggatacgacggtatcgtaagagaggccggatatacgaacgcaccttaccccgttacacaaaatgcagagatgacttgcataacgggaggtgtccatata

SEQ ID NO: 7550 - DNA, 1364 bp, unidentified
  source 1..1364: mol_type = unassigned DNA; note = element_bb61ecc
  misc_feature 1: note = core
  misc_feature 2..68: note = LE
  misc_feature 69..1121: note = CDS
  misc_feature 1122..1364: note = RE
  misc_feature 1132..1358: note = bridgeRNA
taatgggatggtccgcaccgtcctcctccctcatcatgggggaggtcagatcaatagaggagagtatcatggcccattgcaatttgccgcgacctgcgcctgtctatgggatcgacattggcaagaacctgttccacgtcgttggcctgagctgcgactgcacacctgatcagaaagttcgctttcgacgggacactcttcttcagttctttgctcgcgcacaaccaagcatagttggcatggaatcctgcgccggttcacagtggctcgcccggaagatacaggcacttggtcacaaggtgcgcctgatccccgcgcaattcgtgaagccctacgtgaagtcaaacaagaacgacatcatcgacgccgaggcgatcgctgaggccacgacgcgaccgacaatgcgcttcgtcgccgtgaaggaggaggaccaagtcgatcttcaagcgctgcatcgaatccgtgaccagatggtcggcgcgaggacacgcctgatcaatcagatgcgggctttctgcctcgagtacggtgtacctttgcgtcagggtgccggaatattcaaactcgagttgccgcgcgctttgaatgacgaaggaaacgatttgtcaccagtgatgcgtcgcctggtgggcgatctcttcgccgatctccgccgcctcgaagaacggatccgcgaagtgacacaggagatcgaagcggtcgccgatcgagaggacgtcacacgccggctgatgacaattcctggcatcggcgcattgggtgcgaccgccgtacttgccgcggtcggtgatgggctgcagtttcgcaaggcccgcgaccttgctgcctggctggggttagtgcccaggcaatactcgaccggcggaaaacagacgttgcttggcgtcagcaaacgcggcaaccgttatgtgagaaagcttttggtgcatggcgcgcgatcctgcttccggcatttggaccggacgcgcgatcgcctaggaagctggctcgacgggctccaggctcggatgcatccgaacaaggccgttgtcgctctagccgccaagatggcccgcattgtctgggtggtcttgaacaagcccggagcactctacgaacgcagagatcctgccttcgcctgacgcttctggcttcgattgcaaggctcgggaacagtgatgacgaaacagtggatcaacatgccgtaagccctgtgcaaaaaagcgggcttcgtgcccgaaccatttattgggaacggcgtgcgcggatctcatcatggcctggctgcaacagcagtccactcgcgagaggccggatacatttatgcaactggaagcgtcatttttgctgttacgaacccttgcacggacggggcggaccataca

SEQ ID NO: 7551 - DNA, 1392 bp, unidentified
  source 1..1392: mol_type = unassigned DNA; note = element_bb6866b
  misc_feature 1..2: note = core
  misc_feature 3..88: note = LE
  misc_feature 89..1117: note = CDS
  misc_feature 1118..1392: note = RE
  misc_feature 1088..1378: note = bridgeRNA
agatggggtggttgccgtcctccccaaacggcatcgtgttgtgccaaaattgtggccggcacagccccagaatagagaggatggcgacatgaaggatacaatgatcgggattgacctggccaagaatgctttccaggttcacgtggcatcgatgacaggtcatgtgaagtgccggaagaaactgtcacgtggacaattcttccgattcatcacggagcaaccgccagcacttgtcataatagaagcttgcggaagtgcccattactgggcccgcgaactagccaaagcgggccatgatgtaaaactgattgcaccgcaatatgtacgacccttcgtcaaacgccaaaagaacgatgctgcagatgcggaagcaattgttattgctgcgcgccagccagagatgcggtttgtgcagcctaagacttccgatcagcaagcacgggctgccctgttccgagcacgcgaacgtgtggttcgtcagaggacggaattggtaaacgcgcttcgatcgatgctttacgaatacggtcaagtcattccactcggtattggtcgcatcaagcaaatcaaggccgtgatcgaaggggacgagatcgacctccctgagcttgttcgggaagagtgccacgatttgttagctcagattggtgagcagacggcgcgaattgagaagaaaacgaagaggctcacggaattatcccgacatagtaagtccgcgcggcggcttcagactatgccaggcgtaggtccggtgactgcgttggctattgaagccttcgcgccagctatggagaacttccgctgtggtcgcgattttgcggcctggcttgggctcgttccccggcaattttcgtctggtggtagagaaaggctaggccgggtatcgaaagctggtcaggctgatatccgaaggctgctaatcatcggcgcgatggcttgtgtgaattgggctagccgtaagccgcctaagtcgggatcatggttggcgcgcatactgtcaaggaagccacggatgttgggggcagtcgcgctggcgaacaagatggcgcgaacgatctgggctatgctgatcaaaaacgaagattatcgagatccggccttggctgcggctatgtgacatgccgacgaactaaaagccaagcccggcaaggaggtgtgagaagtcgatgacctgaatgggcgcatgatcgaacagatccggattgtggaaaccagtttaagccaaggagcgtcaagctcgccaaggagatttggacccaatccgcggatcaccataccggcccgcggctccgaccaaagcaaagccgcaaatttgaggcctgacacaagaccgaactcgatcacacgtttaaaagtcagaatggctcttgcactacggacggcaaccacaca

SEQ ID NO: 7552 - DNA, 1346 bp, unidentified
  source 1..1346: mol_type = unassigned DNA; note = element_bb6eaa9
  misc_feature 1..2: note = core
  misc_feature 3..77: note = LE
  misc_feature 78..1112: note = CDS
  misc_feature 1113..1346: note = RE
  misc_feature 1144..1341: note = bridgeRNA
tgatgtgatggacgccccttcctaaggtagtcagtgccatacttttactgactacattaatccgggagtaacatcatatgaacacgatcagagttgttggtatcgatattgccaaatccgtttttcaagtttgtgtctggatgattgatggctctgttgcctggaacaaaaaagtaacgcgccagaaacttctggatacgcttcgccagttcgaaccgggaactatgatggcgatggaagcctgttcaacctctcatttctggggccgaacactcagtgctatgggattcagcgtcagactcatccccgcccaacacgtaaaagtatttgctaaaagtcagaagaacgatgcaaacgatgcgctggcaatttgtgaaaccgcatgccgccctggtatccactttgttccggttaaaaccacggaacagcaggatatcaaagcactgcggaatacccgtcaactgatggttgagcagagaaccgcgctggctaaccagcttcgttctttgctcgctgaaaacggcctcattcttcccgttgggatccagcgtctccagcagcagctacctgaacttattgaagatgcatctaacgatttaactttcacgcttcgccgattgctttcttcattacgggaagatatgcaggcgctcaatgaacgcgttacctatctggataaagaaattgctgcattgtcttcacaacaaacagcatatcgccatttcttaacagtccctggtgttggcccgcttatcgctgcagcatttatcagtgaagtggatgcagtacaattctccaacggcagagaattatccgcatggtgcggcctagttccccggcagcacagttcaggaggaaaacaaaggttgtcttctgtgaccaaaaacggcaatcgcagcctgagaacattagtcatccatggcgcgcgatcagtgatgcgctgcgtgaaaaaacgtgatgacaacctaggtctttggctgaagaggctcgaggcaaggcgagggtttctgaaaaccaccgtagctttggcaaataaactggccagaatcatctggcgaatactgaccgatagcgttgattttaatatgagcaaggcttttgctgcgagctaactcaatgctcgttaaagaaaatatgtctctctgagtttgcaggcactgatgagaaaacggctaccgtccctgtaacagcctgaagttgacctgggtaatcaaataccggtgtagtgataaggaaacagggttcggattacatcatggcgcaggtaaatttacctactatgacgccggatatatggtcgcaaaccgtatcgaaccagtacttgtaacacccggggcgtccatata

SEQ ID NO: 7553 - DNA, 1343 bp, unidentified
  source 1..1343: mol_type = unassigned DNA; note = element_bb758a3
  misc_feature 1: note = core
  misc_feature 2..72: note = LE
  misc_feature 73..1155: note = CDS
  misc_feature 1156..1343: note = RE
  misc_feature 1109..1340: note = bridgeRNA
taatgagatggtcacccccacaccctacgagcgggtcacgctggtagggtgtttctctttgcggaggccatcatgcagaacgtcacactggtcggaatcgaccttggcaagcacagctttcaccttcacgggcaggatcggcatggcaaggccgtgttccgcaagaaggtcaaccgcaagcagttgatcgagttcctcgccacgttgcaggcctgtaccgtggtcatggaagcctgtgccggtgcccactgcatggcccgcaagctggagacgctggggcatcaggtcaaactcatttcaccgcagttcgtgcgccccttcgtcaagggcaacaagaacgactttgttgatgccgaggcgatctgcgaagcggcgtcgcgcccctccatgcggtttgtcacacccaagacggagtcccagcaaacactgtctgccctgcatcgggtccgcgaatcattgatccgagatcgcacgaaggctgtcaatcagatccacgggttcctgcttgagttcggcatcagcctgccagtcggcatggcggtcatcaaccgcttgccggcggtgttggccgagcatccgttgccaccgcacctggtgggcattcttgagcgactacatgcccacttcaagtacctcggcgagcagattggcgagatcgaccgcgagttggggcaacagcttgcagaggatgacctgggccaacgcctgctgtcgatccccggcgtggggccgatcactgccagcgcgttggccgccgagatgggcgatggtaagcaatacggatgctgccgcgactttgccgcctcgctcggattggtgccgcgtcagtacagcacgggtgggcgtgccaacctattgggcattagcaagcgcggcgacaagaacatccggcgactgttggtccaatgtgcccgcgcctacatgcagcgtctggagaggcaaaccggtcggttggccgattgggtccgggccatgctgatgcgacggcactcgaacgtcgtggcctgtgcactggcgaacaagctagcacgcatagccacaccgcattcaaggccgaggcagcagctcaacacgcctgagctcccgccataccaccactgctgtatcgaagctcactcacctggttttgcgaccgctgacattttgatgacgtgaacggcacaccggcccgacggagaacctggtaaaaaaatcggcttctgaagccgaggcccttttgaggtccgtcaggcgcgactctcatcgtggcgcagggattcatccccacaacgacgccggatggatttaggcaagccaaccacttcatcagaacccagggttgcaaaagtgggggtgaccataga

SEQ ID NO: 7554 - DNA, 1151 bp, unidentified
  source 1..1151: mol_type = unassigned DNA; note = element_bb76162
  misc_feature 1..3: note = core
  misc_feature 4..206: note = LE
  misc_feature 207..1142: note = CDS
  misc_feature 1143..1151: note = RE
  misc_feature 13..189: note = bridgeRNA
gcttgtgtcagcgactttcgataggatcgaagatgagagcgacgggaggcaagctgcaggtccgcggtgttgcgagcacgagtaggagcccaagctgcctcccgccgtcctctgactcaagcccgaacagttgaacgagctaaacctcgaaccacaagcgtgggcagtcagagtgctctcgccgtgcagtttacgagggtttggtcatgacgtgttgggtcggtatcgatgtcgccaaggattcgctggccgtatggctgcgtccacaaggcaagaacttcagcgtttccaatgacgagcagggccaccagcagttgctggcgctgttcgccgaggaaaagcccgaacgtatcgtgctggaggcgaccggcggttatgagtgcggagtgatgttcagcctgtctcgtgccggtcacagggtttcgcggctgaaccccacacgggtgcgagcctttgccacggccatgggcaagctggccaagaccgatcccatcgatgcagccgtcctggcgcatctggcgcagacgctggaggaagcgcccagcacggtgccttcgccagagcgcgagcggctacgggaattggtgcaacgccgagagcaactggtcagccagcgcgatgatgaacgtcgtcgtttgcatcaagcccgggattccttcgtccgccaatgcctggaaggcgccatcaaggcgcttaaagaaacgatccgcggctatgacaaggaaattgccaaagcgatgaacgtcgtggacgcagaacaggcccagcaattatgccaagtcaaaggcgtggggccggtcaccgcggctgggctgctggcctatctgccggagctgggacaactgaaccgccgccagatcgccgccctggtgggcctggccccgtacaacagcgacagcgggcagaagtcgggacagcgccgaatccggggaggacgaggcatgatccggcgcatcctgtacatgacgaccttgtcgattattcgctatcaggaagacttcgcccgccgctaccaaggcctgcgcgagaacggtcgatgcgccaaggttgccctggtggcctgcatgcgtgtgctcatcgtgcggttgaacgccatggtcagggacggtacctgctggagaacaggtaccgtgcagcagtgaaagacagtt

SEQ ID NO: 7555 - DNA, 1174 bp, unidentified
  source 1..1174: mol_type = unassigned DNA; note = element_bb78397
  misc_feature 1..2: note = core
  misc_feature 3..202: note = LE
  misc_feature 203..1159: note = CDS
  misc_feature 1160..1174: note = RE
  misc_feature 36..187: note = bridgeRNA
cttgtatctagctctttgacaagtttgcagccattctgattggggcgctagctcgatgccacctgggtggtaaacaccgtgcgttagccggagcggcgtccccaatcagtcgtcgcaggagcccgaacagttgcgggggccgattcatcgagcccgaattctcacaaggatgggccacggcgacgcttcaccgggagggacgatgttcgtcggcatcgatgtcgcaaaagccgaactcgtggtagcggtccaccccaccaacgagcggtggacggtagccaacgatgagcgcggggtgcgcaccctggtcgagcgcctgcgggcggtgcctccgacgctgatcgtgctcgaggcgacgggaggatatgaactcctcggcgtcgcggccctcgtggcagccgggttgccggtggtcgtggcgaatccccgccaggtgcgggacttcgcgcgcagcaccggacagctggcgaagacggatcgcctggatgccgacatcctcgccgcctttgccgatcgcgtgcgccccgcggtgcggcccctgcctgacgccgaggcccaggagctcgacgccctcctcacgcgccgtcggcagctcctggagatgctcggtgcggagcggaaccggctcgggcagatcttcgggaagggaaagcggccggtgacgaagagcctcagggcgcacatcgcctatctcgaacgggaactcaagagcaccgaccacgatctcagcgacctggtccgcgcgaccccggcgtggcgggaacgggaggatctgctccgcagcgtccctggcgttggcccggtactctcccggacgctcctggcggatctgccggaactgggccggctgtcgcggcgcgagatcgcgaagctggtcggcgttgctccgttgagtcgcgactccggcatcctgagaggacggcgcttcgtccagggtgggcgcgccagcgtccgggccgtgctctacatgggcgcgctcgtgggaatcaagcgcaacgtgattctccacgccttctaccaccgtctggtcacggcgggcaagccgaagaagctcgccctcgtggcctgtatgcggaagttgttgacgattctgaacaccatcgtgcgaacggggcaaccgtggtgcgctggttacagttcgatcctcgcgaccgcttgactttcaagacagttg

SEQ ID NO: 7556 - DNA, 1609 bp, unidentified
  source 1..1609: mol_type = unassigned DNA; note = element_bb7bcc4
  misc_feature 1..3: note = core
  misc_feature 4..289: note = LE
  misc_feature 290..1471: note = CDS
  misc_feature 1472..1609: note = RE
tcacgtataatactgattagtaaatgaacgaggtttaataatttgattatttcatcatttactatataatattttttattcattttataaaatgaataaaaaattcgcgattgagtttaggcagattatatcaagggtcttaagcatccacttctatgacggcctagctcttttctttttattatcctagttttagaatgtgaggattatttattaatcttatataacaagcgtgatgaggaatgagaggtataaagagttcaatcgtaaaaaagaaaggatgttgcttatgcacagttgtttagctattgatgtagctaaaggtaaaagtatggtatctttaattagttcttgtggtgaagttctaattgatccatatgaaattaaccattctattaatgattttactaatttgcttaatagaattaaaaatcttaaattagataatatttctgtaataatggaatcaactggcatctatcatagaccaattgaaagattcttcttagaaaataattttaaagtttatacaattaatgctttatattcaaaaatgtataaacgtaatttaagaaaaactaaaactgataagttagattgtatttctcttgccgaattattttttactacggattttaaacaatatattaaaccagatgatttatatcttaatatgaatgcattatctagacaatattttgctctttgtgatttgtgtacaaatattaaaaatagatataaaaatttaatttacttatgttttcccgaatatgaatttatatttaaaggtgaaacgatttacagtaatattgctttagcttttattgaaaaatatcctcatacagatattatttctaatactagaattgatgcattacaaaatttctttaagaaaaataattttagatattggaaaggaaaagcaaatattataaaagagtatgctttaatatcatatccttctgttaatatgaatgatgaatcagtttctaatttatctcaacttgctagacttattaatgactatcaaaaagaaattgaaactattaaatacaaattagtatttctcgccaaaaaatctaaatactttgaatctattaattcaatatttggtattggtgagtttactacttcaattttaattgctgagcttggagatattaatagatttaataatataaaagagttaactgcttattgtggtttagatccatctataaagcagtctggaagaagtatagatattcacggtccaatatctaaatcaggtaataaatatttaagaaaaatattatttgtttgttgcttaaatattgttagactatcagctaaatgtcatgttcaaaatgatatagaaatttattacagaaaaaaacgtaatgaaggtaaacatcattacgctgccactattgcttgcactacaaagcttctacgcaaaattctagctttgtgtaagcagttagataaatagtagttacaccactaactacacttatattatataccaaataacgcattatttgataatttttaaaaaatatcaaatttcgtgtgttttcagtgtgtattaatatatcataaaaattagtagttgacaaatcttagaatg

SEQ ID NO: 7557 - DNA, 1568 bp, unidentified
  source 1..1568: mol_type = unassigned DNA; note = element_bb87c4c
  misc_feature 1..2: note = core
  misc_feature 3..253: note = LE
  misc_feature 254..1465: note = CDS
  misc_feature 1466..1568: note = RE
cacgtataatgaacttagtaaattgatgagacttttaattcaatttactatataatatttttcacctagttttaggtaaatttattttaagagtcaagtcagattatatcaagggtctttgaatccattcttatgacagactattctcttatttttttattaatttagttttagattgtgaagataataacttatatgtgcgtgatgaaataataagaaatctaagagaacttaaaattggaaaggagtaaatatgaaaagtgtattgagtattgatgtagcgaatggaaaaagcgaagtattattaataactgaatatggcgaagtcttaattgaaccctatgaagttaaacattgcttaagtgaattcaatttattaaaagaaaaaattgataattttaatctaaatgatttaactatttttatggaatcaacttctacttatcacttacctattcaaagattttttactaaaaataattataatgttcaagtaataaatcctatattaggtaagaataatactagaaatttaagaaaaacaaaaactgatattgaagattgttataatttagctgatctattctttaaaaatactgttaaaattcatactaagaatatgaatgacatttattcaagtatgattgaattatccagacaagaaaagcatttaactgaatctcttgttagatctaaaaacagatttaaacagattgttgctaatgcttttcctgaatatataaaatgttttactgctaatgatatttttggaaaaacttcacttaattttattaaagaattcccacatgctgacattattaaagaaaaaagaattgatgctctagctaataatctttataaaagttctaaaaatggttgctcatataataaatgcttatctaaggccaaaaagattaaagaactcgcaaataattcataccccggaatcgatgttgattcttatgaagtcaataatttaatcaatattgtagatgttatttcttataatggttcaaaattaaatgatgttaaacaagatatagttaaacttgctagacaaataccttattttaatattattaattctatttatggtattggtgaaacttctactgctcaaataattgccgaacttggtgatattaataggtttgaaaatatcaaacaattaaatgctttttgtggacttgatccaactataattcaatcaggcaaatctattaactatcacggtccaatatctaaacgtggtaatagaaatgctagaaaaatattattcattacttgctgtagtattataagagcttctgttcttcataatatggataatgaaattctactttattacagaaaaaaacaagctgagaataaacattttaaagaatgtattatagcttgttctactaaattattaaggaccatttttgcaatgtgtaaaaataattccttatatgtgcaaaaataatataacataattttttttaaaaatctactattgtagatgtttttgtcatgcattcatttcaaaaataagtattaaaaatagtacttgactttatttagattgt

SEQ ID NO: 7558 - DNA, 1346 bp, unidentified
  source 1..1346: mol_type = unassigned DNA; note = element_bb8bf3c
  misc_feature 1: note = core
  misc_feature 2..63: note = LE
  misc_feature 64..1095: note = CDS
  misc_feature 1096..1346: note = RE
  misc_feature 1119..1337: note = bridgeRNA
taatgtggatggtccgccgcaggaactctctaactgtgcagactgcgaggaaggagggatcccatgaaactacatgtgctggggatcgatttgggcaagaccgtctttcatttggtgggactggattcaaccagtagggtagttatccgcaagaaatgttttcgtacacagctcctggctttgaccgcgaatttgcaggcggatttgattggcatggagtcttgtagtggatcgcacttcctggggcgggccttgcgcgagcaagggtacccggtgcgattgatgcctgcgcaatacgtgaagccttacgtgcagaccaacaagagtgacttcctggatgccgaagcgattgccgaagcggtgcaacggccgagaatgcgttttgtgccgattaagaccgaggagcagttggatctgcaagccctgcatcgcgtgcgcgagcgttgggtgatgcgccgcacagcagtggtaaatcagatccgcagccttcttctggaacgtggactcacgctgcccaagggccgcagtcatgtggatgcgctgctccctcgtattttggaagacgccgagttgaggctgtcgggttgttttcgtgttctgttggcgcaactcaagatggaactggagcaatcgacagcacgcatcgaacagatggatcgagtcattcataaaacggcgaaagagaatgaagactgccaacggctcacggagataccaggagtcggtccggtcaccgcgacagccctggtcgctgcggtgggcaacggaagcacctttggaaaaggacgaaatctggcggcctggatggggatcgttccgggagagtactccaccggcggcaaacagaaattactaggcatcagtaaacgtggcaaccggtacttacgaaccctgttcattcaaggcgcacgcagcgtcgtgcaacagcgacacaaacaagcgcccggtctaagcagttggctagcgcaactgctggcgcgtgcgcaccagaatgtggtcatcgtagctttggccaataagctggttcgcatggcttgggccgtcttgtgcaagaaggaaagctatcgcgctcccattcttgctgtggctacataaaatctcggtttaaggaatagcgttcctgccaggtctgctggcggaaaacagagatggcaatgggtctctcccacgctctcgaaacctgatctcggaaaaggtccttaccagaccgtccacattatagggacgagagcgagcggatatccatcatggcccggagtcgatgactccactgaaggccgaatacattagcgcagaccaactgccactgttcgtttttcgcttgcaactctgcggcggaccataca

SEQ ID NO: 7559 - DNA, 1169 bp, unidentified
  source 1..1169: mol_type = unassigned DNA; note = element_bb8e313
  misc_feature 1..2: note = core
  misc_feature 3..209: note = LE
  misc_feature 210..1163: note = CDS
  misc_feature 1164..1169: note = RE
  misc_feature 20..217: note = bridgeRNA
cttgtaatagcggaatcgaatatcatcgacccgttccgtgaggaatggcctgctgcggactgcaatccgcagcaggccgctggcgatcggatcgtacccatcctgagcagtttgtggctgccccgtagcgtgatcgcgccagcaccttcatcggacccggatggttgccggaacaatttggttcgcttcacaaggcagggtcgaggaagatggaaaagactagcatgattgtggccggcatcgatacggccaaagacaagctggacgttgcgatttgcggacagactcagcgtttacaagtcgcaaactcaatgcggggttggaaacaacttcgtttggagctgacaaaggccggagtcgaacgcgtcgggatcgaggcgaccggtggttacgaacgtggtgtggtcaggcacctgcaggcggcaggttttctcgttctggttctccaaccgatccaggtgcgggcctttgcgcgcatgcaccgccagagggctaaaaatgatgcgctcgatgcggctttgattgccgcatgtgcgaccgcaatcgaaccacatgagataggggcggaccagcgactgacggcacttgccgacggcctgaccttcgtcgagcaaatcgaagaggatatcgctcgcttcaagacccggctcgagcacattgccgaaccgcgcctgaaacgaatggttctcgccgacattgcgcggctcaaggtgcgaagactggcgcagctacgcctcattgccaagcaattgcgcgatcaccacgacctggctgcccgacttgatctcgtcataagcgttccgggcattggcgaacgcaccgcgcttgccctgattatccggatgcccgagctcggccgcatcaaccgggagcaggcatcggcgctcgcaggtcttgctcccttcgacgacgacagcgggaaatacaaaggccagcgtcacatcgccgggggccggggccgtcttcggcgctccctctacgccgccgcgctccccgcagccttccgctggaataaggccttgatcaacctctacagccgtctcacggccgcggggaaagcccacaacgtcgctatggtggcttgcgccaggaagctcctgatctatgccaacactgtcgttgccagaggtacgccctggcgcgaaaacgtcatccagacttaatggttg

SEQ ID NO: 7560 - DNA, 1372 bp, unidentified
  source 1..1372: mol_type = unassigned DNA; note = element_bb917ca
  misc_feature 1: note = core
  misc_feature 2..94: note = LE
  misc_feature 95..1108: note = CDS
  misc_feature 1109..1372: note = RE
  misc_feature 1142..1370: note = bridgeRNA
taatggaatggactctctccactccccaacggcgtcataatgcgccatagtagtttagggtaagttttagcgtaaacaaagtagagagagtcacatgaataaaataacaattggattagatatcgccaagaacatttttcatttagtttggttatcaaactcgggaaaagtgctcaaaaagaaaaagctcaaacgcactaacatgaaagagtatttttgtaatttagagcccgcaattgtcgtcatggaagcgtgtggctcatcaaactactgggcacaaagtattcaaaactatggtcatgaagtgaaagttatcgctccacaatatgtagtcccttaccgaaaaggaaataaaaatgatttcaatgatgcagaagcgatagctgaagcttcacaacgagtgaatatgcgatttgtgccaataaaaagtgtagagcaacaagacattcaactgttgcaccgtataagagagcggcgaataaaatgtagaacggccttagtgaatcaaaccagaggcctcttagccgaatatggtattagcctctcgcaaggcgttaatcaagtgagaaagtctatccccgatattttagaagatgcgagtaacatgttaacgccattgtctcgtcgatatatagccagtttgtatgatgaattaattgaggtagataagttaatcacggatttggatagcgagataaaagctttaagccatcagatagagcagtgccagaaattagaaacaatgacaggaataggtcccatcatcgcaacagctttgtatagtgcaataggtgatggtaaaacctttaaaagtggacgtcatatggcagcctggctgggactagttgccaaacagcatacgactggcgataaccccaagttaaagggaataagtaaacgaggaaatacttatttgcgaactcagctgattaatggtgccagagctgcgttagtcaaatcggggagtaaagctgacaaggtaagcttatgggcaaataacctgcgggagcggctgccatttaataaagcagtggttgcattagcgaataaaatggcgcgaatggcatgggcgatgaccgtaaaacaagagaggtacaaatttgtataaaaacattaaccgcaattaaaagacaaaagttcaatagcaaaaattgcaaagattgagattgacggaaaacggttcatagccgtcctatttaaacctgataataccaaaggctgttagaagccgtcgagattgataaggtgataggggcggatatccatcagggctagagcggataaatccgctcataaaaaagccgaatatatggcagcaatgaactttgaaattctatcaattactgtcttgcaatcggagagagtccatata

SEQ ID NO: 7561 - DNA, 1613 bp, unidentified
  source 1..1613: mol_type = unassigned DNA; note = element_bb94c95
  misc_feature 1..2: note = core
  misc_feature 3..274: note = LE
  misc_feature 275..1492: note = CDS
  misc_feature 1493..1613: note = RE
  misc_feature 13..294: note = bridgeRNA
ctactacaatatatttatggttaatatcccttacaaccagtaaggaattacccatcttgttgcctaagctgttagaatgagtgttgcaataggtctggctttcgtctcctaggactttacgtccgtaaataagtcatccaaccagctcctcattcgcagcattcgttttacgcaggttgaaccctttggcgttcgtgtaacatccccagtagattgaataggcaataggtaaactggtattgaccattgcaaatatattcaaaggagtattgttatgaacgcagtaggtattgatgtttccaaaggtaaaagtacggttaccatacgcagacccggtgatattgttcttatgccgccctgtgacattcctcatacccaatccgctatcaatgggttaatcaatgaaatcaaggctcttgacggcgaaaccaaggtttgtatggaacacactggcaggtattacgaacctgttgccacctggcttaccaatgccggtatctttgtcagtgccgtaaatcctatcttaatcagggacttcggagacgattctcttcgcactcccaaaacggataaggctgattctaaaaaaatcgctcgttatacacttgaccgttggacgaaattgaagcaatatggaaacatggataaaacacgtaaccaacttaaaacaatgaatcgtcaattcggtttctacatggctcagaaaacagctatgaaaaacaacctcatctccattcttgaccagacctatccgggtgccaatgacttctttgacagccctgcacgtagtgacggaagccagaaatgggtcgatttcgtccatacttattggcatgtggagtgtgtccgcgggaaatccctcaatgcatttaccgaacactatcagaattggtgcagacggaaaggctataatttcagtgcagaaaaagcagcaaaagtctattgcctttcttctgatctgattgctgttttcccaaaggatgacaatactaaaatgctggttcggcaagcagtagccatgttaaacgtttcttctgaaactgtggaatctctccgtcaggaaatgaataaacttgcttccaccttaccggaatatcccgttgtcatggcaatgaatggtgtcggtacatcactcggaccgcaacttatagctgagatcggagatgtcacacgttttactcaccgggaagctttaactgctttcgcaggtgttgatcctggaaaaaacgattctggacaacatatccagaaaagcgttcgtacctccaagaaaggttcccccagtttacggaaagcgctttttcagatcatggacagccttatcaagcgttctccagcagatgatcctgtctatgcatttatggataaaaagcgaaagcagggaaaaccttactacgtttacatgactgccggagcaaacaagtttctacgtatttactatggacgagtaaaagaatatctttcctctttgccagaagccgaagaactgtaacttcatatcttttaccagtatcagaccagtgccaggcggtggtcttgttttggtactcttttttcaacctgtataaaattttcaaagttccttattttctgcttgactttttatttgcaga

SEQ ID NO: 7562 - DNA, 1171 bp, unidentified
  source 1..1171: mol_type = unassigned DNA; note = element_bb97271
  misc_feature 1..2: note = core
  misc_feature 3..115: note = LE
  misc_feature 116..1147: note = CDS
  misc_feature 1148..1171: note = RE
cttgtatggtggtactcgaaggggtggtgggacgacaaagccaattctgactgttcgcagcagtacagacggtaggagacctcgccccaccccttcaccaaagcgccgataaagaatgcatcgtttgcaagcgacgataggagcaagtcagcgcctcttggtgaacccctccgagcctaaaaaccatagcgtgggagctcaactgatggcaatgccagcgaagcaattcatcatcggtatcgatgtcgccaaagttgaactggttagttactgcgagcagaccggtcaacatcagtcgtttcgaaacactcagccagagattcgcaagtggttggcacttcaaccggccaatacggctatttgtgttgaggccaccaacatctatcacctggatttggttgaaatggcttacgagaaagggtttgccgtctatgtcgttgacggctaccagttgagtaactatcgcaagggcattggcgggcgagttaaaaccgatgcctctgacgcctgcttacttgcccgttttttggatcgtgaaggcagcgcccttcgcccctgggtaccgccgccccccgtttatcgaaagctccagagcctcctgcgacgccggtcagcactggtttcggctcgtactagcctggtccagagctggagcaacgaggcatttctcaaagaagccttcaacagtttcatcaagcacttcgagtctcttgatcttctgatccagaagcaattgaaaacagtggtgagagaggccggactgacagagcaggtagttcgatgccagaaagtcgaaggcattggttttctgactgctgtcgctttagtcactgcattcatccgtggcgaattcagaagcagtgatgaatacatcgcgtttttgggcatggatctgaaagtcgcagattcaggccaaaagtctgggcgtcgccgtttgaccaaacgggggtgttcggaagtgcgcagactgctgcataacgccgctatggccgccagtaaatctgcggcttggaaagagctgtacgagtactaccgcagcaaaggcaaggcagccactcaggtcttggtcatcctggctagaaagctcgccagagtcgcattcgccttgatgaaaactcaaggcgagtacgtcagcagaagggcataaacgtattgccctaaaccatagaat

SEQ ID NO: 7563 - DNA, 1512 bp, unidentified
  source 1..1512: mol_type = unassigned DNA; note = element_bb991d6
  misc_feature 1..2: note = core
  misc_feature 3..255: note = LE
  misc_feature 256..1491: note = CDS
  misc_feature 1492..1512: note = RE
  misc_feature 7..240: note = bridgeRNA
ctaatgggaatgcaccaggcagttccggacgggagcagactggtgtccgagccgctggccgggtgagcactctctgtcccgggtcgctgatgagacctatgtcaagatcgtgcccccggccggtgagcgaggaggcgacagcgctggtgggatgtcgtgccgtttcgagcactgatccattaggacgcagctggtctcctcggggcgactcgaccggataggacagctggaaaggacagagggaggaggccacggatgctgttcgtgggcgacgactgggccgaggaccaccatgacatcgcgatcatcgacggcgccggccggctgctggcacggcgccgtctgccggagggggtagtcgggatcgagaagttccaccgcacggtggccgaccatctgtccgaagatggtgaagccggccaggtgctggtcgcgatcgagaccgaccggggcccatgggtccaggccctgctcgccggcgggtacaccgtctacgcgatcaacccgctacaggccgcccgctatcgggaacggcacggcacctcgggtgctaagtccgacaagggcgacgctctcgcgctggccgagatcctgcgcaccgacgccgcccatcaccgcccgattaccggcgacagcccaattgccgagcaggccaaggttctcgcccgcgcacaccagtcactgatatgggcgcggcagcgccaggtgaacgtgctgcgctcgaacctgcgcgagtattacccggcggccctggtggcattcggcagcgatctggccgaccgggacgccctggcggtactcggcgccgcgccgggacccgccacaggcgcgaagctcacccagtcccgggtcgagacactgctgcgcagggccggccggcgacgttacctcgccaagcgggcccaggagatcgtcgccgcactgcgttcggaacagctgcccacccggtccggcatcgaggcggcctacaccgccaccaccacggccctggtcgccgtaatcaccgaactcagcgcacagatcaccgccctgcaggggaaggtggaggcgtgttttggtcagcacccggacgctgagatctacctcagccagcccggcctcggcggcgtgcttggcgcccgggtgctcgccgagttcggggacgattccgaccgctacaccgacgccagagcccggaagaactactccgggatgagcccgatcacccgcgcctcgggcaagaaacagatcgtcatagcccgatacgcccggaaccgccgactcggtgacgccctactcctccaggcgttcgccgcactgaacgcatcaccgggggcgcgggcctactacgacgtccgcagagcccgcggcgccacccactaccaggccctccgtgccgtcgcgaaccggctcgtcggcattctccatgggtgcctgcgcgaccacgccctctacgacgagcagaccgcgtggcatgcctccgccgccgcgcgccaggaccacgctgcttgacaagttagccccgtgggatgt

SEQ ID NO: 7564 - DNA, 1326 bp, unidentified
  source 1..1326: mol_type = unassigned DNA; note = element_bb9b743
  misc_feature 1..2: note = core
  misc_feature 3..69: note = LE
  misc_feature 70..1029: note = CDS
  misc_feature 1030..1326: note = RE
  misc_feature 1092..1324: note = bridgeRNA
ttaatgagatggtcactccctcccttcccggtactatgctgaggacaggctttcattcggagaactatcatggaaaacattgcgctcattggtatcgatctgggtaaaaactctttccatattcattgccaggatcgtcgcgggaaggctgtttaccgtaaaatttacccggccaaagttgatcgaatttttggcgacatgccccgctacaaccatcgcaatggaagcctgtggcggttctcactttatggcacgcaagttggaagagttggggcattcccaaagctgatatcaccacaatttgtccgcccgttcgttaaaagcaataaaaacgactttgtcgacgccgaagctatttgtgaagctgcatcgcgtccgtctatgcgttttgtgcagcccagaacggaatctcagcaggcaatgcgggctctgcatcgtgtccgtgaatccccggttcaggataaggtaaaaacaaccaatcaaatgcatgcttttctgctggaatttggcattagcgttccccgaggagctgccgttattagccgactgagtaccattcttgaggataatagtttgcctctttacctcagccagttattgctgaaattacaacagcattatcactatcttgttgagcagattaaagatttggaatcccagttgaaacgaaagttggacgaagatgaggttggacagcgcttgctgagcattccctgcgtcggaacactgacagcgagtactatttcaactgagattggcgacgggaagcagtacgccagcagccgtgactttgcggcggcaacagggcttgtacctcggcagtacagcacgggaggtaggacgacattgctgggaattagtaagcgaggtaataaaagatccgaactttgttggttcaatgtgccagggtattcatacaaaaactggaacaccagtctggcaaattggccgattgggtcagggatttactgtgccggaaaagcaactttgtcgtcacttgtgctctggcaaacaagctggccagaatagcctgggccctaacggcacgacagcaaacttatgtagcataacggcagaaatacaccggtttaaagaattactgatctggttttgcgaatactgatattgatgatactaacggcccaccggcctgttgaggaacctgtaaaacggaaaggctcattgaagccgtatattttctggaggttcatcaggcgcggaactcatcaaggcgcgggaataaaatcccattcagacgccggatagattcaagcaagccaacttgtcgtcaaaatcggtgttgcaaaaaacgggagtgaccataga

SEQ ID NO: 7565 - DNA, 1517 bp, unidentified
  source 1..1517: mol_type = unassigned DNA; note = element_bba2685
  misc_feature 1..4: note = core
  misc_feature 5..250: note = LE
  misc_feature 251..1492: note = CDS
  misc_feature 1493..1517: note = RE
ctcactggactaccttccttgcgttggcaggatccgatgtcttgctgatgcacccctggtccccaccgggccactgccacgcgcgctcgactttcgaggtccagcatgagttctgcagggtccggtggcccaggacccgccgaccggctacagggctatgcgccagcgagcgccgatcagtgagcgaccggctgcagggtcccgggaccaccgggtggctccccactgctgcaacagcgaggacccgagtatgagtgtcacctcgatccagcccactacgcgagtctgcgcgggcgtcgactgggccaaggacgaccacgtcgtgtgcatcgtcgacacggacggcgacgtgatcgaccgattcacgatcacccacaccgcagccgggctcaagcgcctggtcgcccgactcctcaagtccgaggtggacgaggtcggcatcgaacgccccgacggccccgtcgtcgaggcactgctggccgccgagctgaccgtactggtaatcagcccgaaccaagtcaagaacctgcgttcgcgctacggctcggccggaaacaaggacgaccggttcgacgcctacgtcctggccgatgtcgtccgtaccgaccgacgtcgcctcacaccgctgacccgctccaccccagccacgcaggcgctgcggtccacggtgcgtgcccgccgggacctggtcgagcaccgtgtcgcggccgcgaaccagcttcgcgcccacctgcaagtcgtgtttcccggcagcgtggacctgttcgctgccctggactcggcgatcagcctgtctttcctggaacggttccccacccaggccaaggccgactggctcaccgtcgaccgactggccgtctggctcaagaagatcggctactccggccgcaccgaccccgcggtcctgcatgctcggctgctggccgcaccacgaggcaccaccggtgacgaggcgaccgttcatgccagcaccacactcgcgttcgctacgctcctgcggaccctgaacacccagatcgcggctctggctgacacgatcgccgagcaactccacgtccaccctgacgcgcacatcgtgacgtcgcttcctcgctctggcaccctgcgcgccgctcgcctgctggccgagatcggcgacgcccgcggccggttccccaccgccgactcgctggcctgcctggccggcgtcgctccctccacccgccagtccggcaaggtcaaagccgtcaccttccgctggggatgcgacaaagaactccgcggcgccctgaccgacttcgccgatgggagtcgacacgccaacccctgggccgccgacctctacaaccgcgcccgagcccgcaaccacgaccatccccacgccgtccggatcctggcccgcgcctggaccgacatcctctggcgatgctggcaagacggcgtcacctacgaccccgaccagtacaacgccctccaacgtgtcctcaacgaacacgctccacaggccgcctgaactggcggaggttgacacagggcaa

SEQ ID NO: 7566 - DNA, 1358 bp, unidentified
  source 1..1358: mol_type = unassigned DNA; note = element_bba2f2e
  misc_feature 1..2: note = core
  misc_feature 3..86: note = LE
  misc_feature 87..1106: note = CDS
  misc_feature 1107..1358: note = RE
  misc_feature 1126..1344: note = bridgeRNA
gatggtgtggatagctcctgctcaaaccggcgtcgcaatgcgccatactgcagttgttattaactgcttatgagaggagctacccaatgcaggttacaacagtcggcctcgatttggccaataatatctttcaagttcacggagtgactgagaatggcgaagttgttttcaaccaagcattgcgacgcgcacagttgcttgcattctttgagaaactcccaccctgtctggttggcatagaggcctgcgggtccagtcattattgggcccgacagctgagcaagttgggtcatgatgtgcgtcttatcccagccatgtatgtgaagccctatgtgaaacggggcaaatccgatgcggttgatgccgccgctatctgcgaggcagtgacgcgtccaactatgcggtttgtcgcgattaaatcagaagagcagcagggcgttctcttcctccaccgtgcccgcgatctgatcgtccggcagagaacccaactaggcaatatgctgcgtagcttgctgggcgagttcggtattgtgattgcgcaagggatcggtagcgcgatcaagttcgcaaagaatatgctggatggagacaaacccggtattcctgaaatcgccgttgatgtactcaacaacctcagcaaccaacttgttgctctgcacctgcgtgtgcgctggtacgagatgcgtatgcagcttcaggccaagcaggacccgcgcgtgatgttgctgcgcacgatccccggcgttggtccagtgaccgcgtcagcaattgtcgcaacagcgggtgacgccagtcagttcaggaacggtcgcgaatttgccgcctggctggggctgacaccgctcaaccgatcgagtggtggcaaggagaaacttggacgcatcacaaagatgggggatcgatatatcagacgactgctggtcactgggatgacatctcgactgaggcagatgaaaacacatcccgaacgcgttgatccgtggtcccgagcgttgcttgaccgcaagccaatccgtcttgccactgtggcaatggcgaacaagacagcgcggataatctgggccgttttgaccaggaacgaatactacagaccgcaaacggtctaaactgaggaaaagagaacacacgagacagcaagaccattgaaatgatggagcacagtcagcccgtcagccgagacaccccgtcgaatgtcagggacatcacttgtccgtagaccggtttgggacttggtttgcggaaaccatcagggccagcggccacgtgtgccgcgcaaacaggccggacacacgtctgcttctgaccagtgctaaaatcagttcgaaaaatgtcttgctatgcagcagctatccacacag

SEQ ID NO: 7567 - DNA, 1570 bp, unidentified
  source 1..1570: mol_type = unassigned DNA; note = element_bbad913
  misc_feature 1..3: note = core
  misc_feature 4..267: note = LE
  misc_feature 268..1425: note = CDS
  misc_feature 1426..1570: note = RE
  misc_feature 3..241: note = bridgeRNA
cttgtataatatacttagggtttaaagttacccttaactttatattttatgtcactttcgtgatataattcttatattaacactgtggactcttattcctccttgtagctttgactacttaaataagaatattgccacagttttattattaattggtaattagttagataagactctgatcttttatttagtgcaaggttccaagtaataaaactcgctgggtgttgtcacagttgttaataaatttatcacaaggaggtaaacactatggtttacatcggcattgatattgccaaatttaaacactttgcttctgttgttagctcagatggtaaagttattgtaaaacctttttcttttgaaaattctcgtcaaggttttatgaaattagttgaagaaattgagaattttcaagattgcttaattggtttagaatctactggtcattatgcagaaaatcttattgacttcctttatgaccgtggctataaaataggtgttattaaccctattcaaactgatgcacttcgtgattctaatatcagaaaaactaaaacagataagattgatactactcttattgttcaatgtttaatgcttaataaatactctcttgttaattcaaaagatattgatatgattaaacttaaacgtctttctcgcttcagaatggaaatggttcagcaacagactagaattaaaactcaattaacttcttgtctcgatattgtttttccagaattaccactattttttaaaggcaatattcatttaaattctgcttatgctttgcttgaaaaatattcttctgctaaaacaattagttccactagaatcgacggattaactaatattctttataacaattctagaggtaaatataattatgacaaagctgtcgaattaaaagccttagctaaaaatagtgtaggcttatataatcctgctattgaattacaaattcaatgtttaattaaacagcttcgcctttataaaaaacaaattgctgaaattgatgaaggcattgccactattatgaaaatactaaattctccaattttaactatacctggtataggttatactttaggtgcaatgattttaagcgaaatcaatgatataaaaagatttagcaacccttctaaattactagcatttgctggtttagaccctgttgttaaacaatctggaaattttcaggcctcatcaacgaaaatttctaaacgtggttctacataccttcgctatgcaatctatagagttgctttccttattatatacaataacgaaacttttcacaactactatttagataaacgtgcacaaggtaagagccataggtctgcattaggtcatgtttctaataaattaattagagttatcttcaagattctaactgaccaaataccttttaatttaagctaacaataaaattttcaaagtacatattttcaagagtttcagaagtttttaaaaaattaactaaaaacttctatttgtcatgcaaatttttatctaacgaatccattaaaaaaatttttaatttttctattgacaattaatagttagt

SEQ ID NO: 7568 - DNA, 1201 bp, unidentified
  source 1..1201: mol_type = unassigned DNA; note = element_bbaf3f4
  misc_feature 1..2: note = core
  misc_feature 3..223: note = LE
  misc_feature 224..1186: note = CDS
  misc_feature 1187..1201: note = RE
  misc_feature 28..199: note = bridgeRNA
cttgtatgttcctcccggctcccacgaggtatgtaggagccagggtggagggaccgtcaacatgttatctgcgggtaccagccgacagacgagtcgagcgatccccatcccgcacctcaacgtcgataagggatctagcggcctttttaggaccgccgatgtaggcaagccaacgtggtgcggtaccaccccagcccctcaacaatagctgggagttgcgcagatgtcagatcgttttgctgtcggtattgatgccgattcacggaccctggtggtggcctaccacggcactaagggtagcttccggatcgcaaattcagcctcgaccatcaacaaatggctgtccagcctgccggcaaagtcccgtattggcgtcgaggcaaccaatcgctaccacgagcttgtggttcaagctgcccaaagggccggtcacgcggtctttgtgcttaacccgcgcgacatcaagcattacgccaagggtgtggcttgccgcggcaagaccgactcgggcgacgcccaggtcattgcgcgttacgtcgccaaggaggccgacaatctgcacgagcatgtcgcccgttcgcctgcgcaggagcagctgcacgtgcttcttcagcagcgcgacagcctggtgcggaacagggcaacgctccgcctctctttgggtgacgatgcagctgactcaaccatcttcgggcgcattttcagaggcttgaaagaagctattgcgatgttggaccgggaaatccagcgactctgcagcagcggcgagcaacgcgatctgtatcgacggatcatgaccattccgggggtcggtccgacggtggctgccttcgtcacccatcacatcacccgctggccgctggccagctcagacgcctgggtggcctgcactggcctggatccgcgaccaaacgaatccggcgcacgaatcggccgacgtcgcttgtccaagcgaggcaacgccagcctgcgccaaatgctctacatggccgccatgggcctgacccgatcaaaaggcggcaaacccctctacctcgccatccgcgagcgcgggcacagcagcactgccagcttcaacatcttggccagaaagctggcccggatcgcctggggcgtctttaagagtggccagaacttcgacccgaccatgctgaaagtcggtcaagcccgcttccagcaggcttgaccacgaacataggat

SEQ ID NO: 7569 - DNA, 1347 bp, unidentified
  source 1..1347: mol_type = unassigned DNA; note = element_bbb5a35
  misc_feature 1: note = core
  misc_feature 2..73: note = LE
  misc_feature 74..1099: note = CDS
  misc_feature 1100..1347: note = RE
  misc_feature 1118..1344: note = bridgeRNA
taatgggatggtcacccctccacatatccaaggctatgttttcgcagggccgtgtatttcggagaccatcgccatgaatcaggcagcacgggtaggcatcgatctgggcaaacacagcttccacctgcacggccaggacagttccggccgggaagtcttccgcagaaagttgacacggctccagatgatgcgttttctgggcaacctgccgtcctgcaccgtggtcatggaggcttgcgccggggcccattacacggcccgcgcgatcagggcgctgggacatgaagccaagctgatttccccccatttcgtccggccgttcgtcaaatcgaacaagaacgacttcgtggatgccgaggcgatctgcgaagccgcctcgcgcccttcgatgcgcttcgtagcacctaaaaccgaagcacagcagacgctatccgtgctgcaccgcatgcgcgagtcattgatccgtaaccggaccagcaccatcaaccagatgcacggattcctgttggaattcggcatcagcctgcccaaggggccggcggtcatgaagcggctgtccgacgtgttggccgaacacaacctgccgccgcagctgaccgcattgctacacggtctgcatgatcacttcgtctatctggacgggcggatcagggatctagatcgggagttggagcggcaactcgccgaagacgaccttggcagccgtctgctgagcattcctggcatcggcccggtgaccgccagcctgctgtccggcgaaatgggagatggcagacaatattcgtgcagtcgtgaatttgccgcgtcactcgggctggtcccgaggcagtacagcacgggcggcagagccaatctcctgggcatcagcaagcgcggcgacaagaacctgcgccggctgctggtgcagtgtgccaggtcgtacatgcttcatctcgaccgccagcggggggcgctggctgaatgggtgcggagcctgcagcttcgccggcactccaatgtggtggcctgcgccctggccagcaagctggctcggatcgcctgggccctggccacgaaacatacgcggtttgacgccggtccggacaccttgcccgcttgatcccaagctgcaccgtacagaaacatcctttcggttttgcgatagtgaacgactgatgacgtgaacggcacagcggcctggcgaagaacctgacatgtgaaatggcattcgatgccgatgacgttttcaggatcgacgggcgcgactctcatcgtggcgcggagcatgctccaaccagacgccggatagatttaggcaagccaacacccatcgttgatctctattgcaaaaacaggggtgaccataga

SEQ ID NO: 7570 - DNA, 1615 bp, unidentified
  source 1..1615: mol_type = unassigned DNA; note = element_bbc12e4
  misc_feature 1..2: note = core
  misc_feature 3..247: note = LE
  misc_feature 248..1483: note = CDS
  misc_feature 1484..1615: note = RE
  misc_feature 7..222: note = bridgeRNA
ttcgtattataaggtcagccagaaaatctggttgactattttttatatggttttattataacaatagccagggtagaacgtaactgcccttggggcttgaccccgtcaactaaaccgttcaccccctacttgtagaaacatgattgaggctggttgggacttagatctcgtataacaagcgaagctgtgacactgcatggaggattaggggcaactggcaagctaaaagtttaggaggagattgataatgaatccagtcgttggtctggatatttcaaaaggagaaagccaggttcaagctttcttagataaaggcaaaccatatcgtaaaagttttaaggtagatcatactttggaaggtctgaacgaccttttcatgtttttaggggatgtacaaaaagaggctggaaggaagcctactgtcattttagaagctacaggacattacggtgcccctgtcgtccattacttagaagagcgaggatatttaatgattatcattaatcctctgatctcatataaggcaagaggttcgagtttgcgaaaagttaaaaccgacgccattgatgcatatcttttatgtgaactgttctataaagaggaattggagccatataaaaagcggggtgtacaattattaaacctgcgcaatcttactagacaacatgaaaatataactggtgtaatgattcaaacgaagttgcaatttcaggcggtccttgaacaggtatttcctgaatataaaggggtttttggagatttatattctgtggtttctctattgactctgtccgagttcccttcttcagaagacattttaaaagctagtgaggaatcaattacagacaaaatatttgaactatgtaagagtagatcgattaaatgggccaatgaaaaagcagtacaacttaaaatagccgcagctaggaatccctttgaaaaaacagtttacctgagtcatattttaagtctagatatgtatataaatatccttcttcaatacaaagagcatctatcaaagttagagtcagaaatagatgccctcgctaaagaaattgaagaatatactatcatcaaatctatccccggtatcggtcaaaaaatcgcggcaacgattatttcagagattggtgagatagatcgatttaacaatcctaaaaagcttgtagcattcgctggagttgaccctagcgtattcgagtcaggtaagttttcagcgaccaagaatcgaattaccaaacggggctcaagtaggcttcgacatgtcttatttatggctgtacgttgtgcgatacgagattgtcgaaaggctaaaacagacgatatagtgattcctcgaaacaagaaattacgtgagttttatgataagaaacgtgaggaaggaaagccctataaagtagccatgatagcttgtgttaataaactattacactggatttttgccttattaaaaaacaaaaccacatttcaagatttagcctgatacacataaatattcaaatataccaataccttccaaatagagatttcggaaggttatttgtcatacccttttttagtatatcatgtgttttttaaagttttaatagaaatatattgacaaactattagctgg

SEQ ID NO: 7571 - DNA, 1157 bp, unidentified
  source 1..1157: mol_type = unassigned DNA; note = element_bbc6921
  misc_feature 1..2: note = core
  misc_feature 3..182: note = LE
  misc_feature 183..1145: note = CDS
  misc_feature 1146..1157: note = RE
  misc_feature 36..212: note = bridgeRNA
cttgtcttatgactttccgtgccgacaggcgaaaaaggaaccgctgggagagggtggctgccctctcgtcagcggcgagggatggatcgagaaaaagcgggccggattgatgggccgaagcggagtctgatcaccctcgtcttttccattggcctgaacggatacccgggggagagccccggatgacaagcagaggcacggaaaagatgactgagactaccattggcatcgacatctcgaaagacactctcgatgcccaccgcctgtccgatggcagtagccatcagttcaccaacgattccaatggtcacaagtccctgatcgcctggatcggcaaggatgttgttgttcgggtggttttcgagcccaccggcccctatcaccgcgcgttcgagcgtgcgttagccagaggcgggctaccgatggtgaaggtcaacccgcgccaggcccggcgttttgccgaggccacgggtaagctggccaagaccgatcgcctggatgctatcctgctggcgagaatgggcgcccttctccaactcgaaacacgcccggcgccagacgagactattgccgagctcaggcagttccatctcgcccgcgaggcactggtgaaggatcgtaccgccgccaagaaccgcgccaagtccctcaccatcactctgctcagacgtcaaaacgccgagcggctgaagcatatcgagcgccagatcgccgccatcgacgccgagttggaaggccgcattcaggccgatgccgagctttcgcggcgactggaaatcctgatcagtattcctggcatcgggcgcctgaccgcgatcaacctgctgatcgagatgccggaactgggtgtcttggaaccgggacaagccgcgagtcttgccggtctggcccccatcgcccgccagtctggacgctggaccggacacgccttcattcgcggaggccgggccggcgtccgccaagccctctacatgccggccctggttgccatgcgtttcaaccccgatctcaaggccaaatacgagcagttcatcgctgccggaaagcccgccaaggtcgccattaccgccatcatgcgaaggatcatcgtcctggcaaacgccctgctcagggcagggcgtccctggatgccaaaaaccgcttgatcaacacggata

SEQ ID NO: 7572 - DNA, 1447 bp, unidentified
  source 1..1447: mol_type = unassigned DNA; note = element_bbc8ece
  misc_feature 1..2: note = core
  misc_feature 3..211: note = LE
  misc_feature 212..1426: note = CDS
  misc_feature 1427..1447: note = RE
  misc_feature 7..211: note = bridgeRNA
ctaatgggactggatcagccgattttggaaggctgatctccgagccgccgggcggtgaccactcccgcccccgggacatgatccctaggtctagatcgtggcccgcccggtcggtgaggagccagacagctggtgggatgtcgtgcctcgagcactgatccattagggcgctgcgcaactcctcgggctccggagcgacaggggaggtcagatgctctttgtgggagtggactgggccgaggaacatcacgacgtctgcgtgatgggtgaatcaggcgaggtcctcagccggcgtcgggtggcccacagtgtccgtggagtgggcgagctccacgagctggtgagcgagttcgctgacgaggacgagcaggtggtcgtcggcatcgagatcgaccggggcctgttggtcagcgccctcatcggtgcgggttaccaggtctatgccgtcaacccgatggcggcctcgcgctatcgggaccgccacggggtctcaggggccaagtccgaccccggcgacgccaaggtgctggccgacctggtgcgcacagatcgtcacaaccaccgaccggtgggcggcgactcagagctcgtcgacgccatcagggtgctggcccgctcgcaccagtcggccatctggggccgccagcgccagatcaacagcctccgctcagggctgcgtgagtactacccgggcgcccaggaggccttcgggaccgatctcggttcgcccgatgccctggccgtcctggccatcgccccgacccccgagctcggccggacgctctctcgggccaagatcatctcggcccttcgccggggtgggcgtgagcgcaacctcgagacccgggccgaggagatccaaggggcccttcgggccgagcacctcggtgccggagcgacgctgtcccgggcccacggcatcgtcaccagctcctgggtcgagctcatcaaagccctcaaccgggagatcgcactcttggaagaggccctctcggagcattttgagaggcacccggccgccaaggtcgtccgctccctgccaggaatggggacgacgctcagcagccgggtgctcggcgagttcggggacgacccgaaccgctatgccgacgccaagtctcgcaagaactacgccggcacgtcacccatcacgaaagcctcgggcaagagtcacgtggtcctggcccggttcacacgcaaccgccgcctcgccgatgccctcgacatgtgggccttctgctcgctcacctgctcgccgggtgcccgggcctactacgacaagctgcggggacgaggcaagacccatcgccaagccctccgtcagctggccaaccggtgggtcggaatcttgcaccactgccttgagaccggctctctctatgacgagccgtccgcttggccgatgggtgagtccgtcgccgcttgacggcttatgcccttgggatgt

SEQ ID NO: 7573 - DNA, 1273 bp, unidentified
  source 1..1273: mol_type = unassigned DNA; note = element_bbdb3be
  misc_feature 1..2: note = core
  misc_feature 3..233: note = LE
  misc_feature 234..1259: note = CDS
  misc_feature 1260..1273: note = RE
  misc_feature 69..224: note = bridgeRNA
tccattagacttagtgtgtaatttattttattttaatataaaacatttaataacaaaataaggattaaataaaatacccaaagagccgagtaagtctatggcacgctcaagttaaaactaaagtctgattaagacccggctctttggtggttaaagctaaataatatttccgtatttaagattattaaaatggagtaagctcgtaccactttggtgttttataaaaaagaacaatgcaaacaacaaaatatttcatcggctttgatatttcggcagatgacttttctgccagctgcattaccagtcctgataatcttgttttctcaacacaaaagttctcaaataacattgatggctctaatgagtttttaactttgctctctaataataacattaaacaatctgatgccatcatttgtatggaagcaacaggtgtttattctgaaaacatctcttacttcttagcttcaaaaggatttaccatttccattgaagctccgcacaagataaagaacaagactaaagattcaccaagaaagaacgactttgttgatgctctatccatagcagaatatgcttacaggtattctgataaacttcccatctggaagcctataaatgagattatagagcaaacacaggtgcttttaactactcgtgaacaccttagtgttcagatgattgctaatgtaaatgctcttaagactctaaagcacaaatactaccaaactcctctggctaaccagatatacgagcaaactatcagtaaactcaaagaacatatcaaacagatagatcaggaaattaaaaccttagttgataaagacgattcattcaagaacaacatttctcttgctaagtctgttcctggtgttggattacttttagctgcaaatcttcttgttcttacaaaaggatttactgaacaactaaactacaagcatattgctgcttattctggaatatgtccttacgaacagattagcggaacatcactgcataaaccgccaagatcacgaatgtgtggtccggctaaacttagaaaacttctttatcttgctgcattatctgtaagaacacataatcaaaattttaagaaatatttccttcgtaaacaagcagaagggaaaaacaatagacttattctaaacaacattgaaaataaactgttaaaaataacttgtgctgttattaattctggaattgcttatacagaaaactttaaatctattaatccagaattattaaaaacagcttgactaagtcataatat

SEQ ID NO: 7574 - DNA, 1524 bp, unidentified
  source 1..1524: mol_type = unassigned DNA; note = element_bbdbb8b
  misc_feature 1..2: note = core
  misc_feature 3..237: note = LE
  misc_feature 238..1404: note = CDS
  misc_feature 1405..1524: note = RE
  misc_feature 3..218: note = bridgeRNA
cttgtataatgaactcgtagtcaaactacggatttaagattttttcttatatactgagtatagtgttgtggattggtgtatcctcctatagctttgactatttctttaaggctccaaccacagttctatgttcttttgtttattagttagataacgttagacgttttatctcgggcaaggatacataacatagaatcatgtggatccacaactcaaataatgaaaggatgtgtttttatgatttatgtcggcatcgatgttgccaaagacaagcacgattgctttatcgtaaactcggatggtgaagttatcaaagatgttttcactttcaaaaatgatttggaaggtttcaaacagtttttctctgcgatccccgatgtccctttggacaaaataaaagtgggactggaagctactggtcattacagcattaatctcacgaattttattagcaatcatcacctaccactggtaattctcaatccgcttcaaaccaaccttttcagaaaagctcagacgcttagaaaaagcaaaacggacaagatcgatgctaaacttatcgctttaatgttgcaaacgggtaacttcgaatcccacacaaattcatcataccatctggtagaactaaagtcactcactcggcatagatctagaattaaagaaaatctttccaagtataaaatttcactgatacgaatgacagacattatgtttccagaactcgcttcggttgtttattcgatcaatcaatcgtcaacctatgcggttctaagaactttcccgtctgcacaagcgattgcttctgctcaccttaccaagctcacaaccttactgcatcatacgtctcgtggcaaatatggcaaagctaaggcacttgaaatccgacaagctgcgagaatatccattggctctgagagccgtgcactcagctttgagctcatccagatcttgcactttatcgaatactacacgcaagaaatcgctcagattgataaagagatcaaatccatcatggatgaattggaaagcccgatcctgagtttcccaggtatctcttatggattgggatctgtcatcctagctgaggttggcgatattcgaagattctcttctccagctaaactgctagcctttgctggtctggaaccatccacttttgagtcaggcaagtttgtggcttccaacatgaaaatggtaaaacgtgggtcaccatatttgcgatgggcacttcttgaagccgctaggctcgttgctatgagagaccaaacttttaaagactattatcagaaaaagaaagctgaaggtaagcatcattatgttgttctgtctcatgttgcaaaaaaacttgtccgtgttctttaccacattttgttcaataatctaactttccaacctcaaatttaattatatccatcgtcaatctcacccggaagtagcttcctacttctaatttggtgcgcaaattttcccgtttcaattgttacgataaattactcgaattctacttgacttcatatagttagt

SEQ ID NO: 7575 - DNA, 1581 bp, unidentified
  source 1..1581: mol_type = unassigned DNA; note = element_bbdcabb
  misc_feature 1..4: note = core
  misc_feature 5..280: note = LE
  misc_feature 281..1456: note = CDS
  misc_feature 1457..1581: note = RE
tcacgtataatccaattatcttagatggtaattggatttttcctttctcccagattctctgggcattttaatccatctctgatatattttgaaaaggcactgtggatctgtgtctataaaattacagccttgactgttccgaggtgactcagaccacagcttttcgtctattactgttaatcagtttgttaacgcctgacgtttctatttacgtgattacacagccggattctctgtggaagacaacagtgccaaaatacatatcaggaggtttcactctatgtccatgtactttgttggaattgatatttccaagtacaaacatgattgctgcattatatctgctgctgatcaaaagcttgtttcaaggtttactgttaaaaatgataagacaggctttgaacagctgctcactatttttaattctctctccaatccacaggatataagaatagggttcgaatcaacagcccactatgccctcaatctcgaactcttccttgaaaatgccaaccacagcttcatggaaattaatccagttctcatcaaggaatacaagaaatccacatctctaaggcgaaccaaaaccgactctattgactgcgaatcaatagcccggtggttaatgactgttgagtacaaaccccattcaaaaggattttaccacgcttattccttaaagtcattaactcgtttacgtgataggttagttcggcagcgttctttttatcttgtaaagattaccaatgtgctggatcacacctttcctgaattcaagcctttctttcatgagcgtttatctaagaccgctctgtatctgcttgaaaactacggttccgctgaaaagatggcaagaatgaattccgcatcctatgagaaactccgctctttatcaaggggtaaattttctccccagcaattcattcggttaaaggagcttgccgccaatactgtcggtgtaaacaactctatctttgatgtggaactgaatagcttgctcaccttgtacaagtctctcgtaaaagaaattgacacgcttgaaacagaaatcaacaagttaattgaagaagtccgccctcactatatgtctgttcctggcattggagctatatctgccgccgtcatttattctgagtacggagacatatcaaacttttcaacaccagctcagatgctcgcttttgcagggatcgaaccaggtgtaaacgattccggaacggaatcacacgggggacggatggtgaaacatggctcatcggggctccgatatgtcctcatcaattgctgccttcctttaatccgttttgatatgacattcgccacttactatgcgaaaaaacggggagaaggcaagccccacagggttgctattactcatgtggcaaagaaacttgtcagggtcatctacgcattggagaagcaaggggtagactttaacgctcagaagcttcgctaatatatatcttcccaaaaagagtccgttccatctgaaatacaacgttttcagatggtttgtttgccatacccttttttatctctaaacaaaaaatttctaaaaaccccttgactatttatagtttg

SEQ ID NO: 7576 - DNA, 1436 bp, unidentified
  source 1..1436: mol_type = unassigned DNA; note = element_bbdddfb
  misc_feature 1..2: note = core
  misc_feature 3..230: note = LE
  misc_feature 231..1421: note = CDS
  misc_feature 1422..1436: note = RE
  misc_feature 12..203: note = bridgeRNA
gtcctactttcttcttgggcttgatcggtcattcgtaagatcgataggcccaggggttccgggtatggctgtcacggtgtcgccgctggatggctcaggagacttggccgcccggagccctgcgacgactcgaccgctaattgggagacgcgacccgatcgctgtgtaggacaacgtcggcgaggtcgtctgctgggctgtgaactcgcgacgagctggcggaggtggccgtgcccgacatctgggccggagtggacatcggcaaggaacaccaccactgcgtggtgatcgacgcccaaggcaagcggctgctgtcccggcgggtcctgaacgacgagagcgagctgctccatctcgtggccggcgtgctggagctgtcgcgcgacgtgctgtgggcggtggacatcaaccacggcggagccgcactcctgctcggcctgctggtcagccacgaccagcacgtcgcctacctcactggcctggccgtccaccgtgcctcggccggttaccgaagccaggccaagaccgacgcgaaggacgcgttcgtcatcgcggaccaggcccgcatgcgcacggacctcggtgtcctgcgacccggcgacgagatatcggttgacctgcgcaccctggtcacccgccgcaccgacctggtttgcgaccggacgcgacagatcaaccgccttcgcgcccaactcctggagatctttcccgcgctggaacgcgccctggatctgaccaagaaggggccggtcatgctgctgaccggctaccagacccctgcctcgatccgccgcgccggcgcctcgcgcatcaccacctggctgaaaaaccgcaagatctacggcagcgcggccttggccaaggccgtcgttgaggcggccgaggcccagatcaccgccctgcccggcgagcaactcgcggccgtcatggtggcccgcctggcgaagggggtgatggcccttgatgaggagatcgccgagctcgaagccctgatcgaggcccggtttcgcgagcacccgagcgccgaagtgatccagagcctgccgggcatgggtgccctgctgggagcggagttcctcgccgcgaccggcggcgacatggacaccttcggcaccgccgaccgtctggccggctacgccggcctcgcccctgtccctcgcgactccggacgcgtcagcggcaatctccaccgcccgcgccgctaccaccgcggcctgctccgggccttttacctctctgcgttcgccagcctccgaagctgcccggcctcgaagaggttctacgaacgcaagagggccgaaggcaagggacacaagcaggccctgctggcgctcgcccggcgccgggccaacgtcctgtgggccatgatccgcgacggagcgtgctaccaagccacaccaccagtcacggcagcggcttgacaacgtcattgggaa

SEQ ID NO: 7577 - DNA, 1183 bp, unidentified
  source 1..1183: mol_type = unassigned DNA; note = element_bc0152f
  misc_feature 1..2: note = core
  misc_feature 3..391: note = LE
  misc_feature 392..1180: note = CDS
  misc_feature 1181..1183: note = RE
  misc_feature 29..183: note = bridgeRNA
tcctttagatttgtttttataatattatttatatttaaaacggaaaaggtacactatgtcgaactcaaagcacaaagcttataacttgattcagaccttttccgtttttagttgaaactcaaatagaaattcgggatttaaagcccattattaaggagttgagttaaactatttaatctgttaaaacaaagatatgaaaacaaaagcataatttattggaatagatgttagtaagaatactttagacatctgtattctttcaaaactttaagaattttttgtaattaaaaacactaaaaaagagattttaagattctttaaaacacatttatcagaggcctcaaaagattatgtttgtattgaaaatacaggaaaatactcttgggttttaatggaattaatgcccgatcttcaatgctttttttatgtaattaatccattacatataaaaaagagtatggggttggtaagaggaaaaaatgacaaggttgatgcttttagaatagctcagtttatcaaaaaaaataatgatgagtcacaatcttatatacctcaaagaaatgaaataagattgatacagatattgttgtcagaaaggcgttttagggtaaatcaaaagaaacaattactaaccaaaaacaaagaaaatatacttttatccaacaagaagactgccagatctctaaccactaaaaataatagattaattaaagaacttaaaaaacaaattaaagatattgaaacagaaatcaatcaattaatatcccaagacgaatcgttgaagaaattaagaacacagttaaaatctgttcccggtgttggaaatattctatgttggaatattattgtaaaaacaaatgagtttaaaacgattacaacaccaagaaaactggcttgttactccggagttgtccctttttctaattcctctggaatctctaaatttggaaacaacagactttctctatatgcagataaaaacttaaaaacattgttacacatgggagctttaagtgctattagattagaaaataatcttagcatttattataaaagaaaaatagctgaaggaaaaaataaaatgagtgttttaaatgctgtaagaaataaaataacacatattatttttgctttagttaaaaaccaaactttttataaaaatcatttggaggtgtcatagaaa

SEQ ID NO: 7578 - DNA, 1415 bp, unidentified
  source 1..1415: mol_type = unassigned DNA; note = element_bc04d5d
  misc_feature 1: note = core
  misc_feature 2..63: note = LE
  misc_feature 64..1095: note = CDS
  misc_feature 1096..1415: note = RE
  misc_feature 1187..1409: note = bridgeRNA
taatgagatggtccgccgccgagtggcatgatggctcggcagcttacaagggaggatcatctcatggatatcgcctcgattggtattgacctgggcaagaccacctttcatcttgtcgcgctggaccgccagggcacggtggtggttcgcaagaagttctcgcgcccacaactgctggcctacaccgccaacctgccccactccttgacgggcatggaagcatgctcgggagcgcactttctcggggctgcgctgcgcgatcaaggccacgatgtacggctgatcccggcacagttcgtcaagccgttcgtcaagtcgaacaagaacgatttcatcgatgcggaagcgattgccgaagccgtcacccgcaagaacatgcgcttcgtgcccatcaagaccaacgaccagctcgacctgcaagccctgcatcgcgtgcgcgaccgcctggtgcaacggcgtaccgcggtgatcaaccagatccgcggctttctgctggaacgcggcatcatcttcgcccaaggtcgcaccaagttgcgtgaccacatgccggggatcctggaagatgccgaaccgaacctgacgccgcgcctccgccacctgctccatcatctctggcaggagtggaaacaactgcaggccgacatcgaagcggtcagcgagcagatcgaacggatctgtgccggcgacgcagcctgccagcgattacgacagatccccggagtcggccccctggtcgcaaccgctaccgtggcggcgatcggcaacggagcggccttccataaagggcgcgagtttgctgcctggctcggactggtgccgcggcagcactcgaccggagacaaggccaagttggggtccatcagcaaacgcggcaaccgctatctgcgccgcctgttcgttcacggcgcccgggccgtgctgctgcgcgtcaggtacgacacgggaggcttcggcaggtgggtgcatcagcttgccgcccgaacggcgcgcaataaagtgatcgtcgctattgccaacaaactggcacgaatcacctgggccgtgctgtccaaaggagtggactaccggcacgcgcccctgggccagcagatgtgaacgcgggccgtggaaaagacgctgccgcttggaaaacgctgacgcgtttcccacttttccaccgccgctacggctaccactaacttctcacccggctctgcaaaggagagaggacaggacgaaagaacagtcaaacggcgtgccggaaaacctgcctacgctaaagagtcctaagtgaccgcaggacttatcaggaccggcacgcgcggatcatcatcgtgcgcccggagaacattctccaactagaggccggatacatttacgcagactgtcacttcgcccaactaatctccccttgcagtcgagcggcggaccataca

SEQ ID NO: 7579 - DNA, 1168 bp, unidentified
  source 1..1168: mol_type = unassigned DNA; note = element_bc0b408
  misc_feature 1..2: note = core
  misc_feature 3..214: note = LE
  misc_feature 215..1159: note = CDS
  misc_feature 1160..1168: note = RE
  misc_feature 3..190: note = bridgeRNA
cttgtatgtcctaaggtaggcctgtcggggtggagggacttaactcgcttctgcaagccagacggtaggagatttccccactctcgcgttcaccacaagcgccgataaaggaatccatcggcttgagcaccacctcaagaccgaccatatctacaagcctgcgccaaacgtgagtccccgacaggtcgttttatcttgtctgcaggagcgtctcatgacaatacaaacccccatcatcggcatcgatgtcgccaaggaaaacctgagcctgtatcgcctcgatacgcagcaaagcgctacgttggccaacgatcgacgcgcgatcgtggcctggttgaaaacattgcccgcagactgtgccgtggccatcgaggccaccagcacttaccacgtcctgctggcggatctggcttaccaatgtgggcacaggatctatgtcatcgatggctaccgcctgagcaattaccgcaaggggatcggtggccgcgccaaaaccgaccagagcgatgcccgtttgctggcgcgttacctggcccatgagcagaaccagttgcatccctggaaccccgcctgcaaggcttatcggcgcctgcaactgctgctgcgccggcgcgccacgctggtccgcagcgccaccgccttgcgcctgagttttgctcaagaccggcagatggcccgggagctgaaaccggtactggagcgcatcaaacgcctggaacggcggcttaacgagcaagtgcacaaggcgttgcaggaggcgggcctggctgagcaggccaagcgttgccaggcgatcgaaggcatcggcccgctcaccgccgcggccctcaacctggcgttcctgcgaggatctttccgcaacagcgatgcgttcatcgccttcctgggcctggatgtgcgggtcaaggaatccgggcgccacagcggtcggcgcaaactgagcaagcaaggcgactcggagatccgtcgcctgctccacaacgccgccatggcggcaagcaggaccaccgcctggcaacagcgttaccagcaatacctgcaacgcggcctgaaacgaacagaagcgctggtcatcctcgcccgcaagttggcccgtatcgctttcgccctgatgaagacccaacaaccgtatcgaccggcggttgatacggttgggtagacatagaat

SEQ ID NO: 7580 - DNA, 1365 bp, unidentified
  source 1..1365: mol_type = unassigned DNA; note = element_bc0f4e6
  misc_feature 1..2: note = core
  misc_feature 3..78: note = LE
  misc_feature 79..1104: note = CDS
  misc_feature 1105..1365: note = RE
  misc_feature 1080..1353: note = bridgeRNA
tgatgaggtggacgccccccaacggccccgatgtggcacagtggaggtgttgatgaacaccacttgagggaggcgcccatgggagaagttagcacgattgggatggatctggcgaagagcgtgttccaggttcacggagccgatgcatccggcgcggttctgttccgcaagaagctgcggcggcaccaagttctcactttctttgccggccagccgccgtgcacggtggcgatggaggcctgcggcagcgcgcaccactgggcccgcgagatcggcaagcttggtcatacggtccggctgattccgcccgcttacgtgaagccgttcgtcaagcgccagaagaacgatgcggccgatgctgaggcgatctgcgaggcagcccagcgtccgaccatgcgtttcgtggtgcccaaaagcgagcaggcgcaagctgccgctgtcgtgttccgggcgcgcgatctcctcgtgaagcagagaacccagatcatcaatgccctgcggggacatctgaccgagttcggcatcgtggtggcgaaaggcccggctcacgttcctcaactggtacgggctgtcgaggacgggggcgagccgatcccggagctcgcccgaccgatccttcaaggcctgatcgaaatgctgcaggcgctggatgacaggattgctgggctcgaccgcgagattgctcagcgggccaaggaggatgagactgcgcggcgactgatgaccattcccggagtgggacccgtcactgccaccgccctggcggcactcgcaccaccagctgagaccttcaagcgcgggcgggactttgccgcctgggtcgggctcacgcccttgcagcattccacgggcggcaagcagaagctcggcgccacctcgaagatgggcgagcggacgctgcgccgcttgctgatcctcggtgccagcggcgtcttacgttgggcggcccgcaacggggcccccgcagggtcgtggatcgcgcggatggtgtcgcgcaagccgccgatgctggttcgggtcgcgttggctaacaagatggctcgcgttatctgggctttgatggccaaaggcgggatctaccgagctccggccgcgagcgtgtaagcgctggcggctgtggggctgttggagcgtaggaaagtcgaaggagagggatggcgcaacggtcgatgagacgggatcaggaaaaccagtgtgcaacaacgcgcctcgagcgcgccgctttgaattggacctgatccgcgaacttcatccgggcccgcggcatgtgaatggccgcagatgaggccgtacacatggcagcactcgccgacgcgctctaccactccagaagattcttcttgcgtcacaaggggcgtccacaca

SEQ ID NO: 7581 - DNA, 1437 bp, unidentified
  source 1..1437: mol_type = unassigned DNA; note = element_bc12890
  misc_feature 1..2: note = core
  misc_feature 3..123: note = LE
  misc_feature 124..1020: note = CDS
  misc_feature 1021..1437: note = RE
  misc_feature 1191..1391: note = bridgeRNA
agatgggataatcggccggcgaatttgtagatagctgaagatttggggtgctgcgcttcaggctgatggtgaaacgaggtcaccgtggttacgggcctcaagcatcagaaggagaagcgcagcatggactattttgctggattagacgtttcggtcaaggagaccagcatctgcattgtggatgacacgggcaggattgttcgggaagtgaaggtagcgagcgagccggacgctttgctgccggtgctgaggaaccccgcctttcacttcaagcggatcgggctggaagccgggccgctgtcgcaatggctgttcagcactcttgcggaaacgggcttaccggtgatctgcgttgagacgcgacatatgagggcggtgctgcaggcgcagatcaacaagacggaccgcaacgatgcgcgcggtatcgcgcggatgatgcgggtcggactttatcgtccggtgcatgtgaagacgttgcgcagccagaaactgcggatgctgctgacgcatcgcaaactgcttcagccgaaagccatcgccatcgagaacgacctgcgcggtactttgcgcaacttcggcctcaaggtgggcatggtggggacggtgaagttcgaggcacgcatcaaaaagttggtggagaacctgcccgatctggctgtgctggtcgaaccgctgctcattgtccggcgggcgctgcgcgaacagctcggcatcctgcatggccgcctgctggccatcgtccgggacgatgaggtgtgccggcgtctgatgacgatccctggcgtcggcccggtggttgcgctgacctatcgcgcgaccgttgacgtgcctgcccgcttcaagaactccaaggcggtcggggcggtgttcgggctgacgccttccaagtatcaatcgggtgagatcaaccgaaccggtgcaatatcacggtgcggagacgagatgatgcgggtgatgctctacgaagccgcccagatcatgctggtgcgttcgacgaaatggtcctggctcaaggcttgagcgatgaagatcgccaggcaccgcgggatgaagaaagcgatcgtggcgctggcgcgtcggctggccgtgatcatgcaccgcatatgggttgacggcaccgagttccgctggacccgagaggttgcagcagcatgaaggttatccagaatccattgcgataggaggatacttgagctccaccgagtggtggaatgatgtcccttgcgggacgctggatgaggtgagttcgtatgtctgcttggatctaccgttgcttgacggcaaggccgaccaaaagattgttccacctcgtcttcgaatcccatgatggaagggttttggtgccgattccgaagagaagcacgagcccgtgagcgacatcgacactgtcatggtggatagtctgaaagcgcttgacccggaccggccgattagaga

SEQ ID NO: 7582 - DNA, 1409 bp, unidentified
  source 1..1409: mol_type = unassigned DNA; note = element_bc4003c
  misc_feature 1..3: note = core
  misc_feature 4..95: note = LE
  misc_feature 96..1130: note = CDS
  misc_feature 1131..1409: note = RE
aagatgggatgaagcggctggccgccaccgcgcgtggtggccgaagccccacagtggtgcacgcggtcgtgtgccgcaaaaggtggaggccagccatggagcatcttggcatcgacgtacacaaggtggaaagccagatctgcatcctgacggagagcgggaaggtggtggagcggcggatccggacgcagcgggagcggttcgccgcggtgctgggagagaggccgcgggcgaggatcttgatcgaggcgtcgaccgagagcgagtgggtggcgcgttgcctggaggaactgggccacgaggtggtggtggcggacccgaacttcgccgccatgtacgcaacgcggagccgcaaggtgaagaccgacctgcgcgacgcgcggacgctggccgaggcgtgcaatctgggagcgtatcgcgcggcgcatcggacgtctgaccgacagcggcacgtgcggacgcagctctcggtgcgggaggcgctggtgcagacgagagcgcgctacatctcgctgatcggtgccctgctgcggcgcgagggcctgcgcgtcgcgagcgggagcgcggcgagttttgtcaggcgcgttgcaaaactcgcgctgcccgggcaattgaagtcagagatcgcgccgctgctggcggtgtttgtgtcggtcgatcggcagctcgcctggatcgacacccgcctcgagcatctcgcgcggaccgacgagaccgtagagcggctgtgcaccgcgcccagcgtcggtccggtcaccgccgcggccttttcctcgaccgtcgacgaccctcgccgcttcaagagcgcgcaccaggtggaggcctatctcgggctcactccgagcgaatggagctccggggagaagcaaagcaaggggcacatcaccaaggccggcaacaaccggatgcgaaaactgctggtgcaggtcgcggtctcgatcctgcgcctgcgcagcccgcgaaccgaggcgctgcggaaatgggccactggcatcgcggtgcggcgcgggaagaagatcgccatcgtggccctggcgcggaggatggccggagtgctttttgcgatgatgcgcgaccgcacctgctacttgcagccggcattactcgcaccggcggctcaagtcgcctgactcgacttacggaccatcagtggtcaccggcaacgggactcagcgcagggaatctctggaggatacgaaagcgggtgagcgcgaatcaaagtccttggcctccgtcgagaaccgcgccaaagagagcgcccccgcccatcgaaccccaccatgcgccggtgagcgagcctcgccaccgagagcgcggacagagggtgaacaacctcgcggagaaccgcagtaccgagtccgaacctggaaggagtcaaccggggcttgacctgaagagccgcttcacag

SEQ ID NO: 7583 - DNA, 1742 bp, unidentified
  source 1..1742: mol_type = unassigned DNA; note = element_bc406f2
  misc_feature 1..2: note = core
  misc_feature 3..352: note = LE
  misc_feature 353..1591: note = CDS
  misc_feature 1592..1742: note = RE
  misc_feature 51..317: note = bridgeRNA
ctcgtattatataaattaaatcagtgataatgattattcttttagtttgtttattcgatcatcagatgctagtctctaattgtcattgaccttggtcaattggtataggttgtttccttctgtagctttgactacttttttagtctgccgcccaagcagttttactaatgacttactcacatgctgtatcgattctggctattactgattcagagcagattcagtcgcagctttttagcttgaacctatgaatacttatattttgcgagattgtcttagaatctgtaattagggactaacatgtgatgatcgatctatgaccaaatatttgctagaaaggaggccattctcaatgaaactttttatcggaattgacgttagttcaaaagatcttcaagtcgctattactgactcagaaaattatcaaaaacctttacttaaccaatctttttctaatgacctgattggtgctaatgaggtcaaaaagataattcttcaacttgctaaacagaacagctatgacaaagtaattatcggcatggaagccacttcaatctatagctttcaccctgcttatttctttgccaatgacgaagatttacaaaaaattaatcttgaaactgatgtcattaatcctaaaaacactaaacgatttcatgacgtttacgaagaaaataagaatgatcctactgatgcctattacatcgctgaatacttacgctttggtaaataccatgtcactattgctcggcaagaggaatacttagctttacagcgtttaactagagctagatatgaaatcacatcttcgctcactagagctaagcagcacttcattgaaactctttattatcgtgtaaacaaactagttaccgttgacaaagacaatattaaaacttctatctttggcgcaacgatgctgtcaattgttactgatagtaaaaccatcgatgaaatcgctgaaatgccaatcgaggatctaattgactaccttcaaaccaaaggacgtggccgcttctctgatccagagactttagctaaagcgatcagaaaagccgttagaggatcatatcgcttaggtaaagtcatgaaagactcgattgatgccgtattatctgtttactatgccgaaattaaaactaatcagaaattgattaagaacttagataaagcaattacagatatcgtccaaacgcttcctgaagagagaatactacaatctattccaggaattgggtcagtttattccgctggtattatcgctgaaatcggcagtattgatcgctttgacactgaagcacagctagctaaatacgctggtctagcttggcgtcaaaagcaatctagtaattttgatagcgaacacaaaccgatgactaaaaacggaaatcattatctaagatattatttggttgaagctgccaacctgattagacaaagagatcccgtttttcggaagtactatcaaaagaaatacgatgaagctttctattctccgcataaacgcgcttgcgttctttgtgcaagaaaattaaccaggaccattttcactctgctcaaaaatggtcaaatctatcaaacaccgaggtgattaattggtctaaaacatttttggaggagtaaataatagttgttaaaaaatcccttgaaatagggcttagtttcatgcacgcaaattttggttttaaaacaaactaattaaaaataaaatttaacttttacattgacttattaccacatga

SEQ ID NO: 7584 - DNA, 1316 bp, unidentified
  source 1..1316: mol_type = unassigned DNA; note = element_bc40741
  misc_feature 1..2: note = core
  misc_feature 3..188: note = LE
  misc_feature 189..1151: note = CDS
  misc_feature 1152..1316: note = RE
  misc_feature 28..201: note = bridgeRNA
cttgtgtccggaaaatctgtcagaatgtgcgaacgggcggttgcggaccaaccgcccgttgctggaactgagcccgttgcgcccaaaagcgaccgagcttgtaacagagcgagggacagctccggtgtcttcctcaacccgaacagttgcaagggcttcgagcccgaaccgagcaaggaagggagtggatgatggcacaaaatgatctcgttgtcgtgggtatcgatgtcgccaaggacaaggtggatgcatgcattcgtgcgttgggattgcggcaaaccttcccgagcacaatccaggggcaccgcaagctggtggcctggcttcgcaagcaccaggtgaacaaggcggtgatggaggcgagtggcggctatgagcgggcctgggccaaggtgctgcgcgaagccggcctcgaggttcggatcgtcgatcccaagcgggtccgcagcttcgcgctgtcggccggacggctggccaagaacgatacgatcgacgccgagatgatcgcctggttcgccgagacattcagcgatgcgccgggccagaaacatgatgcggcccatgaggagctgcaggcactcgtgaaggcgcgcctaagcctgattgatcttaggatgcgcttggtaagccaaagcgaacatgctgcgccgggattggttcagaaagcgcatgcccacatcttgaagagcctggccagcgagattgccaagctcgaggctgccatctgcgccaaaatcaagtccttgccggattttgccgaacgcgccgagatcatcgagagtgtgccggggttcgccgagacgagctcggcaaacctcgttgcagggatgccggagctcggccaggtgagcgacgagatcgctgcggccttgatcggcgtcgctccctatgacgacgacagcggaaagcgccgcggcgagcgccacatcaagggtggccgccgctgggtccgtaacgccatctacatgccctgtgttggcgcagccacgctgaacaatcccgtcctgaaggcctactatcagcgcctaattgccaaaggaaaagagccgaaggttgccatcatcgcctgcatgcgcaagctgatcgtcatcctcaacaccatgatcgcacgacgccagaaatgggatcccagccgctatgcgctgagctgagctgagctgagcgagtgcgcccaccgcgctcggtcctcgaccgagcgcttgcaaagccaacagaccggcgagcggacggggtcaaggccgtcagccgcgcacgcgggggcgcgccagcgccagccttgaggccggacgttcaccggtctacttccagcacagttg

SEQ ID NO: 7585 - DNA, 1314 bp, unidentified
  source 1..1314: mol_type = unassigned DNA; note = element_bc4ce60
  misc_feature 1: note = core
  misc_feature 2..69: note = LE
  misc_feature 70..1086: note = CDS
  misc_feature 1087..1314: note = RE
  misc_feature 1094..1308: note = bridgeRNA
taatgggatggtccgccgcctttgacttccttcagtcggaagtattaacggtgagcaaggaggcgtcccatgaagctgcatgcgatcggcatcgatttaggcaagacggtttttcacgttgttggactgaaccaggcctgggaggttcaggtgcggaagaagttctcgcgcactcaactacttcgtttcaccgcgaacgcgcaagttcacctgcttgggatggaagcctgtgcgggctctcatttcctcgggaaggctttgcgcgagcagggtcatgaagcacgcctcatgccggcacagtatataaagccgttcgtgaagaccaacaagagcgacttcatcgacgccgaggcgattgccgaagcagtgaaccggccgtcgatgcgctttgttccgatcaagaccgacgagcagttggatatgcagtctctgcatcgggtgcgggaacgctggatcatgcggcgtacgtctgtggtgaaccagatccggggtatgttgctggagaggggtatcacggtgcggacaggaagatgccatctggatgcggccctcccgaacatcctggaggatggctcgacgtcgctttcaggaacccttcgctttctgctgctcgaactgaagcgagaactggaacagctggccgaacacatcgaacaagccgagatactaattcagcgagctgcacagcagagcgaggcttgtaagcggcttgatgcaatcccggggattggtccactcaccgccactgctctcatcgccgcgatcggaaacggtggagcattccgcaagggacgcgagttcgcggcctgggtggggctggttccccgcgaacactccaccggaggcaagcagaagttgctcggcatcagcaagcgcggcaacagttatctgcgaaaactgttcgttcagggcgcacgcgcggttctgagatacagagacaagcaatgctcaggcttgaagcactggctggcagagctgtcctcgcgtagccactacaacatcgtcggcgtggcgctggccaacaaactggcacgcatggcatgggccgtactggccagcgcaaaccagcgacgactggggatttagaacactgccaggtctgctggcgaaccatgagatggcacaaacggtcgaacccggcgctccccaaacccgaactcggaagaagcccttcgagactgcctaactaatggggaacggagcagcgcattccatcctggcccggagcatcagctccaacaaaggccgaatacatttgcgcagaccaacccgccactctcatttttcgcttgcgacaaggcggcggaccataca

SEQ ID NO: 7586 - DNA, 1383 bp, unidentified
  source 1..1383: mol_type = unassigned DNA; note = element_bc5f268
  misc_feature 1..2: note = core
  misc_feature 3..83: note = LE
  misc_feature 84..1115: note = CDS
  misc_feature 1116..1383: note = RE
  misc_feature 1140..1371: note = bridgeRNA
tgatgctgtggacggctcccgccaccggcatctaggtgccaaattgcggttgttgtttaggaaccgccaaaggggagccgtccatgaacgaagttaccacgatcggacttgatctcgcgaagaacgtgtttcaggtccacggcattgatgcatcaggccaagttgtcgtgcgccgacagctgagacgtagtcaggttctgtcgttcttcgagagacaacatccctgtctcgtgggcattgaagcctgtgccacctcgcaccactgggcacgggagatcgcgaagctcggacatgacgtccggctgatgcctgccagatatgtgaagccctacgtgaagcggaacaagaacgatgcggcggatgccgaggcgatctgcgaggcggtgatgcggccgaccatgcgctttgttgcggtcaagacggaagaacagcagtcggtgctgatgctgcatcggacccggcagctgttcgtgcgccagcgcacgaccctgataaatgcgatccgagctcacatggccgagtttggcattgtcgccggtgtcggccgtaacggcgtggagaggttgctccggctcatcgacgaagggtccgacgagagagtacctcctgtagcgcgggaatgtctgcaagcgttgcgggcccagctcatgctggtcaagcggcagatcctcgaggctgaccggcgcatccttgcctggcaccgctctaatgagctgagccgccgccttgagacgatccctggcgttggcccgctgatcgcgacggcgctggttgccagcatccccgatccccatgccttcggatcggcacgtgatgtaccggcatggattgggcttgtgcccaaacagaactcgacaggcggcaaggagcggctgggaagcatctccaaggcgggcaaccgctatctgcgctcgctgctcgtggtcggggccttatcggtgatccgacgcgccaagcaggtcggctatacccggcggccatggctcgccgaactgatggctcgccggccagtcaaggttgccgcgatcgccttggccaacaagatcgcccgtgtcgcctgggccctgatggtcagcggcacacgctacagggagcctgttccgcaggcagtttgagagatgcgcgctttacgcgcgccaacgaggttggaaagggcaatgcgaggataatgcacccagccggtcgatccggagatcgggacaccccactcgtgccacggcagcttttgactgcgtgctattgaccgggacccgatctcgcggagagcattatggccagcggccatgggtaagcgccgcatcgaaaggccggacacatggcagcaccgaccagccgtgcatcaccccctcgaaaagctcttgccaactgggagccgtccacaca

SEQ ID NO: 7587 - DNA, 1561 bp, unidentified
  source 1..1561: mol_type = unassigned DNA; note = element_bc6242e
  misc_feature 1..2: note = core
  misc_feature 3..247: note = LE
  misc_feature 248..1423: note = CDS
  misc_feature 1424..1561: note = RE
  misc_feature 3..223: note = bridgeRNA
ctcgtattatattgtcatagcccctctttaccttttctataggtttcggctatgctgtttgggatactgtggattggttcttttctcctaccacctgatggtttcaaaaaggctccaaccacagctccctgtttcactgttaattagttagatatcgcatgacgatttatctagaacgaggttacagaacatcgagtcctgtgggttccagacagtatcaaaaatattattcaaaggagattttattatgatctacgtaggcatcgatgtggctaaggacaagcatgattgctgcatcaccaattcggatggagagatcctcttcgccccatttaccattcctaacaaccggacaggctttctggacttatggtctaaaatccagtccgcaggcggatccccggagaatgtaaaagcaggactggaagctaccggccattactcttacaacatcctcgggttcctggttgataaaggtctccccaccttcgtcatcaatccgctccacacaaatctttacaggaagagtctcagcctccgtcaaacaaaaacggataaggttgactccaaaaccattactatgatgctgatgtcaggcattcacttccagtcctactctcctgcatcatatcacaatgaggaattaaaatcattaacccgttaccgctttgagaaagtccgcgaacgtgcaaggctgaaaacctccattgcccgtctgataaatatcctttttccggagctggagaaactggttcctacccttcatataaacacggtctaccagctgttgtgtgaatacccgggtgcttcctttattgcagatgtacatctcaccaggctatcaaacctaataaaggatgcttcccatagccgctatggcaaggataaagcgattgaaatccgcgaggcggcccggaactctgtaggttctgtcatgcaggtaaagtccctggagctgacccataccatccggctgatccgggagcttgataccgaaatcaacaccatcgaggaaatgatcggttccattatggacaagaaaaactctccgatcacttcgattcccggaatcaacatccgcatgggagccatgatcctggctgagatcggggatatcagccgtttcagtaacccggataagttattggcttatgctgggctgtcgccctccacctaccaatcagggaactttgaatctacccactcccacatggaaaaacgaggctcaaaatatcttcgttatgccttgttcaatgccacaaagtatgtatgcctgtggaatccggaattcaagtcctatctggcaaagaaacgggcagaaggcaaacactataatgttgcaatttcccatgctgcaaagaagcttacacggctgatctacacaatggaaaaatccggtaagacttataccgcaaagaactgatcatagttcttattctcccatagttttttttgagggtatctttgatactctgtttgtcatgcaattttcaaggttcttatatgtaaaccgcatttctgcgaatttactgtaatttagggttgacttttaatagttagt

SEQ ID NO: 7588 - DNA, 1554 bp, unidentified
  source 1..1554: mol_type = unassigned DNA; note = element_bc6998f
  misc_feature 1..4: note = core
  misc_feature 5..284: note = LE
  misc_feature 285..1448: note = CDS
  misc_feature 1449..1554: note = RE
  misc_feature 37..265: note = bridgeRNA
tcacgtataataaaaaccatctcgaaaggggtggtttttatcatatctccttccttcataagattgtaccgcaggagtagctacctgcgttataatcagtacaagcactgtggatttgtatctgtttttttacagcatgactggttcgaggtgactcaaaccacagtgacttgtctgaattggtaatcagttagttaacgctttgacgtttcatttttgcgtgaatccatggacaagttctctgtggcaaacagcagtgctgaaatttcaaaaggaggaaaccaatgtactttgtaggaatcgacatttcaaaattcaagcatgactgcgccatcatcgacgaacttggcgatgtcatcacgtcctcgtggtctttcaataacgactgcgagggtttttcgttattcagggaacttttgaatgcccttgacggagaaaagaaaatagggtttgaatctaccggtcattatgggcataacctaaagctgttccttgaaaccaacaacttctcgttcatggagatcaatccacttctgatttctaaatttgttcgcagcaaatccctcagaaaaacaaagactgactctctggacgcgcaatccatagcccaatatcttatgacggcagagtacaaaccctatccgccgtcattctatcacatggatcagctcaagtcactaaccagatttcgggattctttggttcggcagcattccagacagcttgtagaactcactaacattctggataaggtatttccggagtttaagcccttctttgatggacggctctccgctaccgcactctacatactagcccactaccaatctccggagaagatcgcaaacatgaatgctaagtcctatgaagcacttcggaaaaagtcccgtggaaaattctctatggtgaagtttgcgcagctaaaaacattggcaaaaaacacggtaggaagatccgacgaatatctccttaagcaaatggaaattaccattgatattgagaaccagctggatgctaaaattgatgaaatagaagctcagatttctgagtgcattcatggattgaatccgccagtcctcaccattccaggtattggcgagttgaccgcagccgttattctctctgagtacggtgacattaacaaatttgagagtccagctcagatgctttctttcgctggcctggaacctggatattaccagtccggtcaggcagagtacgacggccacatggtcaaacatggttcctcacatttacgctacgccctcatgaacgcctgcctgccgctgattacttacgagccggtattcgcagaatactacgcaaagaagcgggcagagggcaagtctcaccgtgtggcgctatcccatgttgcaaagaaacttttgcgtgtcatctacaccctgcaaaccaagaacatcccctacgatccaaccttaatccggtaattactacagtctcattttttcggcactcgaaagagggcttactttagtgcgcccttttttcagcagaatatttttttacctttagggcttgacttttaatagttag

SEQ ID NO: 7589 - DNA, 1623 bp, unidentified
  source 1..1623: mol_type = unassigned DNA; note = element_bc69bb4
  misc_feature 1..2: note = core
  misc_feature 3..282: note = LE
  misc_feature 283..1503: note = CDS
  misc_feature 1504..1623: note = RE
  misc_feature 13..308: note = bridgeRNA
ctactacaatatatttatggttaatctcccttacagccagtaaggaattatccatcttgttgcttaagctgttagaatggtaagagcaatcggtatagcggtctctttcctgggcttcgcgcccgctcaatagtctgctaaccagctcttcattcacagcgttcgttttatgcaggttgaactgccttccgggtatgttcgcgtcacaccacagtagatagaatgggcaatgagtaaaactggtattgaccaattgcaatctgatagaaggagtgacattttatgaacatgtatgctgtaggtattgatgtctccaaacgtaaaagcactgtagctattctccagcccggtgggaaggttgttgtgagaccttttgatgtcccgcacttgtcccctcacttccgatcccttaagaggatgatcgggaatctggatggcgaggcccgtattgtcatggagtgcaccggccgctatcatgagccggtagcccgtgcactttcccaggccggttttttcgtaagtgctgtaaatcctcagatcatccacaactttcagggacaggacaatcccctccgtaaagtcaagacagatcagtcggactctgtgaagcttgcccgttatactcttgacaactgggcagatctgaaacaatatagtcttatggatgaattacgttcccaactcaagactatgaaccgccagtttgatttttacatgaaacacaaaattgccatgaagaataacctgatcggtctcatcgatctgacctatcctggtgccaacgcctactttgacagccctgcccgtgaggacggcagccagaaatgggtggatttcctcgatacctactggcacgtggattgtgtccgcaggatgtcctttcatgcttttactgaccactatcagaaatggtgtgcccgtaagaagtacaacttcagcttgacaaaagcagacgaaatctacggaaaggcaaaggagctcattcccgtacttcccaaggacaatttcaccaaacagatcatcaaacaggcgatccagcaactaaactctgtatcacagactgtggaacagctgcgatccctcatgaacgaaactgcctctaaactgccggaatatccggtcgtcatggcaatgaaaggggtaggaccgtccctcggaccccagcttatggctgagatcggagatgtgacacggtttacccacagaagtgcgatcacagcatttgccggggtagatcccggcgtgaatgcgtccggggagtattcacagaaaagtgtccatgcctcgaaacatggttcaccagtgctgcggaaaaccctgttccagatcatggatacactgatcaagaccaagcccgatgatgccgtctatcagttcatggacaagaaacgcgcacagggaaaaccctattacgtctacatgaccgcaggagctaataaatttttacgtatttactatggaagggtgaaggaatatctctctacgcttcctacatctgattaaacacccaaacatcctttttcaggccggcataaactggcggcttttttgtgatacccatttttcaacctgtataattttttcaaagttctttaaaatttagcttgactttttatttgcagg

SEQ ID NO: 7590 - DNA, 1374 bp, unidentified
  source 1..1374: mol_type = unassigned DNA; note = element_bc6a81a
  misc_feature 1..2: note = core
  misc_feature 3..213: note = LE
  misc_feature 214..1185: note = CDS
  misc_feature 1186..1374: note = RE
  misc_feature 41..219: note = bridgeRNA
cttgtattagcgcgccgggttaggatggccacgttccgtgaggaatggcccagcccgggtggccgcccgagctgggccgccgatcgatcggatcgatgcccaccgaagccctgaagggctgcgtttcgtagcaagatcgcggtcggcacttcagcgggacccgcatggttgaacgaacttcaggttcgcattcacaagggagggtcgaggaagatggccaagcatatcatgatctgtgccgggatcgataccggcaaagacaagctcgacgtggcggtcgacggcagctcggagcgattgcaggtcgacaatacggtagaaggccgccaggagctggtggagtggctgaagggccacaaggtcaagcggatagggatcgaggcaagcggaggctatgagcgggctgtcgtcgctgagctgcgacgcaagcggttcgtcgtcgtcctgtttcagcccaagcaggtccgtgcctatgccacgttccatcagctgctggccaagaacgatacgatcgacgcggcgctgatcgcgatgtgcactgctgcggtcaaaacgatccatcccgctccggatccgcgtctgcagccctttgccgagcatctgacgatgatcgaccagatcacggaggacatcgcaagactgaagaaccggcttgagagttgccgcgacacgcggattcaaggggtttggaaggcgcagatcgcgctcctgaccaagtccaaacgagctgaactcaaagcgctgctggcgacgatccgcaagcaccctgatctggccgcacggctcgatctgatctatagcgtcgccggctgcggcctgccgaccgcggttgccgtcctggtcaggatgcccgaggtcggcaacatcacgcgtgggcccgctgcagctctcggcgggctggcgccttacgacgacgacagcggcaatcgcgccggcgcccgtcacatcgagggtggccgcgaacgcctgcgccgggcgctctacaccgcggcccttgcggcatccttccgctggaatccgcagctcaaggctctgtacgcccgcctgatcgccgccggcaaaggccacaaatgcgcgctcatcgcctgcgccagaaagctgctcgtcacgatcaacgccgtcgtcgcccgcggaactccctgggtggcagagctgcctcaactcgccaagcggcccgccgcctgacccgtttctttgttcgactaggcgaccgtttcttcgtcccgacctgccgcaacaaagacgccgcgcgcggcggccgtcaaggctggccgtcgctctgctcccgccttacatcagctgctgccaggccacgccttgatgggcgcaagcgcggcgtcaccatcaaggccatcgggggcgacttaatggttg

SEQ ID NO: 7591 - DNA, 1466 bp, unidentified
  source 1..1466: mol_type = unassigned DNA; note = element_bc70432
  misc_feature 1..2: note = core
  misc_feature 3..166: note = LE
  misc_feature 167..1210: note = CDS
  misc_feature 1211..1466: note = RE
  misc_feature 1234..1465: note = bridgeRNA
agaatgaaatggacgcctcccacctcagctggcgagagagtagcaaggaaaaagcaggaggaagcgagggggtagtggaatggtggaccctcgcgggccaacggcgtcaaaagcgcctaaattgaaagtctcaagagctttcatggctaaccggaggattcacatcatgaatgttactaccaaagcggtcgtcggtgtcgacacggccaaaagtgtgtttcaggtgtacaccgtcgagcaggagacaggtgaagtgatcaacaagcccgtcaagcgtgcgcagtttttgcagtggtttgccaaccgcacgccctgcctggttggcatggaagcgtgcggtggttcgcaacactgggcacgcgagcttcggaagctgggccacgaagtgaagctgatgagcgggaagatggtcaaggctttcgtctgcgggaacaagaacgatgccgccgatgcgcgtgcgatctacatggccgcgaagcagccagaggtaagaagcgtggcagtcaagagcgaaggccagcaggcagtactggcaatgcaccggattcgccaacagttagtgaaaatacgtactgctcagatcaaccaactgcgtggcgtgcttgccgagtacagtgaggtatttgggttgggtcgaaaagccttcgatactggcctgaaggccgcgctcgagcggttggccgaacgcttgccggtgctgctaatcgacctgctccgcgatcaatggaatgaactggcccggctagacgagcgtatcgcccgtatcgaggcggcgctgttggcatggctgcgccaggaccatgctgccagggcgatctccgccattcccggcgtcggccttttgaccgccacggcggcggtggctgcgatgggggacgcgaaggcgttccggtctggccgagaatttgcggcctgggtcggactagtgccgggccagaccggtagcggagggaaagtacggctactgggcataagtaagcgaggcgatacctacctacgtaccttgctgatccatggtgcccgagcggtactgcatgccagggaaaccggcccgtggctgaagcagctgagccagcggcgaccaccgaacgtggtaatcgttgcactggccaacaagattgcgcgaacgatctgggcggtactggcccatgagcgtgcgtatgccaaggatcatgtcagtctgcggccgcatgcggtagcagcgacataaaacccagccaacttgcgaaagaattgcacgtcaccagttgcgttaggtattaacagcgatgacagacaggttagactgggacccaccaagcctgaatcatttctagggccgaaagcccgttcgaagaatgaggcgtgagtcagcggatttcatcggggccagcggcgtttgccgggaacaaggccggatatagaactgcgactttcctcgtctgaacaaagctgaaaaataccttgcaaaagggaggcgtccatat

SEQ ID NO: 7592 - DNA, 1566 bp, unidentified
  source 1..1566: mol_type = unassigned DNA; note = element_bc7cad5
  misc_feature 1..2: note = core
  misc_feature 3..531: note = LE
  misc_feature 532..1434: note = CDS
  misc_feature 1435..1566: note = RE
  misc_feature 3..242: note = bridgeRNA
cttgtatgatgtttatagaagcaaaaacacctactttcctttcttttaatatcgtggttcaatacaactcagataccgtggacttttgattttttcctgtagcttgactactcaacttggagtgtattgccgctacctttatctgaattgtttataactggatgtgccggagttctgctcctgagtacttatttcaatcaagtctacgatgataatcgatggtggatatcacggtatcagactttatgaaagggaggtacaacctcatgatgatttacataggcattgatattgccaaacttaaccactttgccgcagctctctctgctgacggcgaagtactcatcgagccgttcaaattcacaaatgactatgatggcttctatctgctgctctccaagctggatcctcttgatccgaacagcatcatcattggtcttgagtcaacggcacactacggtgacaaccttgttcgttttttgatcacaaggaactacaaagtgtgtgttgaaccccatcaggacttcgtacatgcgcaagaacaacgtgcgcaagacgaagactgacaaagtcgacacttttgtaattgccagaacactcatgatgcaggactccctaaggttttccaccttagaagatctggactacatcgagctcaaggaacttggcaggttccgacagaagaccatcaagcagcgtacccgcttaaaaatacagctgacttcctatgtggatcaggtcttcccggagctccagtatttctttaagtccggtctgcatcagaaagctgtctatgtcctcttaaaagaggcacctatgccgaaggacattgcttccatgcatatgactcatctctccaatctgctggtgaaaaactctcgggggcatttcacaaaacagatggcgagggaattacgagttctcgcacagaagtctgtcggcctgaacgacagctcattatctatccagataacccagacaatcgcacagattgagttattggattcacagttgtttgagacagagcttgaaatggcaaacatcgtcacctgtctgcactctgtcatcatgaccatccccggtatcggctttataaacggcgggatgatcctgggcaaagtcggtgacatccaccgtttctcaacgcccaataagctgcttgcatttgcagggctggatccggttgtttaccagtctgggaactttcaggctaagaggacccgaatgtccaaacggggacccaaagtcctccgttatgcgctcatgaatgcagctcacaatgttgtaaagaacaatgccactttcaaggcgtactacgatgccaagagagcggaaggccggtcacactacaatgcccttgggcactgcgccggcaagcttgtcagggtcatctggaagatgctcactgacaatgtagaatttaacctcgaataggaggtctgtataccaatatcgataggctttgaaaaatgcacctttagggagctttattaaagttacccttttttaccaccgataaagaaaagaaattttttgctaatttaggcttgacttttcatagctggt

SEQ ID NO: 7593 - DNA, 1329 bp, unidentified
  source 1..1329: mol_type = unassigned DNA; note = element_bc96ab8
  misc_feature 1..2: note = core
  misc_feature 3..188: note = LE
  misc_feature 189..1289: note = CDS
  misc_feature 1290..1329: note = RE
  misc_feature 27..198: note = bridgeRNA
cttgtatgatcaaatctaataaaaaatcttgccaaggaaatcaggtaagctgtaatagttcattgggaggccgtcccagcctgaggactggttgttaaccagagcctgtcgtgtagattggcccccgccctattcacccataccgtggagtatccgaggcttagagcctgcatacacaaggaaggtaggtgcatgcgcagggtcgggaaccagcgaacagtttactgtctttaacccactcctgccaaatcactatgacgccccatcccctcataaaaacagtccctgaatctcagccagcgttgtttgcaggcattgatgtcggcgccgaggaactcatcttggtgattcgcaagaacggcaagtctgttgatccccagaagttcgccaacccccctgccgatcgcgcccgcttggttaagaagctggtcaagttgccgggtctcattgtctgcctggaagccacgggtatttatcatttcgatttagccctcgccttgcatgatgccggggtgttactcagggtgattaatcccaaagcctcgcataactttgccaaggtgttgatgaaaaacagcaaaaccgatgcggttgatgccgataccctggccgaatatgcggcacgtatggactttgttgcctggactcgcccgaccaatgagaagctggctctgcgtagcttcgctcgccgcatcaatgcactcaccggtcagaaagcggccgccaaaaatcatctgcatgcgcttgccgcctcccaagaaacgcccaaagccgtgctgaaagatgccaaattggcgatcacccagttggagaaacgcatcgaccagatgacggcacaagccctgctcttgattgccaaacatcccgaactcaatcgggtgctaaccttgttaaccggcatcaaaggcattgccgaaaccagcgccattgcgctgatgggcgaactgctcttgctgccgcctgggctgtcccatcgggaatgggtgaagtttgcaggcctggatcccaaagcctttgattccggcaaaagcgtccataagaaaacgcggatgtcaaaggccggtaaccgccatatccgttcagccctgtatatgcctgccttgagcgccaaaacgcatgatgcgcatgtcagcgcctttttccagcatctcatcgcgaacggcaagaaaccattacaggcggtctgtgcggttatgcgtaaattgctccatgcgatccacggcatgttgaaaaacgatacaccttttgacaatacgcgtttttatgccattccggtcgcggctaattaggcaaaatcatcggtttattagttgacttttaacagagtat

SEQ ID NO: 7594 - DNA, 1604 bp, unidentified
  source 1..1604: mol_type = unassigned DNA; note = element_bc97e0d
  misc_feature 1..3: note = core
  misc_feature 4..263: note = LE
  misc_feature 264..1469: note = CDS
  misc_feature 1470..1604: note = RE
  misc_feature 13..283: note = bridgeRNA
tctattacaatataatttggttggaagcccagcatccggctgggcttctttccatctcgtgcctaagctacaataagaggagcaactggctgaccgccccctttcttggacttgcatgcccgtttatgagactgtcagccatcctcttgttgcagcgttcggtttaagcaggttgagccttgagttcgcgtcacccaatagattgaatcggcagcgagaaaaagatgggttccggttgcaaattttgtattggaggaatgaacgtgaactgtgtaggcattgatgtttccaaaggcaagagcatgattgccgtcatgcggcctttgggagagatggtgatcccgccctttgaggtgggacacactgatgctgagttgtgcgagttatccagacggctagggggcttggagggcgaaacccgcatagtgatggaggctacagggaactaccatttgccggttgccagcttcctttacgattccggtttttacgtctccgtggtaaatgccatgctggtacatggctacgggaacaacaatctgcggagggtaaagaccgacaagaaggacgcagtcaaactggccaactacggccttgaccactggctgacgctgcccaggtacatcccagaggacgaggtacggcttatgctgaaaaccacttaccggcaataccagcaatgcaccaaagtacagaccatgctcaaaaacaacttaatctccttgcttgacaccgctttcccggacgcaaaccgcttgtttaccagtcccaccagagcggacggtagcgagaagtgggtggatttcatttctaccttttggcattgtgagtgtgtttgcgggctgtccgaaaaggcatttacagccaaataccagaaatggtgtaagaggcatggctataacttcagccaggacaaggcgctggacatttacgcctctgcctgcgggcatttcagtgtcatgccaaagaacgatactacaaagattctggtggaacaggcggtatcccagctccaggccacttccgctgcgctggccgcgctcaggaatgaaatgcagtccctagcagcatcgctgccggagtaccccattgtgatggggatgttcggagttggccccgcactcggcccccagcttatggcggagattggcgacgtgcgccgcttccactccaaaaaggcgctggtggcttttgcgggtattgacgccccgccgtaccagtccggccagatggaaatccgcagccgcagtatctctaagcgtggctctgccgttctgcgcaggacactgtttctggtgatgagcgccattctccggtgttctcctgccgatgagccggtgtaccagtttatggacagaaaacgtaccgagggtaagccctaccgtgtttacatgatggcctccgccaacaagttcctgcgtatctactacgccactgtgaagcaatacctcgacagcctcgaagcctgatctctaccctaatctattcgtttcaggccagcgccagaatttttcaatggcggtggcttggtttttcatgccctttttgtggtccctaaaaaattgcgattcccctcaatttagttcttgacatttgttagcagg

SEQ ID NO: 7595 - DNA, 1366 bp, unidentified
  source 1..1366: mol_type = unassigned DNA; note = element_bc98d96
  misc_feature 1: note = core
  misc_feature 2..73: note = LE
  misc_feature 74..1099: note = CDS
  misc_feature 1100..1366: note = RE
  misc_feature 1142..1340: note = bridgeRNA
caatggtatggactcctcacctttggcctaaataggttaaggtgaagacgccaatctaaacggagcccataccatgaaaaatactaccactatcagtatcgacttagctaaaacagttttccaagtcgctttatttaataaatatggcgtattgaaatctaataataaaatgagccaatctaaaatggttcaatttattgctcaacaccccgaagctttaatttgtatggaggcttgcggaactgcccatttttggggacgacgatttcagaaaagtggtcatagagtcttactagtcccagctcatattgctgctaagtatcgtacaggtaataaaaatgacgctaatgatgcgctagctatttatgaggcaataaaacgacctaaaacgtattttgtacaggtaaaaaaccttgaccaacaagacttagccagcttattgaaattacgacaaggttatataaagcaacgaactcaaaccgttaatcgaataagaggtttggggttagagtatggtatcaagatccctaaaagtattgctaaagtacgtaaaaaccttccttactttcttgaagatgcagaaaatgagctaaccacatcaagccggtttatcttaagagatttattagatcaattgttgttactagatactcaggttgataatgcaacgaatgccttgcttacaagagctaaagaaattccagtttgtagtcgattgacggcattgccaggtgttgcttggataattgctagtgccttgtatgccaggttaggtgatgggtcagcttataaatgcggccgagatgccagtgctagcgtaggtttagtgccagctaattctgggacgggtggtaataataagttgcttggtattacgaagagaggcgatagaagcctacgttcattgcttgttcatggagcacgctcaattgttagtagaattaaagataaacaagatggtttgagttgttggataagagatcaactatcaaaaaatcacttaaataagacgacggttgccttggccaataagcttgtcagaatggcgtgggctattttgaaaagtggcgaagattatcgagcccctttagctcagtagtgtttgataaaccttgaaaaagtaactaagttaaccgagtataagcagtcgtaaaataatatgtaaagtgtatcaacgcacgcaaggcaaaacctgggaggaacaacggtagtaaaatacctcgttttcgttaaggagccttgtcagtggattaagccattaaggttcggggtagctccccatcagaaaccgaatatacgtgaacttgctacatacatttgaaattaattattataaacggcttgctatgcaagaggagtccatata

SEQ ID NO: 7596 - DNA, 1381 bp, unidentified
  source 1..1381: mol_type = unassigned DNA; note = element_bc9dda3
  misc_feature 1..2: note = core
  misc_feature 3..255: note = LE
  misc_feature 256..1305: note = CDS
  misc_feature 1306..1381: note = RE
  misc_feature 19..235: note = bridgeRNA
ctcctatgtttgtaaaagtattaaatctatttagtattttagatttgtattaaagtgaaaagagtgagagtacacagatcgctaaataactctagaagtatattgtagcggagaaatcacctcactctttttttatcttttagagtttgaacagaatgtaaggaatatcttttttgaagttatatccagaatatccaaccaggagaaaaaacgaggagaggtaatcactttatataatttaaaccttatataaaaatgaaaaaagtattaaaacaagtattaggagttgatgtagctcaaaaggaattagtagtaacattaggaagaatgtttgatgatttaactattgatttttatgcttataaagtattcaagaacaatacaaccagttttaaatctttattaaaatgggtagattctttaattgaaaagcgtgtagaaatgcaatttgtaatggaagctacaggagtttaccatcaaaaatttgcatattttttagaagaaaaaggttttaatttaagtattgttttgccaaataaaataagtaattacatgcgtacattagatacgaaaacagttacagataaaacagcatcacaagcaatttgtcgatttggtttggagcgtaaattagatccttggaaacgaccaaagaagatttttaaagaactgcaacaactcactagagaacgaagccaggtagtggatgaacgcgtaattgtaaagaatcaactacatgcagagaattctgaagcagaaccaaacaagagtagtttgagaagattaaaatcaagaattaaatttttgagtaatcaagaaaaagaaatcaaagtagaaataaaaaaaattgttgatagtgataataatttaaaaaaagaagtacaaaatatttgtacaattcctggtgtagcaatattaacagctgttatagttctcgcagaaacaaatgggtttgaattggttcgaaacaaaaaacaattaaccagttatgcaggattggatgtaaaactgaaacaatcaggaacatcggtaaacaaaaaggctagaatttcaaaacaaggaaatagaaatttgagaaaatcactacatctaccttcattgtcagctgttaaatataataaaacgcataaagaattatatgttagattagtagctaaaagtggtataaaaatgaaaggattaatcgctgttcaaagaaaattattagaattaatttacgttatctataaaaacaaagaaggatttattcaaaattatgagcaacaaaaaagagcaacgctattagaaatagaaactgccctttagaaactagctttaagccgttttgaaaaacaaaaatataaaaaaaatacggattttttattgtaagttaagacagaat

SEQ ID NO: 7597 - DNA, 1384 bp, unidentified
  source 1..1384: mol_type = unassigned DNA; note = element_bca3860
  misc_feature 1..3: note = core
  misc_feature 4..326: note = LE
  misc_feature 327..1109: note = CDS
  misc_feature 1110..1384: note = RE
  misc_feature 1080..1371: note = bridgeRNA
agatgggatggttgccgccctccccagacggcatcgcaatgtgccaaggtcgtggtgttcaacgccacgaaaaggagaggacggcaaatggaagatacaatgatcggggtggacctggcaaagaacgctttccagcttcacggcgcgacaatgacggggcatttgaaattccgtaagaagctgacgcggtcacggttccggcagttcatggcatgccagccgtctgctgtggttgtgatggaagcatgcggtagcgcgagctactgggcgcgggaaatggtcaagcttggccatgaggtgaaactgatccatatgtgcggccctttgtgaaaaggcagaaaaacgatgctgccgatgctgaggcaatcgtcgttgcggcacagcgccccgagatgcgttttgtccagccgaagtcggaagctcagcaagcctgcgctgtgctgttccgaacgcgggagcgccttctccatcagcgcaccgagcttgtgaatgctctgcgttcggtgctgtatgagtatggccatatcgttccgaaaggaatcgctcacattaagcggattgagagcatcctggaggcacccaacagtgacctgcccgagttggtacgcgaggaatgccgcgacctgattgagcagattgccgagaagacagctcggatcgaagccaagacgaagaaggccagaaccctgtccatggcgactgatacagcgcggcgactgcagacaatgccgggcgtcgggccacagaccgcgctggcgatcagcggctttgctcctccgatggagagcttcaaacgcggacgagattttgcggcctggcttggcctcgtgccacgccaatacacctccggtggcaaggagcgacttggacgtgtgtcgaaggccggacagactgatatccgatctttgttgatcattggcgcgatgtcacgcctgacagtgctggctcgcaaatcgatcgtcgagggatcatggctgggacggatgctgcgtcgcaagccgctcatgctggtcgcgatcgcgcttgcgaacaaaatggcgcgggcgatctgggggatgatgacgaagaaagaagattatcgagatccgacgtgtgtggtggcggcatgaagaatgcatgctacgcaaactagcgtcggtgaagggaggtgtaggaagtcgacgacctgaatgggcgcaatgatcgaatagatctgggttgggaaaaccagccgtcgttcgcgagcttgaaaagctcttgcagaagatttggacccgatccgcagatcaccataccggccagcggcttcttgaaaggccgcgaggaaaaggcctgagagaagaacgcactcgatcaccgaacatcaggttggaaagcttcttgcatcgagggcggcaaccagaga

SEQ ID NO: 7598 - DNA, 1572 bp, unidentified
  source 1..1572: mol_type = unassigned DNA; note = element_bcaf4f6
  misc_feature 1..2: note = core
  misc_feature 3..271: note = LE
  misc_feature 272..1441: note = CDS
  misc_feature 1442..1572: note = RE
  misc_feature 3..247: note = bridgeRNA
cttgtatgataattaggaagttaattatcacacgtttcctttcttttaatatcgtggttcaatacaattcagatactatggacttttgatgtttattctgtagcttgactactcaactggagtgtattgccgctacctttatctgaattgtttatcagctggatgttgccggagtgtttttcactcagagtacttatttctatcaagtctacgatgataatcgatggtggacatcatggtatcagactttatgaaagggaggtacaacctcatgaaaatttttgtaggcattgatattgccaaactcaaccatttcgccgctgcgatttcttcggacggtgaaatactcattgagccgttcaaattcacaaacgacgctgatggcttccaactgctggtctctaagctcgaatcattcgataagaacagcatcatcatcggtcttgagtcgacggcacactacggtgacaaccttgttcgataccttgttgctgagttctaccaagtgtgtgtgttgaaccccatcaaaacctgtcaaatgcgtaagaacaatgttcgtaaaacaaagacagataaggtcgacacatttgttattgctaaaactcttatgatgcaggatgacctaagatttattaccttctttgatctcgatatgatggatcttaaggccttggggcgctttcggcagaaaaccattaagcaacgcacccgattgaaaatccaactgacaacctatgttgatcaggtattcccggaaatccaatacttttttaaatccggtctgcatcagaatgctgtctatgctcttttgaaagaagcaccttctccaaaggagattgcttccatgcatatgactcatctggcaaatctgctcaaagtgaactcgcacggacactttaccaaagagcaagccaaagaattaagagttctcgcacagaagtctgtcggtgctaacgacagcgctatatctattcagataactcagacaatccaacaaatcgagttactggatagccaattagataagattgaagctgagatgacggatatcatgaaattcaacgattctgtcatcatgaccattcctggtatcggttatatcaatggtggaatgatccttggtgaaataggtgatattcaccgtttctccaatccaaacaagctgcttgcttttgcaggtctggatccttctgtttatcagtctggtaacttccaggctaaaacaacgaggatgtccaagcggggctctcgtgttttacgatatgcccttgtaaatgcagcttggaacgttgttaggaacaacgcaaccttcaaggcttattatgatgccaagagggctgaaggccggtctcactacaatgcacttgggcattgtgccggcaagcttgtccgagtcatctggaagatgctcactgacgaagtagaatttaacctcgaataagaggtctgtataccaatatcgatagattttgaaaaagcaccttaagggagctctattaaagttacccttttttaccaccgatatgaaaaagaaattttttgctaatttatggttgacttttcatagctggt

SEQ ID NO: 7599 - DNA, 1637 bp, unidentified
  source 1..1637: mol_type = unassigned DNA; note = element_bcb4508
  misc_feature 1..2: note = core
  misc_feature 3..262: note = LE
  misc_feature 263..1441: note = CDS
  misc_feature 1442..1637: note = RE
  misc_feature 11..237: note = bridgeRNA
ctcgtataataatgttatagtttaataactatatatcttttccatctcactaatgttgtgagataataattgtacagatagaggtcgtagttcacccccttgaagcgttgttttccttatttagagttacgcctcttctttacatccatatgcgaatgagctggatagtacaaatgttactgaatgtctaacgaggttgcattggtgtaaagtagagaggtcctagactttatctgttaatattttaaaagctggtgattttatgttttatgttggtattgatattgctaagaaaaaccacgaagcttctattattgattctaatggtaagcttcttgataaaagcatttccttttcaaattctcaagctggttgtgctaaattagtctctatgcttgataaattcgaaaccgattcctccaatgttattattggaatggaagcaactggtcattactgggttagcctttattcttatctgattgatcttggttttactgtttatgttattaatcctatccaatcagatgcttttagaaaaatgtatattagacaaaccaagaatgattctaaggattcttttgtaatagctcaaattatgcgttttggtcaattttcatctacttctttagccgatgaagatattatggctttacgtcaactatctcgttatcgacttgctttagtagatgaatgttctgattggaaacgcaagtgtattgctcttttagatcaagttttccctgaatactctaagcttttttctgatacctttggggttacttcgagagagcttctatctaaatatcctactcccgaagacatgttgtctatcgatacaaatactcttgctgaacttttatctaaagcaagtaaaggtcgatttggtgtttcaaaagcttctgaaatacaagaatatgcttctaatacctttggagtaaattttgcgaaagatgcctttgcattccaaatcaaacaaattattgcccagattaattttatcgaagaacagctgaaagaacttgaaactgaaatttctacacttcttcaccaaactaattcagttatcactactattacaggaattggtgatgtgctaggtgcaattattattggagaaattggtgatatttctcgttttgaatcagcttcacaactggttgcttatgcaggactggatgtagctgtaaaacaatctggagatttcattggaacacagactaaaatttcaaaacgtggttctccatatcttcgtagagcaatttggctagctgcgactgttgcagcttttaaagatccagcattatctgtatattatcaatcacttagggcaagagggaaacaccatttaacagctgtaggcgcagttgctagaaaaatgtgcaacattatatttgctgtattacgtgataacaaaccttatgtgcctgatatcaaataataacaactcacatagcttaatcttcatcctaaattttgtatcttcagtttaggtttatttgttttgcctaattatacataagaatttgtgacaggttctgtcaagggatgcttttatccttgacgggttctgacagaaattctattatcacaaaggcaaaataaattaaattacttcttgacttttaatagctggt

SEQ ID NO: 7600 - DNA, 1437 bp, unidentified
  source 1..1437: mol_type = unassigned DNA; note = element_bcbaa11
  misc_feature 1..2: note = core
  misc_feature 3..1166: note = CDS
  misc_feature 1167..1437: note = RE
  misc_feature 1189..1389: note = bridgeRNA
agatggggtattcggcctggtgcccggtccctatcattgagcttggtatgaaggcggcgctgcgctcctggctgatggtaaacgtggtctgcacgcaacagccacaagcatcaggaaaggaacgcagcatgaagcattatgccggactcgacgtgtccgtgaaagagacgtcggtttgcatcgttgatgagacgggcaagatttgccgtgaggtgaaggctgtcagccatcccgatgatctcatcgcggttctgaagacttctgggttgcagatcgagcggatcgggcttgaggctgggcctttgtcacaatggctgttcgaaggcctagccagggccggcttgccggtgatctgcatcgaaacccgccacaccaaggcgttcctcaaggcgcagccgaacaagagcgaccgcaacgacgcccgcggcattgcccagatgatgcgtgtgaatctgtatcgtccggtgcacgtgaagacgctgaccagccagaagcgtcgggcgttgctgacggcacgcaagctgctacaggagaaagcccttgccatcgagaacgacatccgcggcctgttgcgtaacttcggccttaaggtcggcgtggtcggagcggtgaaattcgaggcgcgcatccgcgaactcgtcgaaggaaacttagaactggctgaggttatcgagccgctgcttgatgcgcgccggacgctgcgagaacactttgcagctctgcaccgcaagcttctactgatcgtcaagaacgatgaggtttgtcggcgcttgatgacgatcccgggtgttggtcccgtcgtggcgctcgcctataccgctaccatcgacattccgcagcggttcagaaactcaaaggcggtggggccgatcctggggttgacgcccgtgctcaaccagtccggcgaaagccgccgcgttggtcgcatctcattgtgtggggacggcatgatgcgaacgttgctctatgaagcagcgcaggtacttctcacccgggtcgcaaagtggtcctggttgaaagcctgggcgatgaacgtcgccaaacggcgtggcgcccaaaaggccattgtggctctcgcgcgccgcctcgccgtcatcatgcatcgtatgtggagtgacggcactgagttctgttggacaagggaacgcttcccagcagccatctgaccagcctgcaaacacggaaaacagagttccgccgaccagcggaaagatgtccttcgcgggacgacgggtgaggtgagttcgcaataggtccggtaccggtccatttaccaggatcaggacgcggttcagattgttccgcctcattcttccgaccccattatgggagggttcgagggcccatcccgaagagaagcaagaccccgcaaaaggcattacgttggcggatttggtaaagttcgaatgcgcttgacttcgacacaccgaatagaga

SEQ ID NO: 7601 - DNA, 1357 bp, unidentified
  source 1..1357: mol_type = unassigned DNA; note = element_bcc9cf7
  misc_feature 1: note = core
  misc_feature 2..73: note = LE
  misc_feature 74..880: note = CDS
  misc_feature 881..1357: note = RE
  misc_feature 1138..1351: note = bridgeRNA
taatgggatggtctgctcctccctctgatatctatactcagcaagggagatcgcaaaaacaaggagaccgatcatgtctagttcaaatgtgcatatttacggtatcgatctaggaaaaaactggtttcacatagtagcaatggatcgccaagggcatattctctggcggaagaagcttaatcgaagccaacttaaaacctttgtgattaacactccacctacaattgtagcggttgaagcttgtccgggatctcaatactggggaagattgtttaatgatgcagggttctcagtaaaaatcattcccgctcagtttgttaagccgtacttaaagtcaaacaagaatgacttcaatgatgctgccgccatcgctgaagcaggcagtcgtggcactatgcgctgtgtttccctaaagacacacgaacaacttgccttgcaagcgactcatcgagtaaggcagcgttttattgttgagcgcacagcaacagttaatcaaatgcgggctttactacttgagtacggcattacagttcctgtaggtcgcaaagtttttgaacgtaacttacctagcatattggaggatgcggaaaatggactgcctgattttatccgtgctttagtattccgcttacgagagcgttggcaacaccttgatgttcaaatcgatgagatgagtgagcaactacaacaagcctcaaatgcgtcagagaaatgccaacttatatccagcgttccaggtattggcccaattgtcgccactgggctaatcgctgcagttggctcaggcactcaatttaaacgaggtcgagatatgtctgcatggttaggcttggttcccagacaatactccacgggtgggaaagcaaccttggtggcataagcaaaagaggtaacgtttatctacgccgtcaggtgatacaaggggctaaagcattaaagatacacatgaagcgagataaatccgcactcgggcagtggatagccaagttggaggcgacacatcatcaccatgttgttttaattgccttagctaacaagataatgagaatttgttggaaggtattgacctcagggctggagtatcaaccttatccagcttcggctacgaaatagcgtatagttagttatgttttccatagattttgcgagatacaagctgatgacagaagcgttaaacccacgatgttgaagcctggctaaaaaagcagtcttttatgactgagcgctttattaggacaacaacgtacggatcctatcaaggccagaacactagatagttcacaaacaggccggatacattgacgcaaacgtattctgacagcgagcttttacttgcaaaaacggagcagaccataca

SEQ ID NO: 7602 - DNA, 1335 bp, unidentified
  source 1..1335: mol_type = unassigned DNA; note = element_bcce063
  misc_feature 1..2: note = core
  misc_feature 3..82: note = LE
  misc_feature 83..1120: note = CDS
  misc_feature 1121..1335: note = RE
  misc_feature 1095..1320: note = bridgeRNA
agataattggactccctctacaccttcgttagcgtgtagagtaatatcattgttaccacacaaaatattaaaggagtcctcaatggatagtacaatagttggtgttgatttagcaaaaagagttattcaagtttgtatttatacaaataaaaaagtgcattcaaatattgaaatgacatctgatgaatttttactttggttatttcaacaaaagcctgtaactattatctatgaggcatgtagcgggtctaattactggaaacaaaaagcaattgaagcgggtcacaaggcgttattgatttcagctcaattggtatcaacgataagacaaaaccaaaaaacagataaaaatgatgcacttgcaattatacaagcatcacaattggctgacattggttttattaatggtaagacgcataaacaacaacagctccaaactatcttgaaacttagagagttagcagtcaaacaccaaacggcattgcgtaatcaattagttgctttacttgctgagtttaatattcattgttcaagtagaaacggtggtattaaatctgcggtagcaaatctacttgaagattttgataatggtttcacttgtgaattcagggctggtatcaacgtagcttatggtcacctaattacgcagtcagagattatcgagcaatataataaacaattagagcattctattgagcaacacgaagattgtaagcggttgctgcgaatagaaggcgttggccccattaatgctatcaatctatatgttgcacttgggtgtggtgaattaggcactttcaagagaggcaaagatgcatccgcctgcataggtttaacgccaaaacaatactcatcgggtggaatcattaagcttggtgccattggtagtcgagttaagcacggtagattacgtagccaattaattgtaggtgcaatggctgttgttactcacctagccaaaagaacacctaaaactaaaaaagaatgttggctcatggggttaattgaacgcaaaggtaaaaaatgtgcagcggttgccttggcaaataaaacggttagaactgcttttgcaatgctaagccaaggaacagaatataaagcagagttattggctgcttaacaaggtcctacaataaaatgcaataacgaagataaaaatcagcatattaaatcagttgtcaactaagagtcttgaactcgtcgataagatcttgattatatgctcgcgaaaatatcctagagccagggttcgctactctatttagagctcgtacataagttcgcattaaattctttgattattcactttgttgttgacaagggggagtccacata

SEQ ID NO: 7603 - DNA, 1360 bp, unidentified
  source 1..1360: mol_type = unassigned DNA; note = element_bcce634
  misc_feature 1..2: note = core
  misc_feature 3..77: note = LE
  misc_feature 78..1103: note = CDS
  misc_feature 1104..1360: note = RE
  misc_feature 1079..1350: note = bridgeRNA
tgatgatgtagacgcccgcgacgaccgcagtgtgtggcaaagtggaattgtctaaaccaccattggagatgggcatcatgagcgaagttcgtacgatcgggttggatttggccaaaaatgtatttcaggtccacggggctgatgagacaggtgccgtcgtgtttcgcaagcagttgcggcgtgggcaggttttgaaattctttggtggcctgccacggtgcctggttgcgatggaagcctgcggaagctctcatttctgggcgcgtgagctaggccttttggggcacgaagtccggatgatccccccggcctacgtgaagccctttgtgaaacggcaaaagaacgacatggccgacgctgaggcgatctgcgaggcagcgcaacgaccaacgatgcgctttgttgccgtgaagagcgaagagacacaagccgcagcagtggtgttgcgcacccgcgatctgctgatccggcagcgcacgcagaccatcaatgcgctgcgcggccacctggcggaattcggcgaggtggcgccgcagggtctgagctacggtccgaaactgattgcgattgtcgaggatccgcaaacggcgcttccagaaactgcacggactgctctgcggtttctgacagcaagcttgtcgcaactgaatgatcagattcgcgctctggatgcacagattgtgcgccgggctcgtgaagatgagacagcacgccggttgatgacaattcccggaattgggccgctgattgccaccgcactggtggctctggcaccatcgccggaaaccttcaaacgcgggcgtgactttgccgcatggcttgggcttgtgccgcgacaacattcgacgggcggcaaacagcggcttggctccacgacaaagatgggggagcgatctctgcggcggctactgatcataggggccaatagcgagcttgtgtggcgtacccgcaagggagccgcatcaggaacgtggctggccaagatgctggcgcacaaaccgccgatgctggtgagggtggcgcttgccaacaagatggcgcgaatggtttgggctatcatgggcaagggaggaatatacagagctccggttgctgcggcctaaagccaaggtaaccgaggggacgtcgtagcgagagaggtcatgggaagtatggcgcaacggtcgtgagacggggtcaggaaaaccagtgtgcaccaaagtgcctcaagagcacgcggcgttgatttggacctgacctgcgaacaccatacgggcccgcggcatatgagaaagccgcattaaaggccggacacatgtcagcacccgacaatgcgcaaatgccgactaaagattcctcttgccaaacgggcgtctacaca

SEQ ID NO: 7604 - DNA, 1502 bp, unidentified
  source 1..1502: mol_type = unassigned DNA; note = element_bcce8e7
  misc_feature 1..2: note = core
  misc_feature 3..243: note = LE
  misc_feature 244..1482: note = CDS
  misc_feature 1483..1502: note = RE
  misc_feature 15..243: note = bridgeRNA
ctaataagagttaacgggtccgccgtacggcagacttggacgaaggtggccgccggcaggtgagcactttgtgctcctgggtttcgagccctgaagaaagaccgtgcccctgccggtgaccgggagagttgatcgctgctgagatgtcgtgcccgccgatggcgtgagcactgttcttattaggtcgctgatggttctcccgctggctgctgacatttttcggcaacgttgacgggagctggagtgcggctgttcgcgggtgatgactgggccgaggaccatcacgacatcgaggtgatggaccaggccggcaaggtgctggcgaagaagcggctgcccgagggcgcggccgggatggcgcagctgcacgcgctgatcgggcagttcgtgcccgaggacgacatggacagcacggaagtggtgatcggcatcgagaccgaccgcggcccgtgggtcgcggcactggtcgccgctggttacacggtgttcccggtgaacccgctgcaggcatcgcggtaccgggagcggcacggcgtgtccggcgccaagagcgacgccggcgacgcgcacatgctcgccgacatggtccgcacggactcccaccagctgcgggcggcggccggggactcgccggaggcggcgggcatcaaggtgctggcccggacgcacaagacgctgatctgggagcggacgcgcgcgacccagcggctgcggcaccagctgcgggagtacttccctgccgcccttgaggcgttcgaggacctcgacgccgccgacacgctcgagctgctgggcaaggccccggagccggcccgggcggcgaagctgacgcgcgcgcaggtcagcgcggcgctcaagcgggcccgccgacggaacatcccggacaaggccacggcgatcctggccgcgctgcgcagcgagcagctcggccagcccgaagcgctcaccgcggcctacgcggccacggtccggtcgctgctcgcggtgatcaccgtcctgaacgagcaggtcaaggccctgcaggggcaggtgggggagcattttggccggcacccggacgctgagatctacctgtcccagcccgggatgggcaagatcctcggcgcccgggtgctcggcgagtccggcgacggcccccgccgctaccgcgacgggaaggcgcggcggaactacgccgcgaccagccctcttacccgcgcgtcggggaagaagaaggtcgtgtcggcccggttcatccacaacgaccggttggtcgacgcgctcaacgcccaggcgttcgccgccctgagtgcctcgcccggcgcccgcaccctctacgacgagctccgcacccgcggaatcgagcacaacgacgccctgcgacggctggccaaccggctcgtcggcatcctgcacggatgcctcaagacccgcaccctctacgacgaggcaaccgcctggggacaccggcaaaacctccctcaatcttccgtagcggcttgacacttaagctcctgagatgt

SEQ ID NO: 7605 - DNA, 1380 bp, unidentified
  source 1..1380: mol_type = unassigned DNA; note = element_bcce9f1
  misc_feature 1: note = core
  misc_feature 2..282: note = LE
  misc_feature 283..1365: note = CDS
  misc_feature 1366..1380: note = RE
  misc_feature 1..292: note = bridgeRNA
cagtaaatagatcgaagccagttcccgggcggcctgtctcaaacacagatcgaccttttggtaggctggcgccgtgaggcgcccggtgcggtctgacccgcactccgatcgacccgccagtgtctttccccggacctgtcggccgcccgggaacgccttgcggagagggttcgcctcgccgttgcctgtgacccgagaagggcctgaccaaccggtcacgttactgtcctgtccgtgcagctgtcctggcgagccggttggtgatcgagccgggagagcagcatggccataaaggatgatgcgaacgtctgcgccatcgttggaggcgtggacacacacaaggatctgcacgtcgcagccgtcgtcgatgaacgggatcgcgttctcgagactcgatcgttcgcaactacacggcaggggtatcgacagatgctcgcctggatgcggtccttcggcgacctccagcgcatcggcgtcgagtcgaccggcagctatggcgcgggcctgttgcgcttcatgcagcaggccggtgtaacggttctggaggtgacggctcccgatcggcaagatcgccggaagcgcggcaagaacgatgatctcgacgcgcagaatgccgcgcacgctgcctttgcaggtaaccgaaccgtcacgccgcgcagccgcgatggaatgatcgaagcgctgcgtgtccttgtcgcctgccgcaagaccgccgtgatggcgcgccggatcgcgcttcagatgatccagaacacgatcgtcgcggcgccagatgggctgcgcgatcttctgcgcgacatgacccgaatgcagctcgttcgaactctggctgcatggcgccctgatctgacaagctaccgcgagatcgaggctgcttatcggatagcgctcaagtcgcttgcccgccgatatctcgaactccacgacgagatcgccgacctcgataccatgatcgccgccatcgtcgacgagctggcgcccaatctcgtgaagcgcaactcgatcggtcgcaccggcgccgcgcagctgttgctcaccgctggcggcaatcctgaccgcatgcgatcagaagccagcttcgccgccctctgcggcgtcagtcctgttcccgcatcttccggtaagacggtccgacatcgcctgaaccgtggcggcgatcgcgcagccaacagcgccttgcacatcatcgccatcgggagattgcgcaccgaccagaagacgaaggattacgtcgctcgccgcgtcgccgaggggcattccaaactcgacgccatccgtgcgctcaagcgctacatggcccgcgaggtcttcgccctcatcatgcagcgccagaaggagatcaacgccacacgtatcgccgcttgacaaacagaagggcgt

SEQ ID NO: 7606 - DNA, 1514 bp, unidentified
  source 1..1514: mol_type = unassigned DNA; note = element_bcd39d8
  misc_feature 1..2: note = core
  misc_feature 3..253: note = LE
  misc_feature 254..1492: note = CDS
  misc_feature 1493..1514: note = RE
  misc_feature 77..247: note = bridgeRNA
aaacggtcatgcatcgtgatacaccacgaagcatgaaaataacttaattttgtgatctttgacataacatttttggcacattacctttttaataaaggaagtaggtcgttcgactttggtggttctaccccgagtaaaaaactgacctgagcagatgcgaagcaccacaaattgttaccctttttaggagtgcgcatagtaaattttttatttattatctgctccctttattacagaaaggagatattttaatatggaagccatcattgagagatgttgcggcatagatgtccataaaaagaatatcgtggtttgcctggcggtaggtaaacccgatgagaagccacgaacaatggtaaagaccttttccactatgacttgtgaccttttagcctgtcgagactggttggtatcggaagggtgcacccatgctgccatggaaagcaccggcatctattggaaaccgatatataacatccttgagggaagcatggagatcatccttgcccatgccagggatgttaagaatgttccgggtcggaaaaccgacgttaaggattgcgagtggattgctgaccttatgcgccatggcctcattagaggaagctttattccgcctaaaccgatcagagagttgcgtgatcttacccgctatcgtgagaaactgatccaacaacgctcttcagagcttaatcgtctgcagaagtttttggaagatgccaacatcaaactttcctcggtagtttcggatatcaacggcgtctctgcgcaggatatgatcaaacatcttattgatgacgatatgtcctctcaagaaatggctcaattagcaaggggaaaactccgggatagagtagaggagttggaaaaatctctggaaggatgcctgaccgagcatcatcgactcattttacaattggctctccgtatgattgcttcttacgatgaagcaatagcaaaattgagtgtggaaattgacaaccggatgcagcctttccggcaggagtccgaaaggctgcagactataccgggcgtaaaaaaaaagactgctgaaaaggtcattgccgagatcggagtagatatgtctcgttttccttctgatgctcatctttcttcctgggccggcgtcagtccaggaaacaatgagagcgcaggcaaacgaagaagtggcagagtaaaaccgggaaatccatggcttaagaaaacattgacagaagctgcctggtcagcttctaaaacaaaacaaacatacttaagtgccagataccgccgtttggcagtaagaagaggtaagaagagagcagcagtttctgtaagccacacaattttaataatggcttatcatattatcaaagaacaacgcacttacaaagaactgggtgctgattattttgaccgtttaaatgaaaaacatctcattaagcgtttaactacaagaatcgctgctttaggatatgctgttaacattacaaaattgcccgtagccgcttaaattatgactctattttcatagt

SEQ ID NO: 7607 - DNA, 1376 bp, unidentified
  source 1..1376: mol_type = unassigned DNA; note = element_bcd802d
  misc_feature 1..2: note = core
  misc_feature 3..213: note = LE
  misc_feature 214..1185: note = CDS
  misc_feature 1186..1376: note = RE
  misc_feature 41..219: note = bridgeRNA
cttgtattgctgcgccagattagaatggcctcgttccgagaggaatggcccagcgcgggtggccgcccgagctgggccgccgatcgatcggatcgctgcccaccgtagccttgagagctgggttttgtagcaagatcgcggtcggctcttcatcgggacccggatggttgaacgaacttcaggttcgcatcagacaagggagggtcgaggaagatggccaagcgtatcacgatcagtgccgggatcgataccggcaaacgcaagctcgacgtggcgctcgacggcagatcagagcagatgcaggtcgggaacaccccggaaggctacatggtgctggtagagtggttgcggcgccagaaggtcaagcgggttggaatcgaggcgagcggcggctatgagcagtcggtggttgccgaactgcgacgcaagcggtttgtggtcgtcgtgtttcagccggctcaggtacgtgcttatgccatgttccacctgcagcgcgccaagaacgacaagatcgatgcagcgctgattgcagcctgtaccgccgcgaccaagaagatccaccccgctccggatccccggctgcgaccctttgccgagtatctgaccatgatcgaacagatcggggaggatatcgcaaagctcaagaacaggctcgagagctgccataacgagcgtatccaaaagctctggaaggagcagattgctctcttggccaagtacagacgagccgagttcaaggctctggtggcggcgatccgcaagcatcgcgatctcgccgcccggctcgatctgatctacagcgtcggtggcagcggcctgccgactgctgtttccatactgatcaggatgcccgagatcggccagatcacgcgtgagcaagccgcagccctcgccgggcttgcaccttacgatgacgatagcggcgatcacgtcggtgtccgtcacatcgaaggcgggcgcgaacgcttgcgctgggcgctctacaccgctgcactgccggcatccttccgctggaatccgcagctcatggccctgtacagccggctgatcgccgccggcaagggccacaagcgcgcgctcatcgcctgtgccagtaagctgctcgtcatcatcaacgccgtcgtcgcccgcggaacgccgtggctcgcccaaccacccaaaatcgcgagcgcgcccgccgtctgatcgcgtttctttgttcgaccgaagcaccgtttcttcgtcccgacctgccggcacaacgacgccttgcgcggcggccgtcaagattggccgtcgctcaggctccacctcatctccgccgccgccaggccacgtcttgacggccgcaagcacggcgtcatgctcgcagcaatcggaccccgctttaatggttg

SEQ ID NO: 7608 - DNA, 1386 bp, unidentified
  source 1..1386: mol_type = unassigned DNA; note = element_bcd88eb
  misc_feature 1..3: note = core
  misc_feature 4..87: note = LE
  misc_feature 88..1110: note = CDS
  misc_feature 1111..1386: note = RE
  misc_feature 1112..1373: note = bridgeRNA
tgatgaggtggatggcccctgtgtccgaccgatgtgagtcgtattgtgggctgttgttgaagcaccccatgcaaaggaccatccaccatggagattaccactatcggccttgatctggcgaagtctgttttccaactgcatgctgttgatgccaatggcgatgttgtctggcgtaagaagttacgccggacagcgcttctgggcgctttggcgaagatcccgccctgccttgtgggcatcgaagcttgcgccacgtctcattactgggcccgtgagatttctgccctgggacatcaggtgcggcttatgccgcctgcttatgtgaaggcctatctacggcgccagaagaatgatgcggcagatgcagaggcgatctgtgaagcggtgcagcgtcccatgatgcggttcgtcccggtaaaaagtgccgagcgtcaggctgtcctcgtgctgcatcgttcacgcgaactcctggttcgtcaacgtaccatgctgatcaatgccattcgcggtcactgcgcagagtttgggctgattgcagcccaaggtgtgcgcaatgtgagtgagctgatgaaacgggtcaggctagccgatcaggcggttttacccgagatggcaaaaaacgccatgatcctgctggcggagcaactggaaactctggatatgcagatacagaggctcaaccgtcgtttgcttgtctggcatcgtcaggatcaggccagtcagaggctggcgactattccggggatcggggttatcagcgctaccgctctggctgcctctgtaaccgatcctgcccagtttcggtccggccgggagttctctgcctcactcggtctggttccgcgccagaactcatctggcggtaaagatcgattgggacggatctcgaagatgggggaccgttatctgcgaaagttgcttgttgttggtgcgacatccgtggttcgcagggcaaggactgctgatagtgccgcgagcaattgggtttgcggcctgctcgaacgcaagcccacccggcttgttaccgtggccatggccaacaagactgcccgaattgtctgggccgttctggcgcgcggcgaagtctatcaggcaaaggctttggcctgagaataatagcggtgccgattattatgcaccgctttgaactgtgagggtgccaacaggaatgatgataacgatctgaacgcggccgcaaaggtcaggacaacccgaggtgctgtcggagccacgagctcgtccgactgaatgggacccgaccagcggacagcatcagggccagcggtctatacatgccgcaccaacaggccggacagatgaccgcaccctgtcagattaaatcatcaaacctattttaccccttgcagcacaggggccatccacaga

SEQ ID NO: 7609 - DNA, 1613 bp, unidentified
  source 1..1613: mol_type = unassigned DNA; note = element_bcda791
  misc_feature 1..2: note = core
  misc_feature 3..273: note = LE
  misc_feature 274..1491: note = CDS
  misc_feature 1492..1613: note = RE
  misc_feature 14..293: note = bridgeRNA
ctactacaatgtatttatggttgatattcctaacaaccagctaggatgttatccatcttattgcttaagctgttagaatgagtaagcaatcggtctggccattaactctgaggacccagcgtccgtgaatcagtcagccaaccagcactcattcgcggcgttcgttttacgcaggttgaaccctctggcgttcgtgtgaaattccagtagattgaacaggcaatgagaaaactggtaacgacccttgctaatacattctaaaggagtattttcatgaacgcagttggtattgatgtctctaaaggtaaaagcactgtcactatccgcagaccgggaaacgaggtgcttctgcctccctgtgattttccacacacacaatcctgcattaacgggctgatcgagcagatcaaaagccttgacggcgaaacaaaggtctgcatggaacataccggaagatactacgagccggttgcctcatggctctctgatgccggtatctttgtcagtgcggtcaatcccatccttatcaaggagtttggcgatgattccctgcgcacgcctaaaaccgataaggccgatgcaaagaaaatcgcccggtatacacttgaccgctgggcaaatttgaagcaatataaccatatggatgaaattcgcaaccagcttaaaaccatgaaccggcagttcggcttctacatggaccataagaccgcaatgaaaaacaacctcattgcactccttgaccaggcctatcccggcgccaatgacttctttgacagccctgcccgcagtgacggcagccagaaatgggtggattttgtccacacctactggcatgtggactgtgtccggggacggtcgcctgaagcctttgcacaacattaccaggactggtgcaggcggaaaggttataatttcagcgccagcaaggcggaggcaatatacagcagatcttctgacctgatcgctgtgttcccgaaggataacactacaaaaatgctgatccggcaggcagtggcaatgctcaatgccacatccgcaaccgtggaatccctccgccagaagatggatgagaccgcttccgccctcccggaataccctgttgtcatggcaatgcacggcgtcggccccactctcggcccacagcttatggctgagatcggtgacgttacacgttttacgcaccgcgaggcgctgactgctttcgccggtgttgaccccggttccagacagtccgggaaacatgagcagaaaagtgtacgcacttcaaagaaagggtctccgaacctgcggaagacactcttccagatcatggccgggcttatcaaacgttcccctgctgatgaccctgtttatgcattcatggataaaaaacgggcacagggtaaaccttattacgtttacatgaccgccggcgcaaataagtttctccgcatttattatgggcgcgtaaaggaatacctttctacggacacagaagctgacaacgcctaaaataatgatatatccctcttaccagaccagcgttctgcggtggtctttttaggatacgtattattatcccattcgaaatttttaaagtttatcattttggggcttgactttttatttgcaga

SEQ ID NO: 7610 - DNA, 1209 bp, unidentified
  source 1..1209: mol_type = unassigned DNA; note = element_bcdc147
  misc_feature 1..2: note = core
  misc_feature 3..156: note = LE
  misc_feature 157..1194: note = CDS
  misc_feature 1195..1209: note = RE
  misc_feature 12..188: note = bridgeRNA
cttgtatctttcttcccgtggtggttagctaccatcacacgaagcagaggaagcttgagcccacccttaaggctcgaccttgtcacgtagatcaagccctctgcttcacctttcgccagcatagacactgaacggtatccaaggggtgaaccctgcatgcacaaggcaagtgagcgaagttggctaacattgaaacaggaggtcattgtgttctatctcggtatggatgtggcaaaagcaaaattagattgttgcctgttgctggatgaggccagtggcaagcgcaagaccaaagtagtgaaaaacacccagtcaggcatcgttgatttactagcttgggttgccaaacaaaacgtatcctcggaagctttgcatattgtcatggaagccaccggcatctatcacgaacaagctgccatggcgctcgcggatgctggtgtgatagtttccatcatcaatccggcgcaggttaaagattttggccgtgggctggccgtgcgcaccaagaccgatggcgtggacagcgttgtgctggctcgttatggcgcattactcaaacccaaagcttgggtgccgcctccactggaagcacgagtattgcaagcgttgttagtacgccgtgaagcgcttgtccaagatttacatcgtgagcgtaatcgccaggagaaagccggtgccacagacacgccagcgctgattcataaatcacttgaagagggcattgcgtttctggccaaacagttagctcagatacaaaaggatattgactcacatatcgacaagcattcggatcttcagaaagacagagcattgctccaaagtattccggcagttggcccacaggtggggagcaatttactctctgtgatgcacaaccatgattttggttcggctgaacagttggcggcttatctgggactcgttccggtcgaacgacagtcgggtagttcggtgctgggtcgcgcacgcatgtccaaggccggtcccgccagaatacgtgccgtgctatatatggctgccgtcgtggggacacgctacaacccacacgtcaaagctgtttatgaacggctgcttgcccgaggtaagtccaagatgtcttccctcggtgccgcaatgcgtaagttggtgcatttgtgctttggcgtactcaagacgcaacagccatatcaacacaattatctgaaatatgcttgactttaaagacggtat

SEQ ID NO: 7611 - DNA, 1415 bp, unidentified
  source 1..1415: mol_type = unassigned DNA; note = element_bce267e
  misc_feature 1: note = core
  misc_feature 2..91: note = LE
  misc_feature 92..1147: note = CDS
  misc_feature 1148..1415: note = RE
  misc_feature 1180..1407: note = bridgeRNA
taatgggatggacgctcccctcccgctgcggcgtcaactgcgccaaagtggaagtgcgatccgaccacttaaccgagagcgggcgtccgccatgaagattacgacagtgggtatcgatctggcaaagaacgtgtttcaggtccacggggtgagcgagcgcgggaaagcgctgctgcgcaagcaactcaaacgcagcgagatgctgaagttctttaccaacctgccgccctgcctgatcgggatggaagcctgtggcagcgcacaacactgggcgcgcaagctcatcgagctgggccatgcggtcaggctcatggcgccgcagttcgtcaagccgtacgtgaagaccaacaagaacgaccgcaacgatgccgaggcgatctgcgaggcggtggcgcggccgaacatgcgcttcgtgccggtcaaaactcccgagcagcaggcagcgctggggttgcaccgcgcgcgcgcggggatgatgaaggcgcgcaacgcgcaggccaatcagatccgcgggctgctgggcgagtttgggatcgttctgccccagggcattggtcaactgcgtcgccagcttcccgaaatcgcggaggacagcaacaatggcctaccggggctgatgcgtaccctgctgcggagactgctggcgcagctccagcagctcgaccagcaggtctcagaactcgagcgcgaaatcgtgctctggcaccggcagaacgacgacagccgccggctcgaacgcatcggcggcattggggcgcttacggcgagcgcctacgtggcgagcctcggcaatgccaagagcttcaacaacgggcggcaagtcgctgcttggctggggatcgtgccgcgacaggattccaccggcggcaaacccaagctgctgggcatcagcaagcacggggatgtctacctgcgcacgctgctcatccacggcgcgcgctcggtgctccgacacctggagcaccggcctgatcaagccgatagctggctcaagcgcttgatgctcaggcgcggcaagaacgtcgctgccgtggcgctagcgaacaagaatgcgcgcatcgcctgggcactgctggcgcaccagcgcgagttcgaccccgattacgtgtcgacggcaccgagccggttaacggtcgagcaccgatagccggtcaacccgcatagcaaggagacccgcctactgattgcacaggcaagctcaacgtgatggcgaaacaggtcagaccgtggtcgaccaaacctgatacgaaccacgaactcgatagttcgtccctctgatgaggcgtcgaccagcgaattccatcagggccagaggagccactgttcctcaaccaaaggccggatatatggctgcaatcctcacctgccccgccaaagcgaagaggctgctttgcaaaccggggagcgtccatata

SEQ ID NO: 7612 - DNA, 1347 bp, unidentified
  source 1..1347: mol_type = unassigned DNA; note = element_bce82af
  misc_feature 1..2: note = core
  misc_feature 3..68: note = LE
  misc_feature 69..1091: note = CDS
  misc_feature 1092..1347: note = RE
  misc_feature 1114..1334: note = bridgeRNA
tgataacgtggacggccctccaccccacccgcaggatgatctgcggatgagtcggaaggagagccacgatgggaactgtgaagaccataggtctggacctggcgaagagcgtgttccaggtgcacggagttgacgctgatggcatggcagtcctccgccagcgattgacgcgcggacgcatgctgaagttcttcgcgaaactgcctccgtgtttgatcggcatcgaggcgtgttcgtcatcgcattactgggcgcgtgagttgatgggtttggggcataatgtgaagcttatgcctgcgcagtatgtgaagccctatgtaaaacggggtaagaacgacgctgccgatgcggaagcgatctgcgaggcagtgacccgaccaaccatgcgtttcgtagggattaaatcgcccgagcagcagggagctatgcttctgcatcgggtccgcctgatcctcaatcgacagcggacacagatttccaatgcacttcgggctcagatggccgagtttggtatcattgcgccagcaggtcgcggaggtattgatcggctgcttgagattattgcggatacggcagaccagagaatttccagtgaggtgcgcgactgcatggaaatgctcgcaactcaactgcgtatggtgaaggttcaaattctcgagaatgatcgcagaattctggcaagcgcacgagcgactgatatgggccgccgtttgatggagatccccggtgtaggtccgctactcgctagcgcgttcatcgccactatcgccgaaccgaagatattcaggtcgggacgaaacctcgctgcatggattggtctggtaccacggcaaaattcaagcggtacgaaggagcggttaggtggtataaccaaggcaggaaatcgctacctgcgccaaatgttggttgtcggcgcaatggcggtgatcagacaaatagaacgtagcggtgccaagaagccttggctggtacaactgttggccaggcgcaaaatcaaggtcgctgccgttgcactcgccaacaaaacggcccgtactatctgggcgatgatgattagcggcgaacattaccgcgagcctgttgctgtataaagcaagcacggcaggtcgccacgaggttggaaagggcagaacggaactaatgcatcaagccggttgaaaccgccggatcgggagatcccatatcgacccagcacttcgagtgcgtacaaatgatcggggcccgagacgcgcgaatggcattatggccagcggcatcaaaaagccgcctaaacaggtcggacacatggccgcaccaaccagctgagcaaagttcctaaacccttgccaacggagggccgtccacaca

SEQ ID NO: 7613 - DNA, 1409 bp, unidentified
  source 1..1409: mol_type = unassigned DNA; note = element_bced576
  misc_feature 1..2: note = core
  misc_feature 3..119: note = LE
  misc_feature 120..1154: note = CDS
  misc_feature 1155..1409: note = RE
  misc_feature 1179..1404: note = bridgeRNA
agatggtgtaacgggcggagcccaaccagccacgtttgaaaggctggtggtcgtccctcacaatgatggtttcgcggagtcaggaatagcctgctccatagcatcaaggagagacgaccatgaagcagtatgccggcatcgatgtatcattggaatactcaagcgtgtgtgtgatagatgcggatggccgcatcgtgcgggaagcaaaggtgctaagcgagcccaatgcgctgatcgtctggtttggcgagcacggcgtggcgatggaacggattggccttgaggccggcccattgtcgcagtggctttacacgggaatggcgaaggcgggtttagcggttgagttgatcgagacgcggcatgtgcgtgccgccttcaagacgatgcccgtgaagaccgacaagaaggatgctcgcggcattgcgcagttaatgcggctgggctggttcaggccggtccactgcaaatctcttccagctcaggaggtgcgagcattgctgactgcccgcaagctcattcagggcaaacttcacgacatcgagatgagcatccgggggattctacgcgggttcgggctcaaggtggggccgacgacgcggcgcacctatgcggcacggattcgtgaactaattgcaggtcatccgaccttggaagcgatttctgcgtcgttgttgaaggtgcgagacgcgcttgccgacgaatttgcaggttttgaacgcagactgcgcgccatggcccggctggacgacaacgcaaggaggctcatgacgacgcctggcgttggcgtcttggtggcgctgacattcgtggcggccgtcgacgcgcctgagcgtttccgatcatcccgagcggtggggccgcacttcggattaacgccaaagaaatatcaatcgggcgagaccgattatagtggtcgtatctcgaagaccggcgatgtgggcgtacgaaccgcgctctatgaggcggccaacgtaatactgacgcgccctgttagaggttcggatatgaagagctgggcgctggcgatcgccagacgcgcgggtcccagaaaggcacgtgtcgcgctggcccgcaagctggcggtggtgttgcaccgcatgctcagggacggaacgaactttatttcccaccgggcggcagccacgaccgcctgagcggaaggagagacaacaagacaggtttcggggggcgcccatcagccaccggagcaaggtcccttcgccgggacgatggagcggataggccgcaatacccgcagcagcaccaaggtgactgcgcgtccttagattggccagccggtcctcagcagaccccataaagcagcgaccaagcgtcgactgcggacagaagcaagcactcggcgagggattgaggtcgtgagggattgactcgggaaggcccgttacaga

SEQ ID NO: 7614 - DNA, 1711 bp, unidentified
  source 1..1711: mol_type = unassigned DNA; note = element_bceed1e
  misc_feature 1..3: note = core
  misc_feature 4..67: note = LE
  misc_feature 68..1228: note = CDS
  misc_feature 1229..1711: note = RE
  misc_feature 1269..1476: note = bridgeRNA
aagatgctatggggcggcgccgaggatattgcatccatcgtcgctaatgtgaaccgatggagcccccatgcagaagttgaacgacctgagccgatccctcaccgccctcgagcaggacggcacgctgatcgcagtcatcgagatgagcctgtcgagctggctcgttggcggcattgtgcctggcgtcgagcgccaaccgttgaagaagctcgcagtcgacgagagctcattgctgaagcttctgcatcgatggcgagaggaagcagaaaaggcaggacacaggatcacacgcatcgctgtcgccttcgaggccggccgtgacggcttctggctggcacgttggctcaaggcgagcggcatcgaaacgcacgtcattcacgctgcgagcgtggcggtgtcacgcgaacatcggcgggcgaagaccgatcgtctcgacaccgagctgctcaaacgcgcctttctcggctggctgcgcggcgagcgagatcactgcaagatggtcgcgatcccgacaataaaggacgaggatgccaagcggcccaaccgcgagcacgagagcctcgtcggagagcaaagtcggatcgtcaaccgaatgaaggcagcgttgattcggctcggcatccgcggcttcaatcccaagctgagaaaggccgccacgcgccttgaagagttgcgcacacccgagaacgagccaataccgccgaacacgctggctgagctgcgtcgcgacatggaacgacgacgtctcgtcagggatcagcttcggcagattgaggcggtgcgcgtagaacgtctcgagcacgcgccttgtgatggaccgcacgccatggtgcgcctgctcgcgcgcgtgatcggagttggcttagagacggccgacatgctggtgcacgaggtgcttgcgcgaaacatgcgcgaccgacgggccgtcgcccgttatgccggcctcactggctcgcccgaagagagcggcagaaaacgccgggagaaaggactggcccgctccggcaatggtcgagttcggcgaggcatggtccaattggcgtggcggttcctgatgtaccagaaggacagcgccttagtgcagtggtatcgagcccgcaccgagaaggctcgtggcactcgcaagcccatgatcgtggccttggcgcgcaagcttctgatcgccctgtggcggctcgtgcggcaaggcgttgtacccgacggcgtcgttttgcgtccggcacaatgaacggaggacgctgaaaacacccgacagtccttgtccgcacgcttgtgacgggcgccgaggacggttcgaggtggcggaatcccgacaggccccttggcttttatgccgattggaagaatgggtccgccgcttcggagcttcgctgccgatgcgcatgactgcatcatggttcgggtccttggacctaccggatacaaggttgtggcgcggttgaaccgcgcccgaaagcgggctcccctctgatcgtcatccgatcgcaccaagcgtgccatcgtgctcgaagccgtcaaggtgtcgcctgacaacggcggagcatgctgcaaagttgctgtgacggccaaccttgacagttcccgcgcgcgctggcgtgagcgaagccaagttcgcgacgaagaaacgaaccttcagattaaacaaagaagcctccgaaggaaaaaagatgcgccaccctgcttaaacttcttgactagaaaagccccatac

SEQ ID NO: 7615 - DNA, 1354 bp, unidentified
  source 1..1354: mol_type = unassigned DNA; note = element_bcf3346
  misc_feature 1..2: note = core
  misc_feature 3..75: note = LE
  misc_feature 76..1101: note = CDS
  misc_feature 1102..1354: note = RE
  misc_feature 1074..1342: note = bridgeRNA
tgatggggtggacgccccccgacggcatcgatgtgccaaggtgaggtgtcgttacttcacctgagggaggcgtccatggagcaggttaccacgatcgggctggatatcgccaaacatgttttccacgcgcacggctctgacgatcaaggtcgcatcgtgtttagcaagcgggtctcgcgatctcggttgctgtccttctttgcgcgccagccgcgttgcgtggtggcgctggaggcatgttccggcgcccatcactggggccgggagctgcagcggctggggcacgaggtgaggctgatcccgccggcctacgtgaagccgttcgtcaagcggcagaagaacgatgcagccgatgccgaggcgatctgcgaggcggcgcagcggccgtcgatgcgcttcgttgcggtaaagagcgaggagcagcaggcgggcgctctggtctttcgcggccgcgatctcctcgtggggcagcggacccagatcatcaacgcgttgcgcagccatatgggcgagcatggctggatcgcgccgaaggggccgtcgcacatcgccaggctgcgcgagctgctcgaggatgaggcgagcgtgccggccagcgcccggcccgtgctcaagctgctgctcgatatggtcgccgagctcgaccgccggatcgccgagctggaccgggagatcgccaggcgcgctcgcgaggacgatactgctcgccggctgatgacgatccccggcatcggcccgatcaccgccaccgccttgaccgcgctggcgccgccgcctcagaccttcgcccgcggccgtgactttgctgcgtggctcgggctcgtgccgcgtcagcactcgaccggcggcaagcagaagctgggcgcgatatcgcggatgggcgagcggagtctgaggcggctgctcatcatcggtgcgagcgcggtcgtgctccacgccagcaagcgcggcgcacctcccggttcctggctggagcggatgctcgcgcgcaagccgcgcatgctggtcaccgtggcgctcgccaacaagacggcacggatcgtctgggcgctgctcagcaggaacgaggtctaccgggctccggcccccgttgcggcgtagcagcgggcaagccggaccgtcggaggcgtaggcggtcgaaggagggtatggcgcaacagtcggcgagacgggatcgggtcagccagggctttccaccgtgcctcagcagcacgccatgggtgatgtggccccggtccgcgaactcccatacgggcccgcagccgcacgctgcagcaaaggccggacagatggcagcatccgactacgcaccaccccccataaaaccgcttgcaccttcaggggcgtccacaga

SEQ ID NO: 7616 - DNA, 1418 bp, unidentified
  source 1..1418: mol_type = unassigned DNA; note = element_bcf36c3
  misc_feature 1..4: note = core
  misc_feature 5..201: note = LE
  misc_feature 202..1404: note = CDS
  misc_feature 1405..1418: note = RE
  misc_feature 1..187: note = bridgeRNA
ctccgtaagttgttgggtggcccgggagggccgggtgtggctgacgcgaagctgtcttcagtggcttgccaggagtggccgcccggctcttcggggcgccctggctgctgattgagatatgcgatccggtcgctgtttacggagctgacggcggggtgttcctcgggccaacggcatgctgttggaactgaggaggggcaagtgagcgagcgacgggcccaggtctgggccggtatcgacgcgggcaagggccaccactgggccgcggtggtcgatgagaccggtgcaactctgtggtcgaagaagatcgagaacgacgagtcggtgattctgaacgcgctcggcgagatcctggacctggccgagaaggtcagctgggcggtggacatctccggtacgtcgtccgcgctactgctggctctgctctcagctcacggccagcaggccgtctatgtgcccggccgcacggtcaaccgaatgtcgggggcctatcggggcgaggccaagaccgatgcccgcgacgcttacgtcatcgccgaaaccgcccgtcaccgcagggacttcgccgagatcgatgtgcccgcgcagttggctgccgatctggcactcctgaccgcgcaccggtccgatctggtcgccgaccgggtgaggatgatcaaccggctgcgggacgtgctgaccggcgtcttccccgcgctggagcgggccttcgactactccagcaacaagggtgcgctcgtcctgcttaccaggtgccagagcccggccgcgatccgccgacgcggccgggctcggctcaccgcctggcttgccaaccgcagcgtccgcagtgccgattcggtcgcagcgatcgccctggaggccgctcaggcccagcgcactgtgctgcccggggaagatgttgccgggcggatcgtcgccgacctggcggcacagctcctggccctggacgaccggctcaagcggatcgacaagcagattcgcgagacgttccgaagtcatccgcaggccgagatcatcgagtcactgcccggaatggggccgatactcggcgccgagttcatcgtcgcggcgggtgacttgactacgtatgtcgacgccggccatctggcctcggcggctgggctggtgcctgtcccacgcgactccggccgccgtaccggaaacctgcaccgtcccaagcgttacagccggcgcctgcgacgggtgttctacatgtccgcgcagacgagcatcatccgcgatggcccgaaccggagcttctacctcaagaagcgcagcgagggttgcaagcatgtccaggccgtcatcgccttggcccggcgccgggccagcgtgctgtgggctctcctgcgcgacgacaggctgttcacccccgtcccgcccgtcgcgcaggagtcttgacttcgtcattgaga

SEQ ID NO: 7617 - DNA, 1668 bp, unidentified
  source 1..1668: mol_type = unassigned DNA; note = element_bd069b3
  misc_feature 1..2: note = core
  misc_feature 3..353: note = LE
  misc_feature 354..1565: note = CDS
  misc_feature 1566..1668: note = RE
ctggtataatgatcacagtatgtgatctaggttaaaggttagtcgtagtagatttctttctttttgctactttttctttctttacaatgtatgcggaattgtggaaatcttaagttcatgaatggttctttaagcaggcttgacggtttgcttcctccttatggctctgatctttcagggaccatttggcaaagactaccgcttcctgcgggtctaactgggaatattcatttaggatgctatggccctccgttgccactgagggaccatttatctcccaggctatatgagttagaccctcgcagggaggccacctgcttaaaaccatcacccaaaagaaaggagagtctatcatgttctgcctcggcatcgatgtctcaaaaaaatcctgtcgctatctcatccttaacaaagaaggtcaaaaagtaaaatccttctctttagaaaacacccacgaagccttccaggatcttcttgaacgtctcaaccacctctccatcccgaaggagaacctcctgaccggtctggaagcctcgggaggattctgggaaaacctctactcccatcttaaagaaaatggtttctccgtcgtcctcctcaatccttatcaaaccagcaaattcagggaggctctggcaaaaaaggccaagaccgatgatatcgacgccctcgtcattgcccaactcctacgaacgggagaatacgtccaaagccaagtggctgaagaactcatccaatcccttagggagctctccaagctacgttatgaattggtcaaagaacgcaaaaattatcagcgtcaggtcttttctcttctctctatcgtcttccctgaacatgaaaagactgctctgaaaaaccccttctccgtcgcttccctggcgatcttccaaaccttctctaccgccaaggatcttgcccaggccaagcccaaacagatcgagaaaatcgttcgctccatcaaaggaaataacttcgacctcaaagagatcgaaacactgattcggaccgctcaaaacccgatctactccggccgagccaaagaggctcgaggaacttccctccggatcctcctccgccatatcgaaactctttcttcttccattgaagaactggaggccgatatcaaaaaactcctctcccctcaagaaccccaagactcctttcccggagaaaatcttctaaccatcccgggtgtcggagaaaagacggtggccgcggtcctctcctatctgggaactgatggttccaatttttccacctcgaccaaggctgtaggatacgtcggatacttcccaaagatctatcagtccggccaatcgctatgggaaagtacaatctgcaaaagagggcctaaactccttcgatgggccctttacatggccgctgtagcctgcttacgacataatccggagatgaaaaacctttaccacaaaaagctctctcaagggaaaacagagaaacaggcccttatctgcgtagcaaaaaaacttctcgaaatcatgctggccatgctgaaatccggagaaccttatgaccccctgagggtctacgccaactgctaaattgtcaaagaacggctctttgaaaactgaatatcgtgtgaatattgtgtggaaaacttttttacaaactcatcaatttttctcttgacaccttataggatgt

SEQ ID NO: 7618 - DNA, 1494 bp, unidentified
  source 1..1494: mol_type = unassigned DNA; note = element_bd10035
  misc_feature 1..2: note = core
  misc_feature 3..302: note = LE
  misc_feature 303..1079: note = CDS
  misc_feature 1080..1494: note = RE
  misc_feature 1238..1481: note = bridgeRNA
tgatgctgtggaacggccccctacgacagcatccaagtgctaacgtggtcgttgctggcaacgccataagcaaggagccgttccatgaaagagattaccacgatcgggctggatctcgccaagcagattttccaggtccatgccgccgatttcgagggagcgccggtaacaagccgaaagctgcggcgcgctgacgtgctgagcttttcaggaagacgccgcggtgtctggtcgggctcgaggcgtgcggtggcgcacactattgggcgcgcgagatcgcggccctcgggcatgaggtgcggttgattccgccggcctatgtcaaaccatacgtgaaacgcggcaagacggacgccgccgacgccgaggcgatctgcgaagcggtgacgcgcaagacgatgcgcttcgtcccggtcaaatccgccgaccagcaagcggccgccatggtgttgaaaacccgcgagcttctcgtgcgccaacacacccaggccatcaatgcgctgcgagcccaccttgcggaactcggcattatcgccgcggccggaacgacgaaggtggcctccttgatcgatatcgtgcgtgacgagaccgacaatcgtctcccgcaagcggcccgtttcgccttgagcgagatcgccgatcagatcgaggggctgaaccggaagatcggcaaactggaacacgcaatcgtgatggaggccaagcgtgacgccgacatgcggcgcctatgcacgatccccggggtcggcgccatcatcgccgcctcgatcaaggccacggttcccgatccggggggcttcacgtccggccgccacttcgcggcctggctcggcctaacgccgaagccccattcgagcggtggcaaggagcggctcggcgggatctcgaagatgggcaatccgatgttgcgctcccttctggtacttggcgccacttcggtcctgcgacatgtcaagggtaacgccagcgcgccgccgtggctgagcgcgcttctagtggtgaaaatcaaacgggagagtccgttgccatatgagtcgtttcaacgctttgcgcgctcgttgcgggttccaagcgtctgattcctaccactagcaaggcgtcccttcaaggtcgtcgctgtcgcgctggccaacaagatggcacggatcatctgggcgctcctcaccaagggcggaaattatcgaacatctgggaagacaagcgaggctgctcacgcttgagccggcggtcgaccaggacgaactgaccggcggtctcgccggccagaggcaaggtgcattacagatgatgaaccatcgggacgaaatcccgacgccggagaggccatgcgcgacgatgcgctcacagcgcgtttgattgattaggccacttgcgtcgcggacttcatcaaggccagcggtgtgatgccgcgctcaaaggccggacatatgaccgcaccgtcctcgatcgggacgtcatctgaaaaagcgcttgcctgcggggccgttccacata

SEQ ID NO: 7619 - DNA, 1409 bp, unidentified
  source 1..1409: mol_type = unassigned DNA; note = element_bd138c7
  misc_feature 1..2: note = core
  misc_feature 3..68: note = LE
  misc_feature 69..1115: note = CDS
  misc_feature 1116..1409: note = RE
  misc_feature 1151..1396: note = bridgeRNA
tgatgtggtggacggcgcccgctctcggcatcgaagtgccatagggtggttcgtcggagacgaatcacatgaggggagccgtccacatgcaaattagcacaatcggtttggatatcgccaagaacgtgtttcaggttcacgggatcgacagcagcgaggaggttgttgttcggaagcagctgcggcgcagtcaggtgctggcgttcttcaaagcgttgccaccttgcctggtcggcatagaggcgtgcgccacggcccattactgggcgcgtgaactcacgaagcttggtcaccgggtgcggctgatgccggcgaaagacgtgaaggcctacgtcaagcgcaacaagaacgatgccgccgacgccgaggcgatctgcgaggcagtgcggcggccgaccatgcgtttcgtgcaggttaagtcggtcgaacagcagggccagttgatgctgcatcgaacacgtgaccttttgatgcggcagcggacccaggtgatcaatgccttgcgggcgcatatggccgagctcggcattgtggctgcgcaagggcgtgaagggatcaaggagctactgaagattattgcgagcgaagcggatgcgcgcttgccggtcgatgctcacaccagcctcgtcgtgctggcggcggggcttcaggcgctgcagacaatgattagatcgatcgagaaacggatcgttgttcagcatcgctcgaacgaggcgagcaagaggctcgagaccatccctggaattggtgttatcggagccaccgcgatcgcagcaaccgtcccggatccgaaggtttttcgatccggtcgtgatttggcagcctggattgggctggtgccgcgcgaaggttcaactggcggcaaacagaaactcgggccaatctcaaaacagggtgaccaatatctgaggcgcattctggtggtcggagcccacgcggtattgaaacgcgcgcggcaacagccggagaagtatccgtggctgacggggcttcttgcccgcaaaccgttcagggtcgtggcggtggcccttgccaacaagatggcgcgcatcgcctgggcattgctgaccaaaggtggcatctatcgggcgcctgcgcttgccgcagcggcctaacaagaggttgggtgaaagttgtgtctgtgcgtacaccaactgcaggggtgataacgacgttgatgcgaaacggtcgagaccgtcgattgggaaaacccgtgaagggccacgcgatacttgagcgcatgcttttggttgggacccgatcagcggatcacatcagggccagcggccacagcggctgcatcgcaatggaggtcactcttccattcgaaaacaggccggatacatggctgcacccgaacgcttcgcaaaacgtcagattcctcttgcaccgcgggcgccgtccataca

SEQ ID NO: 7620 - DNA, 1367 bp, unidentified
  source 1..1367: mol_type = unassigned DNA; note = element_bd1f09b
  misc_feature 1: note = core
  misc_feature 2..288: note = LE
  misc_feature 289..1131: note = CDS
  misc_feature 1132..1367: note = RE
  misc_feature 1138..1358: note = bridgeRNA
taatgagatggtccgccgttaagaaagccaacaggagtaatgatggagttggcaaaaagccaaaacggaggatcatcaccatgcagattaaatcgatcgggatcgatctgggcaagactacctttcacctcgtggcgctgggaacccgttctcaggtagtaattcgcaagaagttctcccgttcccagctactggagtacacggccaatctgcctccatcgttgatcgggatggaggcgggagggatcgcattttctgggacgagccctgcgcgaacaggggcatgaggtgcgcctgattcccgcacaatttgtgcgaccgttcgtgaagtccaacaagaatgactaccgcgatgcggaagcgattgccgaagccgtggaacgggagaacatgcgtttcgtgcccatcaagacagaggatcaactcgacctgcaagcgctgcaccgggtgcgcgaccgactggtggcccggcggaccagcgtgatcaatcagatgcgagccttcctgctggaacgtggcatcagtttccgcaaggggccggctacgctgcgacggcagatgcccgagatcctggaaaatgccgacgagaaactgagcccggccatgcgtcggctgttggatttcttgtggcaggagtggaagggtctgcaggtgcagatcgagagcctgaacacccagctcgaacagattgcgagcagcgatccgagttgtgttcgattgcagcagatcccgggagtgggtccattggtgtcgaccgccgtcatatctgccatcggcaacggcgcggctttcaaaaagggacgggagtttgcggcctggctgggactggtgccacggcaatggtcaaccggaggcaaggccaagcttctgggcatcagtaaacggggaaacccatatctgcgcaagatgttcatccatggagcgcgcgctgcggtcttacgcgtcaaacgcgaaggcttcagtctgggcaagtggatgagcggattggaaaccggaacggcacgcaatgtggtgatcgtcgcgacggccaacaagctggccaggatcaggctgggctgttttggcgagcgggaacgactatcagcccctgcacggcggccgtgttttccaactagacgaagtggaatttgaaattcttttctcgggagtctgcagaagataggaacgacgaaaacacagtcaaacgacgtgcctgaaaacctgcggcgtaacgaggtcatttacgaccgtggcgattaacaaggacaggcacgtgtggatcatcatcgtgcgccgggagattactctccacctagaggccggatacattttcgcaggctgttctcgtcgaaaccgattcttcttgcagttcggcggcggaccataca

SEQ ID NO: 7621 - DNA, 1197 bp, unidentified
  source 1..1197: mol_type = unassigned DNA; note = element_bd2170e
  misc_feature 1..2: note = core
  misc_feature 3..186: note = LE
  misc_feature 187..1167: note = CDS
  misc_feature 1168..1197: note = RE
  misc_feature 13..197: note = bridgeRNA
cttgtatctctccaggaatatctgtttagctagcagaggttcctgaacttggagaagttgaacccaaccttggcacatgatgcagagtcgtagatttaactcccaagttcattattctcactatattgaatggtatccaagcgcactgtcttttcagtgatgctgtatgaacaagggtaataagagatgcaccacattggaattgatataagtaaaaccaagctggattgttgttggttgagcgatcctgaaaataacaaaataaaaaccaaggtattcaaaaacacgcatgccggtcatgatgatttagctaagtggttaacacatcaaaccaaggcagctgcttcaagtattcaggttgtaatggaatcaacgggtatctaccatgaacccatggcttgtaccctacacaaattaggttttaaagtctgtgtacttaaccccgcgcgttcaaaagattttgcaaacagtttagggaatacccacaaaactgatttaaaagatagtgtcatgctggcgttatttagccacagaatgatgccaagagcgtggcagccagagtctcctgaagtcagagagctcaaagcattgctcgctcgttttgacgcgcttgaaaccgatcttcaacgcgaattgaatcgtcttgaaaaagcccaatttagttgttcttcagaccgtatcattgaatcaatcacacatatggtgacttatcttacagctgaaaagaagcagcttgagcaaagtattgatgaccatattgaccgtcatcctcagctcaaaaaggatagagatttgatgaccagtattcctggtgttggacgagtagtatcacgcgttatgctgagcgtcttacacggtcatcaatttgcttgtgcaggacaagtggctgcgtttataggtttgatcccacggatacaagagtcaggacaatggaaaggtcgaagccgtttaagcaagcaaggatcatcgaaaatcagagccaaactctatatggccgcagtcacttctgtctcttgtaacccggatcttcgtgctcagtatcaacgactactgagcaagggaaaaagtaagatgcaagccattgtggcggcgatgagaaagcttgtgcaaatttgttttggtgtcgtgaaacaccaaagcgaatatcggccacaatgcctgatttaggttattgtgctcggtttggagagatggtat

SEQ ID NO: 7622 - DNA, 1430 bp, unidentified
  source 1..1430: mol_type = unassigned DNA; note = element_bd23faa
  misc_feature 1..4: note = core
  misc_feature 5..230: note = LE
  misc_feature 231..1415: note = CDS
  misc_feature 1416..1430: note = RE
  misc_feature 22..226: note = bridgeRNA
gccttaccttgcttctgcgcttcggcgtctgtcattcctgggatatgatccgagggtggcagggaagcggggatgggtatcatgctggctgcccgcgatggctcaggtggcatctccccccgcttccgaagcccgtctcgaccgctgattaggctgcgcgatccatcgctctgtaaggcgacgacggcgtggacggggtgccgtgaagagcaacagctatggagggagaaatggatgtctttatcgggatcgacgtggccaaggaagtccactgggcctgcgccatggaccgcaacgcgcgggtgctgttcagccaggcggtgggcaatgatccagccgccatcgtgtcgttgatcggtaagatcgaggcgctggaggctgagaacacgcggaccgccatcgatatgctgggcggcgcggcgagcctcctctgtgcgatgttcgccgaggccgggctgccgctggtccacacgccggggctcgcggtgaaccgcgcgcgccaaggcatccggggcggcgagcgcaagtccgatccgaaggacgcggtcgtcattgccgagttggcccgcaccaggcccgacctgcgcgcagtggagccgccagacccgctcgatgccgagatccggctcctggtcagccgccgccgcgagctcgtcaccgagcagacccggcgtgcggcgcgcctgcgcgacctgctctccggcctctttccggcgctggagcggcgcatcgaccccaccacccgcaccggccttgtgtttctcagccattatgccgcgcccgaggatatccgcgccgcaggggcaaagcgcatcacccgccggctgacaaaggccgcgacgggcctgcgcggccttgaggcgttggccgaggacgccgtgcaggcggcacaggcacagaccgtcaccatcccgggggcgcagctcagggcagagatcatcgccgatatcgcccgcgaggcgctggccgcccgcgaccggctcaaggccaccgatcacgcgatccgggagcggctcgccaaccaccctgatacggccctcatcctgtcgatgccggggatgggggccacgctcaccgccgaattcatcgcgctggtcggccgcatcgaccgcttcgacagcgccgacgcgctggccgccgccgcaggcctcgccccggtgctgcgccagtccggcaagaccagcttcctgcgccgcgcagccggtggcgacaaggccctcaagcgcgtcttctatcaggcagccttcacctctctcggacgacccgacagccgcgccttctacgaccgcaagcgtgccgagggcaaacgccaccaccaggccgtcatcgccctcgcaagaagacgcgtgaacgtgctctgggccatcctgcacaaaaggcagcccttccgcgaaaacttcaaaatggccgcttgactgaagcattaggct

SEQ ID NO: 7623 - DNA, 1629 bp, unidentified
  source 1..1629: mol_type = unassigned DNA; note = element_bd260fc
  misc_feature 1: note = core
  misc_feature 2..277: note = LE
  misc_feature 278..1495: note = CDS
  misc_feature 1496..1629: note = RE
  misc_feature 12..297: note = bridgeRNA
cctgttactataaatttgtccctgttcatggcagccagccataggcatgggacatctcgttgcctaaactgttagaatgggagggtaatggtctgactcaaacctccaagggcttcaacgcccgtaagaaagtcagtcagccagcctcctgttcgcagtgttcgatttgtgcaggtagaaacatcagtgagatgcgttcgtgtcagcaaacagatggaaccggcaatgggtaaggatggcgtcatccattgcagattatattgacaggagtttgaacatgaacgcagcaggtattgatgtttccagcagaaagagcacagtcgccgtcctccgcccattcggagaagtcgtgaggctgccttttgatgtcagtcagctcaaagcgcttgacggcgagacccgcgtggttatggagcacaccggccgctactacgagccggttgccaacgtactgcacgaggccgggctgcacgtcagtgcggtcaatcctctgctcatccgggagtacggcggcaattcgctccgcagggtcaaaaccgacaaggcagacgctgtgaaaatcgctcgctatgctcttgacaactgggccgatctgcgggactatactcccatggatacgattcgttatgacctgaaaacactcaatcgccagttccaactggccagcaagcagaaaaccgcaaccgccaataacttaatcgccttgcaggagcaatccttccccggcatccgcaaatgctttgacagtcctgtacgccaagacggtacgcagaaatgggtggacttcacctacaccttctggcacgcggactgtgtccgaaaacacagcctgaacgccttcgcagagcgctaccgcaaatggtgcaagcggcacggctacattttcaagcaaagcaatgccgaagaggtgtacgcacttgccaagtctgccgtaacactggtttccagctccgaggtgacaaaactgctggtgcaggaggccgcaaaccagctcaccggcatttcgcactccgttgaaacataccgggctgaaatgaaccgtctggcttccatgctgccggaatatcccgttgtcatggagatgtacggcgttggggagtccttcggcccgcagctgatggccgagattggagacattcgccgctttgagcacaagaaatcccttgtggcctttgccggtgtcgatccgatgccgaatcaatccggcgagaagaatgttcgcagtaaccgttcctcgaagcgcggctcaccgtatcttcgcaagacgctattcaacatcatggggatttacctcagatgctcgccagccgatgagccggtgtaccagttcctcgaccgcaagcgggtcgaagggaaacccttctacatctacatgacagccggtgcgaacaagttcctgcggcgctactacgccaaggtgcgagattatctcgccacactggatggcttgcctcctgtggacatggattccaccggcctcagccaaccggactgacatctgaatattcggacatttcaggccagcgtttttacggtggcctttttgctgtgcccctttttttcttacctgccgcctgcaattttttcttccgtcaagctcatctttgggcttgactttttatttgcagg

SEQ ID NO: 7624 - DNA, 1402 bp, unidentified
  source 1..1402: mol_type = unassigned DNA; note = element_bd272ce
  misc_feature 1..2: note = core
  misc_feature 3..79: note = LE
  misc_feature 80..1120: note = CDS
  misc_feature 1121..1402: note = RE
  misc_feature 1118..1390: note = bridgeRNA
tgttggagtggacggcccccaacggcatcaaaatgtgccagagtgagtcgttgtaggatctcaagcgaggagaccgtccgtgatcgagattagccgcatagggatggatacgtcaaagcagttgttccagcttcatggcgttgacgcgagcgagaggccggtgttgcgcaagaagctgcggcgccgggatatggtgacgtttttcaaggggttggcgcccacggtgatagcgatcgaggcctgtggcgcctcgcatcattgggcgcggctgctcgaatcgttcggccatgaggtgaggctgatcgcgccgcaatacgtgaagccctatgtgaagcgcggcaagaacgatgcggccgatgccgaggcgctgtgcgaagcgatgagtcggccgacgatgcgcttcgtgccggtgaagagtgccgagcagcaggcggcgctgatgctggtcggggttcgcgaccggctggttcgtaaccgcacgcagatcagcaatgcgatccgcggccatgccgccgagttcggcctgaccgcggccaagggcttgagccatgtgaccgatctgctcgatcggatcgccgccgacgagacgctgcccgagcttgcccgcgaattgttcgcgctggagcgcgtcgaactcgagcggctgcagtcggacatcgaggaggtcgaggtccggctgatggcatggcaccgtgcgaacgaatgctcgcgccgcctggccgagataccggcagtcggcccgatcggcgcgtcgctgctgatgatgaaggcgccatcccccgaactcttcaagtcgggccgtgacttcgccgcctggatcgggctgacgccgaaggatcactcgaccgccggcaaggtcaggctgggcgtgatcacccgcgccggcgacccggacttgcgaagaacgctggtaacgggggcaacctcgctgatccagcagatcagggccgggcgcagcaagcatgtgtcgccctggctgctggacatgttgaagcgcaagccgccgaagctggtcgcgatcgccctggcgaaccggatcgcccgcatcgcctggaaaatgatgatgacgggcgaacattacagtaaacccgccgcgtccgccatgatggccgcagcatagagcttggctggcacggggagcagatatagcagcaaccgtgccgcgttgaggccggaacttgcagcatgaagagtagatggtgtgatcgatcgatccacgacgcgtgacactccgattaaaacagtggccatcaaaggtcgcttcgctgtttggaactcgcgtcgcggaaaccatcttggccagcggtcatgtgcggccgcatcaacaggccgtacatatgaacgcaaacgatccgatcatttttctacccgaaaacgcttgcaagtgggggccgtccacata

SEQ ID NO: 7625 - DNA, 1488 bp, unidentified
  source 1..1488: mol_type = unassigned DNA; note = element_bd2a219
  misc_feature 1..2: note = core
  misc_feature 3..240: note = LE
  misc_feature 241..1467: note = CDS
  misc_feature 1468..1488: note = RE
  misc_feature 7..236: note = bridgeRNA
ctaatgggactcgaccagcgttgccgagtcggtgatgctggtgccgggccgctgggcggtgagcactttcttgacctgaaaccttccgaggatttctagggctagagcgtgccccgaccagttggttcgggctgcccatcaagcgctcatggggtgtcgtgcttcgagcactgatccattaggtcgcgttcgggaagcccgccggctcacccctgtagaacccgatgcgaggagcacacgatgaccatctttgtgggcgatgactgggccgaaacccatcacgacgtccatctcatgaacgacgccggcaccaagctggcaacgaaacgactacccgaaggactccacggaatagctgccttccatgcgatgctcgccgaccacgccaacgatccatcggaggtgatcatcgggatcgaaaccgatcgcgggatgtgggtccaagcgttgatcgctgcgggctacaccgtgtacgcggtcaacccgctgtcggtctcgcgttaccgggaccgccacaacaccgctggcgccaaatccgacccgggcgacgcgaaactgctggccgatctggtccgcaccgaccggcacaaccaccgcccggtcgccggcgacaccgaccaggtcggcggtctgaaagtactggcccgtgcccatcagaacctgatttgggaccggacccggcacaccaaccggctccgcagcgacctgcgcgagtactttcccgcagcactcgtagcgttcggcgacctgcatgaccgtgacacgattgccgtactgggcaaggccccacaccccgaccaggcccgacagctcacgaccacacagatccgtgccgcgttgaaacggggtggccggaaacgcaacctcgacaccaaagccgccgaggtccaggaagcgttgcggtccccgcagctcgccgcgccgcctgcggtcgccactgcgttcgcagtaaccacacgggcgctgatcgcggtgatcgccggacttaacagcgctattgctgaactcgagaccgaactcgcatcgtcttttgagcagcacccggacgccgacatctacctttcccagccaggactcggtgttgtgctcggcgcccgggtgctcgcagagttcggggacgaccccgaacgctacgacaatgccaagtctcgcaggaactacgccgggacgtcaccccgaaccatcgcgtccggcaagaaacgggccgtgctcgccaggcatgtccggaaccggcggctctatgacgccatcgatcagtgggcgttctgttcgctcagcacaagtccaggctgccgtgcgttctacgaccagcggcgcgcagccgatgatctccaccatcaagccctacgcgccctcgggaaccggctcgtcggctacctccacggctgcctcacaagccggaccctctacgacgagcacaccgcctgggcacaccgacaacaacaagaaatcccgattgctgcttgacaagttacgaccctggggtgt

SEQ ID NO: 7626 - DNA, 1342 bp, unidentified
  source 1..1342: mol_type = unassigned DNA; note = element_bd2c002
  misc_feature 1..2: note = core
  misc_feature 3..329: note = LE
  misc_feature 330..1157: note = CDS
  misc_feature 1158..1342: note = RE
  misc_feature 17..183: note = bridgeRNA
cttgtatgttgcgatcagaggcgtgaggattgattcacgtttcggcggtaaggccgttcgtccctaaggccagcgcaagctgagcctgtcctgtagattggccaccgcccctctgcttgcacgccgtggagaatcgaaggccttttgagcctgcatgttcaaggtcggcgcacgcagtaagtccgttcgcagcggataggagcggcagccgagaccatcctagccctgaaggaggtctatgaacaagcagttttgcacctcggagacaacggtattttgcggcatcgacgtcagcgctgcttctctggctgtggctttgatcaacggcgatggttctctggcgcagcgggagtttccgaacagcgccagtggagttggcggtgctgaacccgaagctggtgaaccggtttgcgcagacgcttcgccgctccaagaccgatgcggccgacgcattggttctggcagagtacagccagcggatgccgttcagccggtggcagcgtcctgaggccagccatcttcgtttgcgcaccatcggccggtatatcgaatcgctggttgtggagcaggctgggttgaagaaccgtttgcgcaccgccgaacagacaaccaccacaccacgcgtggtgctggttgacctgcggcaggcccttgccagctttgagcggcgtgtggcgaagatgcgtcgcgaagcgctcaagatggtgcgcgccgaggccgggctgtgggagcggttccaactgctgaccagtgtaccgggcattgcggaaatcagcgcgatccgcatcctcagcgagcttgttttgctggcgcccaccatgggcgtgcgccagtgggtggcatcgagcggactggacccggcgcatcagcagtccggcaccagcctgcacaagccgtcgcggatcagccgcgcgggcaaccggcatctgcgcgccgcgctttacatgccggccttgtcggccgcgcgcaacgacccgcatatacgagcgttttatcaagcgctacgctgccgccataagacgggtctgcaggcactgatggcggtggcgcgcaaactgctacacgccatctacggcatcttcaaaacgggcaggccgtatgagggcaaactgttgtttccaaatatccagacaggggtagaatcaatcgccgggtgaaacggaagcgggctctgctgggaagcaaccatgccgagggatagcctggcgggctcatcctgacgatgaaccgaaaggcgggcaggggaaaacactgcccgccgcaagatcatcggagggatagacccccatgccttgaaaatccaaccttcgcttcacaaaatgcttgcctttctacagagaat

SEQ ID NO: 7627 - DNA, 1529 bp, unidentified
  source 1..1529: mol_type = unassigned DNA; note = element_bd3365c
  misc_feature 1: note = core
  misc_feature 2..119: note = LE
  misc_feature 120..1148: note = CDS
  misc_feature 1149..1529: note = RE
  misc_feature 1188..1496: note = bridgeRNA
gaatgaaagggacttccccctcccgagcgccccgcgcagttgcgggatacggcatcaaagtgccacgatgggaagtccaatctctcatcaacgcactcgttttgtggaaggggaagtccatgcccatcgtaaccgtaggcatcgatctggccaagaacgtcttcgccgtgcatggcgtggacgcctcaggcaaaccggcgctggtgcgccccagcgtggcgcgcgacaaactgctcgaactcatcgccagcctaccgccgtgcctgatcggcatggaagcgtgctcgggcgcgcaccactgggcgcgtgaatttgccaagcacggccacagcgtgcgcctgatggcccccaagttcgttgccccctaccgcctctcgggcaaacgcggcaagaacgacgccgccgacgccgccgccatctgcgaagccgtcacccgcccacacatgcgcttcgtacccatcaaaaccatagaacaacaaggccagctcatggtgcaccgcgcccgccaaggcttcgtggaacaacgcaccgccacactcaaccgcatccggggtctactgtcggagctgggcatcgtgctgcccctcaaagccgccaccgtgcgccgccaggcactggcgcgcctcgaagagctgcccggctgggccaacaccgtcatcggcgacctgctgagcgaagtcgatcgcctggacgaacgcatcgcccaatacgaccgccacatcgccctgatggcgcgccagagcacccaggcgcagcaactgatgcaactggccggcataggcgagaccaccgccacagccctcatcagcaccgtaggtggcggccacgactttgccagcggccgcagcttcagcgcctggctcggcctggtgcccgggcaatacagctcaggcggcaaacagcgcctggggcgcatcaccaaggcaggagacagctacctgcgcagcctgctcgtcatgggcgcgcgagcggtactggccgccgccatgaacacccgaacgcccaagcaagacagcgtcagccgctgggcacgcagcctggccgagcgacgcggctactggcgggccgtggtggccatcgccgccaagaacgcacgcatgtgctgggccgtactgcaacgcggggagggcttcaagatgcccgcctgaagccagtcacagcgcaacagcaagaacagcaaagatcggaacaccaccgcgtgaaggcagtcgttgatgagcaaagggtaaggacctgcgccggggaatgctcgatgaactctgggggaatgaagggagaaatccccaaatcccgactaacgaatggagcccctggcgcgcgtctttcatcagggtttgctgccaggcaaaggcagcgtcaataaccgtttgtagtcacgccgtccgcaccgtttgccaagaagcattggcgcactgcacgcacgcggctggaagctgatcgctggccaaagagcaaaccgatcctgggtcgatcgctgcgcgatcaacccaggcagaggtgttgcttgcgaaggtggggaagcccttgta

SEQ ID NO: 7628 - DNA, 1219 bp, unidentified
  source 1..1219: mol_type = unassigned DNA; note = element_bd3d9fa
  misc_feature 1..2: note = core
  misc_feature 3..205: note = LE
  misc_feature 206..1195: note = CDS
  misc_feature 1196..1219: note = RE
  misc_feature 12..189: note = bridgeRNA
cttgtatcttatcccatgtggtgattagctatccccacatgggacagagagagtttcaacgggcggcaaagataaaccttgtgattgagttaaaaccctctgtttcacctttcacgccagcattaacattgaacggttacctagagcactgactctgaatgtacaagcggaacgggcgtgacggcttcagtgaaagggggacattatgtattacgtcggcattgatatcagtaaacgttttatcgatgtgtgcttattggttgatggcattaaaggtaagcgtaagacaaaagttttacccaatggcacaaactcgacagaatctctggcgcaatggttagcgttgcaaaagtgcgagcccgtccaggctcatatcataatagaatccaccggtatttatcacgaacacctgacctatggtctccatcaggctggtattctggtgtccgtgataaatccacatcggatacgagaattcgccaaaggaatggggatattgaccaaaacggataaggttgatgcttatgtgcttgcctgttacggctgcttaaaacaaccggatggctggtctcccccttcggaagaagtaaggaaactcaaggcattgctacagcatagggataatctgctgaatgataaacaacgcatagaaaatcgtctgaacacgttaaaatccacaagatctccagaggaaattttggggtcattggaatcgattgagaaaaatttaaaggatgagctggcaaggattgagcgtctgatcgcggatcacatagataagtatcccgggctaaaaaatgacctgaaacttctgaagtcgattagtggtattggtgaacaaatcggatggaacatgctagcaataatccgaagcaataactttaggagtgcggaacaggtggcctcatatctgggagttatcccggttgagcgtcgctcaggcagctcagtacgtggccgggcaaggttatcaaaaatagggcctccgggtattcgggcaaaactctatatgggtgccatagccgccatcagccataatcatcatgtgaaagcgcagtacgaacggctattgctaaaaggaaagtcgaagatgttggcaataggtgcggcgatgagaaaactggtccatctgtgttatggcgtacttcacactcagcagccctatgataaaaattatgggatgatgccccattaaaatgcttgaccggcaacacggtta

SEQ ID NO: 7629 - DNA, 1583 bp, unidentified
  source 1..1583: mol_type = unassigned DNA; note = element_bd5201b
  misc_feature 1: note = core
  misc_feature 2..249: note = LE
  misc_feature 250..1458: note = CDS
  misc_feature 1459..1583: note = RE
  misc_feature 6..226: note = bridgeRNA
tcgtattataaagtcaaccagctctttctggttgatccttttttcattagctttaagaattaaggtagccgggtcgaacgtacctgcccgtgggacttgatcccgagagctataatgttcacccctacttgtcatgaccatgattgaggctggttgggacgtgagatcccgtataacaagcgatgctatggagcgacaagaggaaatcacaggggctgccggtaaatctaaattaggaaggtgcattgaatgaatccagtgattggtctggatatttctaaagatgaaagccatggacaggcctttttagagcgaggtaaaccgtacaaagggacgtttaaattcgaacatacccgagaaggactgacaaagctacttcaagctgttcaggatgttgaacatgtttctggactacgtcctatgctacttctcgaagcaactgggcattaccagagtcccgttgttcagttcttagaggagcatcattatttgtacattgttattaatccactcatctcaaatcggcttagaaagtccaaccttcgaaaggtgaagacggatgctgctgatgcctatctgttgggagagttgtactacaaagaagaatttgagccctttaaaaaaagaggtgttcaactgctaaatctgcgttatctaacgagacaatatgagtctctttcaaagatgtgtgtacagactaaactacagttccaagctgttcttgatcaagttttccctacttacaaaggtgtttttggggccatctattctagtgtctcacttcgttttttaaatgagtttccaacttcatatttggtattgcaatcggatgaagaaacactaaattcaaaagttaaagaactgcttccctcgagacgagggcggtcagagaattggatctgtgtgcgagttaagcgtctattaaacgcggcaaaacaaaatccttttcagcagactatgtactctagtcacttggttaacctgagagttttgatttcgctcattcttcagtaccaagggcatctatctcgattggaagagaacatagatgctctcgctgaagaaatggaagaatatgatttaatccagtcgattcccggtattggtcctaaaattgctgcaacaattttatcagaaattggagaagtcgaccgttttgatcatccaaagaaactagtagcctttgcaggcattgacccgagtgtatttgcatctggaaagtttacggcaacacggaatcgaattaccaaacgtggttctcggcaacttcgttatacgctagttatggccgtccagtgtggactcatccgttctcgtaatctgcgacttaaagattcttatgatcgcaaaagagccgaaggaaagccacataaagtagctttaatagcatgcgccaataagctggttcattggctttatgtcatcctgaaaagtaaaaaatccttccgcactgcctaactattttatattggtataaccttccaaaacaaagggattggagggttatttgtcatgcttatttttactataccacatgacttaagttcattttactggtaatcttgacaagctattagctggta

SEQ ID NO: 7630 - DNA, 1407 bp, unidentified
  source 1..1407: mol_type = unassigned DNA; note = element_bd5dcc9
  misc_feature 1..2: note = core
  misc_feature 3..78: note = LE
  misc_feature 79..1122: note = CDS
  misc_feature 1123..1407: note = RE
  misc_feature 1121..1394: note = bridgeRNA
tgttggggtggacggccgccggcggcatcaatgtgccagaatgaggtcgtagctgatctcagacaaaggagaccgtccgtggaacagattatccgaattggcatggatacgtcgaagcatattttccagcttcacggggtgaatgcggcggaggcgccggttctgcgcaagaagctgccgcgcaaggcgatggtggcgttcttcgagaaacttgaaccgacggtgatcgcgatcgaagcttgcggtgccagccaccattgggcgcgactgctgcaatcgtttgggcatacggtgaagctgataccgccacagctggccaagccctacgtcaagcggggcaagaacgatgcggcggacgccgaggcgctttgcgaggcgatgagccggccgacgatgcgtttcgtgccggtgaaatcggctgagcggcaagcggccttgatgctggtcggagtccgcgatcggttgattcgcactcgcacccagttggccaacgccatccgcggctatgcggccgagttcggcctgactgcggccaggggcatggctcacttggttccgttgctcgagcgcttgcaagccgatgagagccttcccggtctggcccgtgagttgttcgccattcaggccaaggaatatgcgcggctgcaggaggggattgccgcggtcgaggccaagctcatgacctggcatcgggccgatgaacgcagccggcgtcttgccaaaatccccggcgttggcccaatcggtgcgatgctgctgacgatgaagaccccggagcccgcgctcttccgctcgggccggcagtttgcagcctggatcggtttgacgccgaagaatcattcgaccgcgggcaaggtccggctcggcgtgatcactcgcgccggtgacgaggcgttgcgaagcacgctggtggcgggagctacctccattatccggcagcttcgaaacggacacggcaggcatgcctcgccctggctcatcgagcttgtcaagcgcaagccgccgaaattggccgccgtggcgctggccaacaagatcgcccgcatcgcctggaagatgatggtgagcggcgaagtttatcgcgtaaaagccatgccaccgactttggcgagggtggcttaagcaatcagccagacacggagagcaactcatctgcaaccgtgctgagccgatgccaggacttgcaagataaggagcagatggtgtgatcgatcgatccaagacgcgagatactccgattgagccaatggccctctatgaggtcgccaagttgtttggaactcgtgtcgcggaaaccatcttggccagcgttcatgtgcgagcgcaccaacaggccggacatatggacgcaagcgatttgatcaaatcatcgttcaacaatcttgcaaggaggcggccgtccacata

SEQ ID NO: 7631 - DNA, 1299 bp, unidentified
  source 1..1299: mol_type = unassigned DNA; note = element_bd619ad
  misc_feature 1..2: note = core
  misc_feature 3..260: note = LE
  misc_feature 261..1262: note = CDS
  misc_feature 1263..1299: note = RE
  misc_feature 44..212: note = bridgeRNA
cttgtatattaaacatatctcttaaacacaggattatttaacacaaaacaattatagtaataactgattttctggggaagccggcccctccttaagcttcgagcttgtacgtagattggctccccaccctcgtcatccatgccgtggagtatctgagacctgtaagctatgcttctgagtctgcattcacaaggacggtaggtgaagtgtcagggttgggaaaccagtgatcattataatacttaaatatgagataaaaaatgaataccataggaattgatgtaggttgtaaggaattagtggtagtcgtcatggttaatggcaaagcgcgtcaagctaagtcttttgataatacccctttaggtcatcaatcaattattcaatctttaacaaaacttaaaggcgaatcaaaggtttgcaccgaagcaacaggtgtctatcattttgatttggctgtcgctcttagccgagccaatgatattgaggtgatggttattaaccctaaagcggcacataattttgctaaagcattaatgacgcgtagcaaaaccgatgcaattgatgcagagaacttagcgatttatgctgaaagaatgccttttgaagcttgggatcgccccgccgatgagtgtattggcttaagagcaactgcacgccgaattgccgccttaagtaagcaaaaaacgcaaactaaaaaccagcttcatgctttaaaatcaacggtggaaacacccacactggtgattgaacagacggagcagttaattgatattttagatgtacaaattaaaaccctacgcgacagtgccattaacatcattcatcaaaatgaaggtctggagcaggcttatacattaatcactgggatcaaaggaattgcccaagccacagctatacaaatactgagtgaacttatgatattgcctaaggatatgacggcacggcaatgggttgctcatgcagggctagatccaaggatatttgattcagggagtagcgtgtctaaaaaaccacggattagcaaggtaggaaataaatatattcgccaggccttgtatatgccagcattggttgcgagtcgctttgaacccaatattaaaggctattatcatcacttaattgatgataacggcctgaaaaaagtacaggcggtctgtgctgtgatgcgtaaattattacacgccatccatggcatgttacggacaaataaagaatttgatgggacccgtttttatacgttacctattattactaattcatgaaaatatgaatatttacgcttgcgttttaatagagtat

SEQ ID NO: 7632 - DNA, 1437 bp, unidentified
  source 1..1437: mol_type = unassigned DNA; note = element_bd66b27
  misc_feature 1..2: note = core
  misc_feature 3..150: note = LE
  misc_feature 151..1005: note = CDS
  misc_feature 1006..1437: note = RE
  misc_feature 1206..1437: note = bridgeRNA
aaatgtgatgaacgcatcccactctttaaatacggagcagaatgatggttgaaagagataagtcggcaggtgtggagcctcgcagatttccggcatcatagtgcccaatacaggatacataaagttccctcagactggaaactccacaagatgaaatatacaccggttggcgttggtatagcaaagcatctgattcaggttcacttcatcaatgagtatacgggtgaagtggttgataagcaggtgcgtaggcaggattttatgacgtttttcagtaacagggaaccctgtctgattggcatggaagcctgtggaggctcgcagtactgggcgcgcgaactgacaaagctgggacataaagtccggctgatgcagggccggctcgttaaagcgttcgtcatgggcaacaagaatgacgtgatggatgctcatgctatctggatggctgttcagcaaccgggcaaggagatagcagtgaaaacagaggagcagcaatcagtactggttgtgcatcgttcacgccgacaactggtgaagttccggacagcacagattaacgcgctgcacggaactctgctggagtttggtgaaaccatccacaaaggtcgggcagcgatggacagggagctaccggctgcgctggagcgactgaaaacgaagttgccgccgtatctcatcaacgtgctggaagaccagtaccacaggctgagtgagctggacacgcagatcgatggccttgaaaaacagcttatcagcgtggtgaggcataatgaaacctgcaagcggctgatagaaatccccggagtgggtccgttaatcgccacggcggcagtcgtcactatgggagaggcatcggcgtttaaatctggtagggagttcgctgcttatgtcggcctggtgccaaaacagacaggctctggggggaaagtgcgcctgccggaagcaagcgtggcgatacctatctgcgaaccctgtttatccatggtgcgagagcagcttcattagtcgctaaagagcccgatccatggataacggaactgaaaaaacggcgcccgactggagtgactattgtggcgatggcaaacaaactggcgcggacagtatgggcgatagcggctcatggacgtaaatacgacaaaaatcatgtcagtatcaggtcgtattaatcgccgataccgataaatataaactcttaactataagggtgaatgcagaaaggttgctctagcggccagcgtgatgacaaagacaggtaagaccttgactcgctaaacctgaattgtttactgggtgtgaaacccgccggagaaataaggtgtgggtcagcggatcacatagggactcgcagcttatggctgcaaaaagccggatataaagctgcaacctatccgtcaatgtcaaaacaatggatgctgtgcaaacgggatgcgttcatat

SEQ ID NO: 7633 - DNA, 1149 bp, unidentified
  source 1..1149: mol_type = unassigned DNA; note = element_bd6ccbe
  misc_feature 1: note = core
  misc_feature 2..208: note = LE
  misc_feature 209..1135: note = CDS
  misc_feature 1136..1149: note = RE
  misc_feature 15..191: note = bridgeRNA
cttgtgtctgggttttgccctagggtttgggttgagagcggggtgcgggacgccgctgttgcgcagtgctcgaaagcacgggtaggagcaagggcgcccgcaccccatcaccagaccaagcccgaacagttgtgcgagttagccgctcgaaactcacaagcgtgggccagctggtgtgctctccggtccagtctaggggagaaaaccgatgtcggcattcgtgggtatcgacgtggccaaggccagccttgccgtggccgtggttccgggcaatgtgcggtttgaggtcagcaacgacgccagaggccatgcccagttggtccgatggctgggtaaacagcccgtccatcggatcctgctggagtcgaccggcggctatgagagcgccgtggtgcaggtcctggccagccgctggccggtggttcgggtccctgcgcaccgcgcccgggccttcgccacggcgatgggcaagtcggccaagaccgatccgatggatgcgttgatgctggcccggatggctgcggtgaccgaggggccgaccgtgacgcccctgacccccgccaaggcccggctccaggccttggttcgtcgtcggggccaggtggtggcccatcgtgacgatgaacgtcgacgcctgcaccaagccaccgagtccttcgtccgccagagcctgcaacgccagatcaagcatctgcagggagagatcgcgcgactggaccgggagatcgaggcctgtgtgccggactgcggcgatgagcgcgcggaccggctacgggccgtgcccggcatcggggcggtgaccacggctacgctgctggccttcctgcctgaactggggcagttggagaatcgccagatcagcgccttggtcggcctggcgccgtacaactgcgacagtggcaaccatcgcggcgcccgccgcatccacggcgggcgcggggcggtacgccgcgtcctgtacatggccgcgtggagcgcggttcgccaccagcccgacttcaaggcacgctacgacgccctcagggccaagggcaagtgcgccaaagtcgccctggtggcctgcatgcgcatcttggccatccgactgaacgccatgatcagggaccggaccgaatggaggtcttgtccggtctgatcaagacagttgct

SEQ ID NO: 7634 - DNA, 1391 bp, unidentified
  source 1..1391: mol_type = unassigned DNA; note = element_bd74f66
  misc_feature 1..3: note = core
  misc_feature 4..91: note = LE
  misc_feature 92..1120: note = CDS
  misc_feature 1121..1391: note = RE
  misc_feature 1091..1378: note = bridgeRNA
agatggggtggttgccgccctccccaagtggcatcgttagacgctatcatattttagagcgtgtttggaccagtagcggagaggactacacatgacggaagtgatgatcggggtggatcttgcaaagagcgtcattcagattcacggtgcatcgatgtcgggccggttgctctttcgcaagaagctgtcgcggggacagttcttgcgtttcatggaaagccagtccggggctgtcgtggtgatggaagcttgcagcagcgctcactactgggcacgggaattggcgacgctggggcatgaggtcaagctgatcgctccgcaatatgtgcgacctttcgtgaagcgtcagaagaacgatgccgctgatgccgaggccattgttgtcgcggcacagcgacccgagatgcgcttcgtagaacccaagtccgaagatcaacaagcgaaagcggtgttgttccgagcgcggaagcgtatcgtgcgccagcggacggaactggtgaatgcgctgcgcgctgtactttacgagtatggccacgtcgttccgctcgggttaggccacatcaagcgcatggaggcattagtcgatgatgcggatagcgccctgccgaaactcgtgagggaggaatgcagcgatcttctggcccagatcagcgaaaagaccgcaagaatcgaggacaagacgaagaagattgccggacttgcacagcagagcaatgttgcgcgacgtctcaagaccatgccaggcgtaggcccgatggtagctcttgcggtagaggcttttgccccggcaatggacagcttcaagtgcgggcgagattttgcggcttggctcggtctagtcccgcgacaattctcttcaggcggcaaagaaaggctcggccgagtgtccaaagccggtcaggccgacatccgcagactgctgatcatcggcgctatggcacgcgtaagctgggtgagccgtcgatcgccagtgcagggctcatggctatcgcggatgctggctcgcaagccgagaatgttggtggcgatcgcgctcgcaaacaagatggctcgtaggatgtgggccatgctgacgaagcaggaagatttttgtgatccgatgttggccgtagcggcatgagctgatgctgaacgctgaggactaacaccggttaggaggtgtgagaagtcgatgacctgaatgggcgcatgatcgaaccgatccggatggggaaaaccagggacatttctggagctcgcaagctcggaaagtagatttggacccgatccgctgatcaccataccggccagcggcttatggaagtgccgcacaaaaaggcctgacagaagaccgcactcgatcacatgttcaaaaggccaaaactgcttgcactacgggcggcaaccacaga

SEQ ID NO: 7635 - DNA, 1435 bp, unidentified
  source 1..1435: mol_type = unassigned DNA; note = element_bd78734
  misc_feature 1: note = core
  misc_feature 2..138: note = LE
  misc_feature 139..1164: note = CDS
  misc_feature 1165..1435: note = RE
  misc_feature 1195..1432: note = bridgeRNA
aaatggtatggacgcctcccacctgactgagccgctggtgcgaggggttgggtgaagaggacccgccggtgccgacggcatcaaagtgcccaagggtgaaggattacgatctttcacaggcaaccggagggtcccgagatgaagcttaacgtggtcggtgtggatatcgcaaagcgtgtatttcaactgcattgggtggaagcggacggcggagagatcgtgagcgtgcagctcaagcgcgagaaatttctggagcattttgccaatcgcgtgccgtgcctgattggcatggaagcctgtggcggctcgcagcactgggcgcgggcgctgcagaagcaggggcacgaggtcaagctgatgtcggcgcgttgggtgaagccctttgtcggcggcaacaagaacgatgcggccgatgcgcgggcgatctggacggcggtgcaacagcccggcatcaagacggtggcggtcaagagcgaggcgcagcaggcggtgctggcgttgcatcggatgcgtcagcagctggtgaagttccgcacggcgcagatcaatggattgcgcgggctgttgaccgaatatggcgaagtgatgccgcagggccgagccgggatcaagcgagatattcccggagccctgcaacgcctggcggatcgattgccgacggtactgatcgatacgctgcgcgagcaatttgcacgcctcggcgagctcgatgcccagatcctgcagatcgagcgtcggctccagcagtggcaccagcaggatacggacagtcaacgcatcgcggcaatccctggcgttgggttactgaccgccactgcggcggtggccaccatgggggatgccaaagcgttcaaatccgggcgcgagttcgccgcctggctgggcctggtgccgcgccagagcggcaccggaggacgggtgcggctgctcggcatcagcaagcgtggcgacaaatatctgcggaccttgctgatccacggggcgcgctcagtgttcacgaatagcaaagcgccgcccgagtggctcacgaatctggcgcagcgccgaccgaagaatgtcgcagtggtagcgctcgcgaacaagatggcacgcacgatctgggctttaacggcctatgagcggacgtatcagcaagggtacgtgtgtcagcccgcagcgggctgatgtacgtggtatcaatcactttgcagaggagggcacgctaacaggttgcgcaaggtcgtaccacgtgtgatggcaaacaggtcagaccgtgacccgccaaacctgcatggttgctcgggcttcgagcccatcggagaactgaggcgcgggtcagcggaatccatcagggcccgcaggcttcggcctgcacaaacaggccggatataaacctgcagccttatctgtcggtcatcacaccgaaaaccccttgccatcgggaggcgtccatata

SEQ ID NO: 7636 - DNA, 1363 bp, unidentified
  source 1..1363: mol_type = unassigned DNA; note = element_bd7cf26
  misc_feature 1..3: note = core
  misc_feature 4..84: note = LE
  misc_feature 85..1119: note = CDS
  misc_feature 1120..1363: note = RE
  misc_feature 1098..1350: note = bridgeRNA
tgatggtgtggacggcgctcaccgggcggcatctgcgtgccatgatgatggtcgtcgaaccgtttcatcagaggagcaccgtccatggaaagcattaccaccgttgggatcgatctggccaagtcggtctttcaaattcacgcgatcgacgccgccggcaaggtggttgtctccagggccattcgccgccgggatttcatggccttcatgaaccggttgccgccttgtctcatcggcatggaggcgtgcgccagcagtcaccattgggctcgccagctgaaggcgatgggccacgaggtgcggctgatcccgccggcctatgtgaaggcctatgtgcgccggcagaagaatgacgcggcggacgcggcggcgatctgcgaggcggtgacgcgtccttcgatgcgcttcgtgccggtcaagaccgaggcgcggcaggcggcgctgatgatgcacaggacgcgggccctgctggtgagccagcggaccgcgctgatctgcgcgctgcgcggccatctggcggagttcggcctggtctcgccgagcggcccgcgccacctgaccccgctgctggaattgttcgcaagcgaagaggacgacagccttccctgtcaggcgcggcgggcgctctggccgctcgtggaccagctgcgctcgctggaatgccagattgaaggcctggaccgccaggtgctcgaacagcaccggtcggacgagaccagtcaaaggttggcgaccattccggggatcggcccgctgaccgccagcgccctggccgccagcgtcaccgatccggcgatgttcgcctcgggacgcgagttcgccgcgttcctgggcctggcgccgcggcaggcttccagcgggggcaaggaacggcttgggccgatctccaagatgggcgaccgatacttgaggaccctgctggtcgtcggcgccgcctcggttctgcgacaccccaggaccagcccgtcagccatgaagacctgggcggtgggcctgctggagaagaagccgttcaaactggcggctgtggccctggccaacaagatggcgcgcgtcgcctgggcgatcatgacgcgcggcgaaaccttccgcgatggagttccggccgtggccgactgaaccctaaccgcgccccgatcttggcgagggctatgagatgatgcgaccggtcagaccggtgagcgggacactccgatgcactgtcggcgcttcaaagcgcgttacggtgatgggaacccaggctcagcggacgacatcagggccagcggcaagaacgccgcatcaacaggccggacacatgaccgcacccgaccaggccgcagcaatttcgctgatcacttgccaagagagcgccgtccacaca

SEQ ID NO: 7637 - DNA, 1353 bp, unidentified
  source 1..1353: mol_type = unassigned DNA; note = element_bd80620
  misc_feature 1..2: note = core
  misc_feature 3..223: note = LE
  misc_feature 224..1099: note = CDS
  misc_feature 1100..1353: note = RE
  misc_feature 1075..1341: note = bridgeRNA
tgatggtgtgcccccccgacggcatcgatgtgccaaggtgggtctgcaaggatccacaaaggagagcggtcatgtcggagattatcacggtcgggctcgatctggcgaagaatgtgtttcaggtccacggtgccgacgctacgggccgggcggtgctgcgcaagaagctgcgaagagatcaggtctggcattctttggacagctgccggcctgcgtcgtcgcgatggaagcctgcggtggcgcccatttctgggggcgcgagatcgggaagatcgggcatgacgtgcggttggtcccacccgcctacgtgaagccattcgtgaagcgccagaagaatgatatggctgatgccgaggcgatctgcgaggcggcgacgcgcccgacgatgcgcttcgtgccggtgaagagcgaggagacccaaggcgcggcgatggtctttcgcatccgcgagttgcttatccggcagcgaacccagaccatcaatgccctgcgcgggcatctgggcgagttcggaatgatcgttccgcagcgcgcggccaacatgtcgaagctgattgccattgtggaagacccggaaagcggtctgcctgccgatgccatccccacgctcaaggtgttggtggcgtcactcgcccatctcggagcggaaatcggcaagctcgatgccgagatcgcccggtgtgccaaggagaatgaggtggcgcggcgcctgatgacagtcccggggataggtcctctgattgccacggccatagcggttctggctccgccccccgagacgttccgcaaagcgcgcgacttcgcggcctggctcgggctcacgccccgtcagcattccacaggaggcaagcagcgtctcggggccaacacgaagatgggcgaacggtcgttgcggcgattgctgatcatcggggccaacagcgtcatcatcaagcggcatgttcatgccgctgcccggccgggcacatggcttggcgagatgctgacgcgcaagccgccgatgctggtgcgggtcgcgctggcgaacaaaatggcgcggatcgtctgggcgctgatggcccgaggcggcgcctaccagtctccgaccgctgcggcgtaagccgtcactggtcgcgaggacgtcggagcggaagagggcaaggagacgtttggcgcacggtcgtgagacgggatcgggagaaccagagcgcaacagagtgccatcgagcacgcggctttgatctggacccgacctgcgaacaccatacgggcccgcggcgtgatgatggccgcaacagaggccggatacatgtcagcacccgacaccgcgcgaaactgatccagaaaccctcttgcgcaaggggcggttataca

SEQ ID NO: 7638 - DNA, 1859 bp, unidentified
  source 1..1859: mol_type = unassigned DNA; note = element_bd845e7
  misc_feature 1..3: note = core
  misc_feature 4..76: note = LE
  misc_feature 77..1234: note = CDS
  misc_feature 1235..1859: note = RE
  misc_feature 1290..1509: note = bridgeRNA
aagatgctatggggcaggcggcgaaacacctaagctcgtcgcttctatcaatcggcaaattgacaggagctcccctatgcagaagcgccacgacgatagcaaagcgtgcctcaccgccttcgttcaggataacacggtcatagccacaattgaaatgagcttggcgagttggttggtcgccgggatgattcctggcgtcaatcgcgaaccgctgaagaaaattgctcctgatccagaggtgctgttgcggctgttgtatcgctggcgtgacgaagccatcaaggctgggaaggagatcacccggattgccgtcgcatatgagaccgggcgcgatagcttttggttggcccgttggctgcgggatcgcggcattgatgcgcaagtgatccatgccaccagtgtggccatctcgcgcgagcaccggcgcgcaaaaacggatcggatcgatacggcgatgctgcgacgtggctttcttgggtggttgcgcggtgaacgtggccactgcagcatggccgtcgttccgaccatagcagaagaggatgctaagcgtccgcatcgcgaacgtgaatcactgattaaagagcgaaccagcacgatcaaccggatgaagtccatcctagtgcagttcggagtgcgcaacttcaaaccgaccttgcgcaaggcggttgagaaaatcgacgcggtgcgaacacccgaggggatccctctgccacccaacgcatctgcagcgcttcggcgtcacattgagcgctttcgcctccttaacgagcaaattaaaaccatcgagaagacacgactgcaacgtctccgggaacaccccgcgggcaaattcaacgccatggtttttctgctcgtgcgaatcatcgggcttggcgtcgagacagcggaacaactggtgcatgagatcctgtcgcgtaaactacgcgaccgcaaagcggtggcgcgctacgcaggggtgaccggttcgcccgacgaaagcggactcagccgccgagagaaagggctttcccggtccggcaacgggcgggtgcgtaagattctggtccagttgtcttggcggatgctgcagttccaacccgacagcggcctggtgcgttggtttaaaaaccgtactgcaaactcccaaaggtcgcgcaagccgatgattgtggcgcttgcacgcaaattgatcatagcgctctggaactatgtgaacacgggtgtggcgcctgacggcttcaagttagcgaaataaatcaaagcgtagtatcaacagggagaaacaaatcatcagtctttggccgtactggcgcttctgagcgccgatctgccaaaaaacgacccgaggtagcggttgctcgccacaccctatggctttcatgccggatataagaatgggcaccgctgcttcggagcctcgctgtcgatgcgtatatctgcatcatggtttggatccactgttgggtccaccgcatggaaggacgtggcaacgatcggccactggaagcgggctccgcctcgtgtcgtgttctcttcgttgtacaagttccccagggaccattgcccatggctgttgtcccgcgaggcaaaaaaggagggttgtgatagtcccgtcttggcgcggttgatcttgctgttgcgatctctggtatcgtgcgtctggggttagtccggctctccgtcgccgcaggccgagatcagcgaaacacccgggccgtccgcgacgggcggaacgaaggacggagtttgtcgtcgaccttggtatgcttgccagggtggatcgctaggagtctctacttgctagctcatcacactgctgagcgcccaaaagaaagaggtgtttgtcgcaaatttcgtgcttgacatcgaagtccccatgg

SEQ ID NO: 7639 - DNA, 1543 bp, unidentified
  source 1..1543: mol_type = unassigned DNA; note = element_bd88477
  misc_feature 1..2: note = core
  misc_feature 3..248: note = LE
  misc_feature 249..1421: note = CDS
  misc_feature 1422..1543: note = RE
  misc_feature 6..222: note = bridgeRNA
ctcgtattatagtgtcatagccttttctttaccttttctacaggttaggttatgctgttgaagatgctgtggattggtttattgttcctaccgcattgacggtttctgaaaggctccaaccacagcctctttgtctcattgttgatcagttagataccgcacgacggtttatgtagaacgaggttacatccggcagagagctctgtgggtcatcagcagcatcaatacactattaggaggatctgattatgatctacgtcggcatcgatgttgccaaggacaagcacgattgctgtatcctcggctctaacggagagatcctgttctctccattcaccattcagaacacgctgcaaggattcgatgagctctatgagaaaatcttgtctctgacctcggactcgacagaaataaaagtaggtcttgaggctaccggacactttcatctcaaccttctgcgttcgctccttgataacggcctgcccagctttgttatcaacccgttgcacacaaatcttttcagaaaaggtcaaagccttagaaagaccaaaacggataaagtcgacgctgcttcgattgctatgatgttgcttaccgataggacactcaagccctactcgaatacatcataccacaccgaagagttaaagtctctcacaagataccgttttgacaaagttcatgaacgtgccaggctaaaaacttccgtatcaaggcttgtaagtatcctgttccccgagctggaaaagctggtgccgactcttcatatggcgtccgtctatgccttgctttccgagttccctggtgcatcgttcattgcctccgcccatctgactcgtctaaagcacctgcttcaggatgcctccaaaggccattatggaagagatatggctgtgtctatccgcgatgcggcatctgcatccatcggttccgtccttccggccaaatctctggagctcaagcacacaatccgtctcatcgaaattctgaccgaggaaatagacgagatcgaagttgctatcaatgccattatggatgcgatcgagcccccaatcattacgatccctggaatcaggaaccggatgggcgccatgattctggctgagatcggtgacttctcccgttttgatagcccggatcagatcctggcttatgcgggtctgtctccaaccacatatcagtccggacaattgacttcttcctatgctcacatggagaaacgaggttcccgttaccttcgatacgccctgttcaatgccacgcagtatgtctgtatctgggacccgacattcaaagcctatctggctaaaaaacgagcagaaggaaaacactactttgttgcagtatcccatgcctgcaaaaaacttgtccgtgtcatctacaaaatacagctaacaggggaaccttaccgggcagtctgagtctttttcatccctttctgaacgagcaccctttctggatgctctgtttgtcatgcagttttcaaggtactcatttatctgaacgaattttttcgattcaggcttgatatttaatagttagt

SEQ ID NO: 7640 - DNA, 1382 bp, unidentified
  source 1..1382: mol_type = unassigned DNA; note = element_bd89fe4
  misc_feature 1..3: note = core
  misc_feature 4..89: note = LE
  misc_feature 90..1118: note = CDS
  misc_feature 1119..1382: note = RE
  misc_feature 1147..1369: note = bridgeRNA
agatggggtggatggctcccgctcacggcatctaagtgccaatcttgtggaagttatcgagacagccacaagcgaggggagccatccgaatgaagattaccactgtcggccttgatctggccaagaacatctttcagattcacgcgatcgattgcgacggcactgtcgtagtgaagcgagcgctgcgacgcgcgcaagtactgacgttcttcaagcagacgccaccctgcctgggcggaatggaggcgtgtggaacatcgcatttctgggcacgggaggtggcaaaattcggccatgaggtacggctgatgccgccttcgtatgtgaagccctatgtgaagcggggcaagaccgacgccaatgacgcggaggcgatctgcgaagcagtgacgcgtccgacgatgcggtttgtaacggcgaagtcggagcagcaacaagcggcgctggcgttgcaccggacgcgcgatctactggtcaagcagcgcacccagttggtcaatatgatccgcagcttgctcgccgagttcggcatcgagatggcgcgcggcctgcaccatgcgctggaactcgccggccgcattgccggtggaaccgcgccgaatgtacctgagctcgccgtgcggatcatcaccggcctggcgggtcagattcgcgacctgcagatcaggttgacggcgctggaaaaggaactgctcgcttggcatcggacgaacgtgctgtcgcagcagctgagtacgatccccgggatcggcattatctcggcgagcgcgctagctgcgtccgtcaccgacccgagccgattccgctccggccgacagtttgcagcgtcactcgggctgacaccgctccagaactcgagcggcggaaaagaacgaatgggacggatctcgcgcatgggcgatcgctatctacgacggcttctcgtcgtcgggatgacctcgcttgttcgtcgagcgcggacgaagccaagtgcggtggatccgcggatcctgaccttactcgcgcgcaagccagcacgcgtggcaaccgtcgccatggcgaaccgtgcggcccgcgtggcttggtcgatcatgacccgcggcgagacttaccgcgcacccgccggcttggtcgcataacagtttagctgaaggtcacttcagcttcaggaggttgcgagcgcgatgtgaagtgatggcgaaccggtcagaccgggagttgggacaccccgccgaatgtctaaggcgtcagagcctgcaaagcagagtgggaccgaactcgcggataccatcagggccagcagtctttgaaacgactgcatcaacaggccgaacacaagactgcacccgaccgcctcgacaaaacttcaaatcgacacttgcaacgcgggagccatccacaca

SEQ ID NO: 7641 - DNA, 1340 bp, unidentified
  source 1..1340: mol_type = unassigned DNA; note = element_bd98dba
  misc_feature 1..2: note = core
  misc_feature 3..70: note = LE
  misc_feature 71..1093: note = CDS
  misc_feature 1094..1340: note = RE
  misc_feature 1065..1319: note = bridgeRNA
cgttggggtggacggccccgcggcatcttgtgccaaagttcggttgtcaacactgaacaaggagccgtccatgattgagattacacgcatttccattgatacgtccaaatctgttttcacgctgcatgctgtggacgctacgggttgtcctgttttgcggcgcaatcttcggcggcaggatgtcatcccattttttgagaagttgccaccggttgaggtagtgatggaagcttgcggtggctcccatcattgggggcgagtgctgcaaaagatgggccatcgggttcggctgatcccggcgcaatatgtcaaacctttcgtaaaacgctcgaagaatgatcgcaacgatgctgaggcgatcagtgaggcggcggcgcggccgggcatgcgggaggtggctgtgaagtcggccgagatgcaggcgcaagcgatgctgctttcggtacaggagctgctggtcaggcagcgaacgcaactgatcaacgcgctgcgcggccatgctgctgagctgggcttggtggcaccggtaggggacaagggttttgttgccctgcgtgctgaagtggcggcggatgcatcgctgccggcggcagctgttgaaacactacgtctgctgggcagcgaggttgaccgggtggaagcacggcttgccgagatcgatgcgaaggtcatggcgcagcataaagcaaatactgatagccgccggttatcggcgattcccggtgtgggaccaaagggcgcgctgaatttcacgctacgggtcgatgccgcccagttcaaatcaggccgtcattttgctgcctggcttgggttggtgccgcaggaacgttcaactggcggcaagcaaagattgggcagtatcagcagggccggtaacgaacggttgcggcagttgctggtgctgggcgccaccgctgtaatccaacatgccaagccagggcgtgatggcgtctcaacatggctgttgaaattgctggagcgcaagccgcgcaaggtcgtggcagtggctctggccaacaagatggcccggatcatctgggccatgctgacgagaggtgaaagctatcggccggcagcgccggtggcagcttaaaccctcgtcaggccgctggtgcaagaaagggcaaaaggacaagatgctgatcggtcgaaccgatgatccacggaacccgtgtagggtggcggcctttaaggtcacaagtccgtttgggtgtggatcgcggtacccatctaggccagcggacgtgctgccgcaccaaaaggccggacacacgaacgctgtcgcaccaggtcagattttttccagtctaccctcttgcatccaaagggccgtccacaca

SEQ ID NO: 7642 - DNA, 1490 bp, unidentified
  source 1..1490: mol_type = unassigned DNA; note = element_bda25c6
  misc_feature 1..2: note = core
  misc_feature 3..205: note = LE
  misc_feature 206..1474: note = CDS
  misc_feature 1475..1490: note = RE
  misc_feature 9..204: note = bridgeRNA
ctgatggcagtaccttctttcgtcatcgggagcctccgaggaacgctttgggtgcttgtccctcgaggactgacatgagacggcgtcctcggaggtgaccggtggaggtctgacgccttcgaggatgttgtcccgtgaggactggtccatcagcacgacgccgcgcctccaccgcacctgacctgcgagttggaaggaggttgccgtgctgggagtcggtctggactgggccgaggaccaccatgacgtcgcgttgggcgtgccgggcaagggggtaatcgaacagttccgcatcgaccacggccccgaaggggtggcccggctggtcgcccgctgcctggccctggaaaccgacccggccgaggtccgggtcgtgctggaaacccggcacgggctgctggtcgaggccctgctcgatgccgggttcaccgtgctgccggtcaacccggacctggtcgcccgccgccgcggcccggccaagaagaaagacgacgccgaagacgcacggatctgctgcctgctggccctcgacccctttgtcgagctgcgcaaactgatcccgcacggcgagctcggcgcggagctgcgggccattgctcgtgacgacgaccgggccgcccgcgacgaacggcgcctgggtaaccggctgcgcgccgacctgctcgcggtgttccccgccgcgatcgacatcgccgacggcgacctgggcgcggcagtgttcctgcgcctgctcgagcgctggcccagccacaccgagctggccgccgccggccgtgacgccgtcgaagccctggcccgcgccaaccggcacggctggcccgaccggttcgccgaacgggtcatagctgccctgaacagcccgcggcttgcggtgcgcccggagctggcccgggcgaaggccggcagcatccggctggccgccgcgcaactgttgctgctgcgcgagcaacgccgggtctggcagcggcggatgggtgagctgcttctgggaagcccgcgtgtcggccgggcgaagcagccgaaggagccccggccggggaacgcgttccctggcggcgagatctacctgagcatgcctggcctgggtgatcgtctcgccgccagggtcgccggtgaaatcggcgaacacgtcgagcagttcaccacacccaacgccctgcaatgctatgccgggaccgccccggtcacgagacgctccggacgcagcgagttcgtcatcgcccgccgcctggcctacaaccgctacctcggcaacgccgtacatcaatgggccttctgcagcctgcagcaatccggctgggcccgcgccttctacgacgccaagatcgccaaaggcaagagtcacaacgctgccctgcgtgccctcggcaaccgctggctggagatcctctggcactgcctgcgcctgaacgtgcgctacgacgaagccgtccataccgcccaccgcacccacgccctcaaacaggctgcttgaggttgacagaggatgt

SEQ ID NO: 7643 - DNA, 1617 bp, unidentified
  source 1..1617: mol_type = unassigned DNA; note = element_bdac358
  misc_feature 1..3: note = core
  misc_feature 4..247: note = LE
  misc_feature 248..1486: note = CDS
  misc_feature 1487..1617: note = RE
  misc_feature 8..224: note = bridgeRNA
gttcgtattataaggtcagccagatatttctggttgaccattttttatatcgatatatgataaccgtagccggggtagaacggaagcccccgtgggacttgatcccgacaactaaacagttcgccccctacttgtagaaacatgattgaggctggttgggactatgatctcgtataacaagcgaagctatgacactacatggaggactaggggttaccggttaatttgtattattaggaggagataaatgatgaatccagtcattggtctggatgtagctaaggatgaaagccaagttcaggcttacttggatagaaaacagccttataaaaagagttttaaagtttcacatactctcgagggattagttaatctacatgatttcattaaggaagtagaggatgtttcaggcaagcggccccctattgtattagaatctacagggcactatcatacaccaatcgttcagtattttcaggacagaggatatttattaattattgtaaatcccctcatatcctatcgtgcaaagagctccagcttacgtaaggtaaagacagatattattgatgctcaccatctctgcgagctgttttatagagaagacttagaaccttataaacaacgaggaattcaactcttaaacgtacgaaatcttactagacaacatgaaaatatcactggaatgttcatacaaacgaaacttcaatttcaagctgttctggatcaagtatttcctgtttatataggagtttttggggacttatactctgatgtatctttactcactctacaaacatttcctagttcagaggatgttttgaaagcaggaaaggagacaatcgcgaaaaaaataaaagagttctgtaaaagccgttcgttagaatgggcaaacaatcgggcagaaaagctaatggctgccgcagctcaaaatccttttcagaaagctatattccatagcctttttcttagtctagatatgtatattaatatgataagagaatacaaaaagcatctatctaagcttgaaaacgagatagacgctttggcgaaaaatattgaggagtatcacattatccaatcaatccccggaattggtgaaaaaatcgctgcaacgattatttctgaaatcggggaaattgatcggtttaatcaccccaagaaactggtagctttcgcaggaatcgatcccagtgtctttgaatctggtacattcaaaggtactttaaatcggattaccaaaagaggttccagtagactgcggcatgcgttgtttatggctgttagaagtgccatacgtgattgtcgtaaaatgaaaacgacagatgaaatcatccctagaaataagaaattacgagagttttatgataagaagcgtgaagaaggaaaaccctttaaagtcgctgtaattgcttgtgcaaataaacttttacactggatatatgcacttttgaaaaataaatcgacttttcaagatatagcctagttaaaaaacataaccaataagcccaaaactttccaaacgatgtaaccggaaggttatttggtatgcgtaaatttagtatagcatgaaatattttaagatttaattaaaagatattgacaaactattagctg

SEQ ID NO: 7644 - DNA, 1572 bp, unidentified
  source 1..1572: mol_type = unassigned DNA; note = element_bdb3887
  misc_feature 1..2: note = core
  misc_feature 3..250: note = LE
  misc_feature 251..1426: note = CDS
  misc_feature 1427..1572: note = RE
  misc_feature 3..227: note = bridgeRNA
ctcgtattataaagtagtagtgtttatagaccctctccaaggtctgtatgctatactgttggagatactgtggattgttgctcacctcctaccactcgatggtttatgaaaggctacaaccacagtctctttgtatatttgttaatcagttagataccgcatgacggtttatttagaacgaggttacaatcgcaaggagcacctgtgggttccaaacagtattaaatattttattcaaaggagaactactatgatttttgtaggaattgatgttgccaaagataagcacgactgttttatcactaactccgatggcgaagtattatttaaatcctttaccatccctaacaaccgcaaaggtttcaaaaccttatttcaaagaattcagtctgcttcagatgatttaaccaaagtaaaagtaggactagaagccactggacactatagttacaatcttctgggatttcttattgataaagatctgaccacctttgttatcaacccgttacataccaatctttacagaaaaagtctaagccttagaaagacgaaaacggataaagttgatgcccatacaattgcgtctatgattatgtctgatgtgaacttaaagtcctactcagacacatcttaccacaatgaggaactaaagtcattaactcgttatcgctttgataaagttaaggaacgtgctgcgttgaaatcatccatttcaagactcgtgtgtattctgtttccagaactcgaaaaactcgttccaacacttcatatggcatctgtttatgctttactttccgaatttccaagtgcatccaccatcgcatcagcacatcttaccagacttgcaaaccttctttccgaaagttccagaggcagatatggaaaggatacagctattatggttcgtgaagctgctagaaattccataggttctcatatgcctgcaaaatctttggaactaaaacataccattaaacttatacgcgaactggatgctgagattgaagaaatcgaaatggaaatcaaactcatcatggatgaaatcaattctcctattcttacaatccctggtatcaactatcgtatgggagcaatgattattgctgaaatcggtgacttcagtcgctttgactctcctgataagatacttgcttacgccggtatgtcaccctctactttccaatccgggcaagtggataattgttatgctcatatggaaaagcgcggctcacgataccttcggtatgctctttataatgcaactaaatatgtctgccattgggataaatcctttggttcttaccttgcaaagaaacgagcagagggaaagcattacaatgttgcattatcccatgcaacaaagaaacttgttcgtttgatttatcaactcgaaaagtcgggacaaacatacatcgcgtcagcttaatttctgtaaattaaatatctccctttagagcacctgaaacgatgctcttattgtcatgcagttttcaatgttcaaatatgcctgaaatgcacttctgcaattcttccataaaactttatttttagacttgacttttaatagttagt

SEQ ID NO: 7645 - DNA, 1458 bp, unidentified
  source 1..1458: mol_type = unassigned DNA; note = element_bdb3f06
  misc_feature 1: note = core
  misc_feature 2..200: note = LE
  misc_feature 201..1442: note = CDS
  misc_feature 1443..1458: note = RE
  misc_feature 1..228: note = bridgeRNA
cgttaccttgttggtgggctcgtcagggccctcggacccaccgggtcgggcatgactcaatccccctgtcggacatatgacctggggggtgttgtcacccggcccggcggccttcggcgactgctgatagagacctggccccttcacgacagggcctgtacgtaacgtggctgccagcgtggaagaccagggtgggtccggtgtcgccgacgaccggggaacgcatgttgccttccgagaatcacccaacaccgacggtcttcgcgggccttgatgttggcaagtccttccaccatctctgcgccctcactgccgacggcaagcgggtctacgaccgcaaggtcgacaacgacgaaatcgagctccggacagtgctgacccagctgctgcagcggggcccagtcctgctcgtcgtcgaccagcctgccgggatcggggcgctgccactcgcggtcgcccgagacctcggcgtcgacgtcgcctacctcccggggctggcgatgcgccggatcgcggacctgcaccccggccagagcaagaccgacgcccgcgacgcgtacgtcatcgccgacgccgcccgaaccctgccgcacaccttgcgccgggcgtcggtcagcgacgccacactcgccgagctcaccgtgctcctcggctacgacgacgacctcgccaacgaaaccacccgcctgacaaaccgggcccgtgacctgctgatgaacatcagcccggcactggagcgagccctcgggccacgaatcacccaccccgccgttcgggcgctgatcacccagttccccaccccggagctgctgcgcgccgccgaccccgaccacgtcgcggcactccttcgggcgaacgcaccccgcatccacaccacgatccacaccgaggtaacccaggcgcttggggctcaaaccgtcgtcatccccggcaccaccgcagccggccgcgtcctgacgagcatcatccgacagctcgacgcgaccctcaccgaacgcacccagctcctcaccgagctcgagaacggcctcgatgcccaccctctcggcaaggtcctgacctcgatgcccggcgtcggcgtcaggaccgccctgaaactgctcacgatcatcggcgacggcgccgccttccctaccgctggacacctcgccgcctacgccggactcgcacccgtcacccgacggtccggcacatccatccgcggcgaaagcccttcacgacgcggaaaccgagccctgaaatcagcactgttcctctccgccttcgcagccctgaaagaccctgcgagcagggcgtactacgacaagaagcgagccgaaggcaaacgacacaacgccgccctcatctgcctctcccgacggcgcgtcgacgtcctacacgccatgctccgcaccggccaacgctaccggtcacccacccccaacaccgctcgcgcggcttgacaaccacatagagaca

SEQ ID NO: 7646 - DNA, 1362 bp, unidentified
  source 1..1362: mol_type = unassigned DNA; note = element_bdbca4f
  misc_feature 1..4: note = core
  misc_feature 5..87: note = LE
  misc_feature 88..1116: note = CDS
  misc_feature 1117..1362: note = RE
  misc_feature 1103..1349: note = bridgeRNA
atgatggggtggacggcccctgctcaccggcgtcgcaatgcgccaagatggtggttgtcgagacacaccatttgaagggggccgtccatgaccgaggttagcacgattggttttgatctggcgaagcgggttttccaggtccacggggtcgatggcgacggtgccgtgacgatccggcggcagttgcgccgctccgaggtcgtgacgttcttcgccaagctgtcgccctgcgtggtggggatggaggcgtgcgcctcagcccattattgggcgcggacgctggccaaactggggcatgaggtgcgcctgatcccgccctcgcgggtcaagccctatgtcaagcgaggacggaagaacgacgcagccgacgctgcggcgatcgccgaggcggtgacacggccgcacatggagttcgtgccggtcaagagcgaggaggcgcaagcggtgctgatgctccatcgcacccgccgcctgttggtgacccagcgcaccatgctcggcaatgcgctgcggtcgcattttgccgaatacggcatcatcgaaccggaggggcaaggtgggctggcaaggctggtcgtctgtgcgctggacgcaccggatgcggcattgcctcaggcggctcgtgaagccatggcgatgctggccgcgcatgtgcgtgagaccgactccaagatcgatgcgctggatcacgaaatcctgagatggcaccgtaacgacgccgacagccagagggtcgcctccattcccggcatcggcccgctgatcgccagcgccatcgttgccgccatgggcgatcccaagcgcttcaagacggggcgagacttcgccgcctggctggggctggtgccatcgcagaattccaccggtggcaaaaccgtgctggggccgatcaccaaggctggggaccgctatctgcggtcgctcctggtggtcggcgccaccggcactttatggcggcggcgcaaagagcaaggcacatggctggcgggcatgatggcgcggggtaagacggcacggcagatctccgtcgccctggccaacaagatggcgcgcaccgcctgggccatcctcgccaagggtggcctctatcacgacgcggcagcacaggccgcctgagaaagagcgcgaggaacaaccagttgcgagggcgatgaaagcgtgatggcgaccggtcaatccaaggaacggcaaaacccagcgtacgtcatggccgccaaggtcgtaaatctgatcgggagccgtttcacggatcacatcatggccagcggtcagagtgccgcgcaaacaggccggacacatgactgcacccgaccggggcgtcagcgcgaaaaaatctccttgcaacgcaggggctgtccacac

SEQ ID NO: 7647 - DNA, 1416 bp, unidentified
  source 1..1416: mol_type = unassigned DNA; note = element_bdbdd45
  misc_feature 1..3: note = core
  misc_feature 4..82: note = LE
  misc_feature 83..946: note = CDS
  misc_feature 947..1416: note = RE
  misc_feature 1139..1403: note = bridgeRNA
tgatgtgatggatggcgccctccgacggcatcgagtgtgccaagataggttgttgcaaaacctttgaggggagccatccaccatggaagagattacgacgattggtgttgatatcgcaaaaaatgttttccagcttcacggcattaacgctgaaggacaggtcgttctgcgcaaggccctgagacgcggacagatgcaaccattcttcgaggcgctttccccttgcctgattggcatggaagcctgcgcgacagcgcatcactgggcgcgaacgctgatagcatctggccatgatgtccggctaatcccgccgaactacatcaagccgtaccttcgccgacagaagaacgatgcagccgatgctgcagccatctgcgaggccgtcacgcggccgtcgatgcggttcgttccggtcaagaccgaggaccagcaagcaacgttgatgttgcacagcgcacgcgagctgctgatctcgcaacggactgcgcttatcaatgccttgcgtggtcactttgccgagcttggcattgtggccccacagggcgctcgcaatgtccggcagttgatcgccattctggaagatgaacgatacagcccacaagctgttcgcactgctctggcgcctttggcgacagtgttgatagagatcgaggggcagatcacaaagctcgacaaggcgctccttgccgcccatcgcaacaacgatgtcagtatccggcttgcgaccgttcccggaattggccccgtcatcgcaacttgcctttcggccagcgtctcagagccaaagctgttcgagggcggtcgtgagtttgccgcctggctcggtctcgttcccaggcaacattcgaccggtggcaaaccaaggctggttccatttccaaaatgggcaaccggcacctgcgtaaactcctcgtggtcggggcgtacgcagccctctacaggatgaagaaggggacggctgatacgcctctggcgaactgggcgcgtggcttgttgtcgaagaagcccttcaagcttgttgcagtcgcgctcgccaacaagattgcccgcattgcctgggcgattatggcgaggaacgtgaacttccagtcggagcacgtttcgagatgctccgatctgattccggcttaagcgaaagggccttcacggtcattgctctacggggtaaaccagttggcggagtgacgatggtatgatgtgacagcgaaagcggaatggaccgcacgaactgaagaacccgtggcatcgtatagcgccccaaagcgcggtaagttgatagggatcggttcaagcggacaacatcagggccagcggtcatcacgcgccgcataaataggccggagacatgactgcacccgacccgcaaagctcaaacatcggccaaaatcacattgccaaacgggcgccatccagaca

SEQ ID NO: 7648 - DNA, 1523 bp, unidentified
  source 1..1523: mol_type = unassigned DNA; note = element_bdc60dc
  misc_feature 1..4: note = core
  misc_feature 5..259: note = LE
  misc_feature 260..1513: note = CDS
  misc_feature 1514..1523: note = RE
  misc_feature 20..227: note = bridgeRNA
ctcactggtgcaccatttgtgtgtcggtgatcttggatgggttgccgatgcacccgaggtgccgtcgagttaccgccacaagcgcttgacgcatcgatgtccacgatgagtttcgcgggactcgacggttacccggggtgtgccgaccgtcgacagggctgcgcgccaccgagcgccgatcagtgagcgaagcggcagccacacctcggcaccgaagtttgggtgcctccccactgggtctagcagcgaggaggctgtgatggattatgcccctactgccgtcttggcggcagaaccggccaacggagtgaccgctggcctggactggtctcgtgacgatcaggcggtatcggtagtcgattctcgaggcgccgaagtgttgcgcgagctcactgaccacagcgctaggggactgcgcacactggtcgacacgctgacccgtgccggggtcagcgaagtcgctatcgaacgtcccgacgggcccgtcgtcgacacattgctcgaggccgggttcaccgtcgtggtgatcagtcccaaccagctcaagaacctgcggggccgctacggctcggccggcaacaaagacgaccgcttcgacgccttcgtcctggctgacaccttgcgcaccgaccgcacccgactgcggccactggtccccgacagccccgccaccgtagcgctgcgcagcacgtgccgagcccgcaaagaactcatcagacaccgcgtcgcggtaaccaaccagctgcgcgaacacctcaaccgcgtgtttcccggcgccgtaggactgttcgccgacctcgattccccaatcagcctgaccttcctggcccgcttcgactgccaagaccgtgccgactggttgacccccgcacgaatggcgaactggctggcctcggtgggctacaccggccgcaccgaccccgccgtgctgcacacccgcctcatcactgcaccccgcggcgccaccggccacgaaggcgccacgcacgcccggatcacccacgccctgctggccaccctcaccactctggtcaaacaaatcaccagcctgtccgaccagatcgccgaacaactcgccgcgcactgcgacgcacacatcttcaccagcctgcccagatccggaaagatcagagccgccaaacttctcgctgaaatcggcgactgccgaggacgattccccacccccgagtccctgacctgcctggccggcgtggccccctcgacccgccaatcgggaaccatgcgcaccgtcggattccgctggtcgtgcgacaaacacctgcgcgacgccgtcaccgacttcgccgccgactcccgccgcgctaacccctgggccgacaacctctaccgccaagcccgatcccgcggacgcgaccaccaacatgccgtacgcatcctggcccgcgcctggctctacgtcatctggcactgctggcaagacaacaccgcctacgacccccaccgccacggcgcactccaagcccatctgcgagctcaacaacccgctgcttgacacagggcta

SEQ ID NO: 7649 - DNA, 1361 bp, unidentified
  source 1..1361: mol_type = unassigned DNA; note = element_bdc748d
  misc_feature 1: note = core
  misc_feature 2..71: note = LE
  misc_feature 72..1103: note = CDS
  misc_feature 1104..1361: note = RE
  misc_feature 1112..1351: note = bridgeRNA
tatggaatggcccgccccttttccagcatctgataggatgcggttgttggtgaaaaggaaaggagcgagccatgactatttgtacacttggagtcgatctgggcgagaacagctgcagtgctgccgggcttgatacgactggcaaagtcgtgctgcgcagactcatgcgcccgtccacaattccaggcttcacagcgaagctggcgccatgcgtgatcgcgatggaggcctgttacggggcgcatcatctgggtcggttgctggcggctcaaggccataccgtctggttgatgtcgccggaatatgtccgtccctacgtaaaggcgcaaaagaacgatgatcgcgacgcagaggcgatcgcggaagccgcaacgcgaccgaccatgcggttcgtcgagatgaagacccaggatcagctcgatgttcagtcgctccatcgcgtgcggtcgcggctcgtgggagcgcgtacgaacctgataaatcaggcgcgagcgatcctaatggaacgcgggatcgtagtgccccaaggccgccagaagttcgagagggcactcgatgcgatgctagccgatacggatcgtcttcccgagggtcggatccgtcggttcatgatggaaacacgcgaggagtggaagacgctggacgacaggatcgcggcgcttgatatggagtttctagaactcacccgaaccgatgaactggcgcgcaggcttttgacgatcccagggatcggttcgctcaatgcgacagccctggcagccgcagtcggagatgcgtcgacctttgaacggagccgtgatctcagcgcttggctgggcttggtaccgaagcaatacacgacaggcgggaaaccgaagattcgaggaataagcaaacgcggaaacaggtacccgcgaacccttttgatccatggtgcaagagctgcactgccatcgcttgccaagagcgagacgccgctggggagctggctgctcggcttgcttgccagatgccactacaacacggtgacggtggcactggccaacaagctggcccggatcgcttgggtcacactgcgtcgcggagacacgttctcgatcgaccgtgctgcaatgccgatctgagtatcctggtcaccggtcctcgaccggttgtgtgaccacgatgtctgcgggaggaattttgaagatggcctgacggtaaatcgacgccctgaaagcctggtaccaagaacggcactttgctgccacccccattatgaggttcagagcgtgcgaagctccatcttggcgacagcgcaacgctgatatgccgtatacgttgatgcagaccagtcagttgccagcctcaaaatagtccttgcagacggggcgggccatacg

SEQ ID NO: 7650 - DNA, 1388 bp, unidentified
  source 1..1388: mol_type = unassigned DNA; note = element_bdd35df
  misc_feature 1..2: note = core
  misc_feature 3..90: note = LE
  misc_feature 91..1116: note = CDS
  misc_feature 1117..1388: note = RE
  misc_feature 1087..1375: note = bridgeRNA
agatgggatggttgccgccctccccagacggcatcgtaatgtgccaagaacgcagtgtttgaaccccgaagcgaagaggacggcaaattgatggatacggtgatcggagtggatctagccaagaatgtgtttcagctccacggggcgtcaatggcgggacacttgaaatttcgaaagaaactgtcgcggcttcagtttcggaagttcatggcgggccacccatcggcagtggtggtgatggaagcctgtggcagcgcccactattgggcacgggagatggtcaagctcggccatgaagtgaaactgatcgctccgcaatatgtgaagccttttgtgaaacgccaaaagaacgacgcggctgatgccgaagcaatcgtgatcgcggcacagcgccccgagatgcgcttcgtcgagccgaaatcggaagaacagcaggccagggcagtgctctttcgggctcggaagcgccttgttcatcagcgcaccgatctggtgaatgcgctgcgttctgttctctacgaattcggccatatcatcccgcaaggaatcgaacaacttaaacgcattgacgcaatcctcgaagatccgaacagcgatctaccagaactggtccgcgaggaatgtcggagtctcattgatcagatcgcctacaagacggagcggatcgatgccaaggcagagcagctcaagaagttggcgacgcggacggtcacggcgcagcggctgcagacaatgccgggggtcggcccgctgaccgcactcgcgatcgaggctttcgcgcccgacatggcggcctttcgacgtggccgagacttcgcggcttggctcggcttggtcccacggcaacattcctcagggggaaaggaaaggctcggacgcgtttcgaaggaaggacaggcggacattcgccagttgctcatcgttggggcgatgtcgcggctgaactggctcgggcgcaagtcgatccctagcggatcctggctggcgcagatgctggcgaggaagccgcgcatgcttgtggcgatcgccttggcgaacaagatggctcggacgatttgggccatgctcacccggaaggaggattatcggaacccagcgcaggcagtgacggcatgactgcatgcagcacgaaatagcctgacgttggcgaagggggtgtgagaaggcgacgacccgaatgggcgcaacgatcgaacagatctggatcaggaaaccagctagagccaaagagccgacgtgctcggagatgagaattggacctggtccgcggatcaccataccggccagcggcttctgaaaatgccgtaaaggaaggcctgacagaagaccgcactcgatcacacgccaaagggtcagaaacttcttgcattgcgggcggcaaccacaga

SEQ ID NO: 7651 - DNA, 1340 bp, unidentified
  source 1..1340: mol_type = unassigned DNA; note = element_bddc81b
  misc_feature 1..3: note = core
  misc_feature 4..89: note = LE
  misc_feature 90..1073: note = CDS
  misc_feature 1074..1340: note = RE
  misc_feature 1039..1327: note = bridgeRNA
agatggggtggttgccgtcctccccgaacggcatcgtaatgtgccaacgtggtggttgtgtaacgcagccacggaagagaggacggcagatgacggatacaatgattggagtggatctggcaaagacagtcttccagattcacgcggcatcgctgacgggcgaattgctgttccgcaagaaggtccgtcgcccgcagtttctgcagttcatggcgagccaactgccggcacttgtagtgatggaggcgtgtggcagcgcccattactgggcgcgggaactgatgaacgtggggcacgaggtgaaactgatcgcaccgcaatatgtccgcccgttcgtcaagcgccagaagaatgacgccgccgacgcggaagcgatcgtgatcgcggcccgccagccggagatgcgtttcgtggtgccgaagagcgaggagcagcaggcacgtgctgttctgttccgctgccgcgaccggctggtccatcaatggaccgaactcgtcaatgcactgcgcgcgacgctttatgaattcggcctgatcgtgccaaagggcattgctcatctcaaacgcatggaggaattcgtcgaagatgagagcgtgtcgctcccgacgatcgtccggaaggaatgccgcgatcttttggagcagattgatgagcagtcagctcggatcatggaaaagacccgtgccatggtcgggctttcggaagaaagcggtgtggcgcagcgcttggaaacgatgcctggtgtcggaccgttgaccgcactggccgttgaggcctttgccccttctatggagagcttccgtagtggccgcgatttcgcggcatggccgagtttcgaaggccggtcaggccgatatccgacgtttgctcatcatcggcgccatgacgcgcgtgaactgggcgagccgcaagccgccgctgcccggcacctggctggcacggatgctggcccgcaagccccgtatgcttgtggcgatcgccctggcgaacaagatggcgcggacaatctgggccatgctgacgaagcaggagaattatcgggatccggttctgtccgccgcagcatgagatgacctcaactgcgcgtgggcggaatcggtaagggggtgtgagaaggcgacgacccatatgggcgcatgatcgagccgatccggatcgggaaaaccaactgacgtcttggtgcccatgagcacgtttgtgagatttggacctgatccgcagatcaccatatcggccagcggcttctgaaagcgccgcgttcaaaggcctgacagaagaccgcagtcgatcactcgttcaaaaggtcagatacttcttgcactacagacggcaaccacaga

SEQ ID NO: 7652 - DNA, 1399 bp, unidentified
  source 1..1399: mol_type = unassigned DNA; note = element_bde322e
  misc_feature 1..2: note = core
  misc_feature 3..83: note = LE
  misc_feature 84..1127: note = CDS
  misc_feature 1128..1399: note = RE
  misc_feature 1145..1387: note = bridgeRNA
tgatgaggtggaacggcccgctccgacagcatcaaagtgctaacgtggtcgttatcgaaaacgccacaaggagggaccgttccatgaaagaagttaccactatcgggctggatttggccaaactggtttttcaggcccatggctctgacgccgaaggcaacacgctattcaaccgaaagctgcgacgcgccgaggtgctacgtttctttgcgaaactgccgccatgcctcgtcggaatggaagcatgcggcagtgcgcattattgggctcgagaaatatccgccttcggccacgaggtccgcctaataccagcgcaatacgtgaagcctttcgtcaagcgtggcaagacagatgccgccgatgctgaggcgatcagcgaagcgttaacgcgcaaaacaatgcgcttcgtcccgatcaaatcggccgagcaacaggcctctgtcatggttttccatgctcgcgctctgctcgtacgccagaggacacaggcgatcaattccctgcgcgctcacatgagcgagctgggaatcatcgcatcggtcggcatcgcaaacatcaagccgctggcggaaatcgtccgcgatgaaagcgatccgcgtttaccggccgccgctcgctttgcacttgaagagatcgtcgacctgatcgatcgtttggctgtacgaatagagaagctagagcgtgcgatgatagccgtcgccaggcaggacgaagacatgcgccggctagccaccatccccggcgtaggcgctatcacagctatggctatcaaggcttttgtaccagatcccgctggtttcaaatcggcgcgtcatttcgcggcctggattgggctgacaccgaaatcgcattcaaccggaggaaagcaacgcctcggccgaatatctaaaatgggcaattcgcaaatgcgatccctcctggtggtcggcgcggcatctacacttcgtcatgttcgaaaggatgacaaggcacgaccatggctacgagaattgctcacgcgccggccgttcaaggtggtagctgttgcgctcgccaataagaccgccagagtgatctggtcccttctgatacggggaggagtctatcgtggccccacaacattggcggcagaaagcgttccagcctgagacgcaaagtcaaaatcgagatctgacggcgaaggccggcaggtagaggtgcaaaagaaacgatgaactgacgggacaacatcccggagcagcccaggccgaaacccgctgcgtgcgtaaaagcacgaacccctgatcaagccacctgcttcgcgaacctcatcgaggccagcggtctgtgagccgcacacaaaggccggacatatgaccgcaccgttcccggatggtgaaatcgacgaaattgcaccttgcaccgcgggccgttccacata

SEQ ID NO: 7653 - DNA, 1719 bp, unidentified
  source 1..1719: mol_type = unassigned DNA; note = element_bde6c11
  misc_feature 1..2: note = core
  misc_feature 3..378: note = LE
  misc_feature 379..1584: note = CDS
  misc_feature 1585..1719: note = RE
ttcgtattatgaaaccaggaagaaaagtattctggttaatatagaattgtataatgtagatgaacagatcaagaatcatttctattgaaagagaatcaactgtttgtttagttattcatggtatgcaagtcaggatataatattcctggctttttctttttgcaggcatgtaatgagaacaaagtcttagagaagaaatgacgtagctctttttagacctttgagtcagttagaaaaaacgtcattcttcctatttctgtttatgaataagcttatatctaaaaagacggtaattgaatcaagtcagtatgtaaaacgaaacaatatggagcagaaatttggaagttatctctactgtttaatgaaaggaagtattgtgtggaaagtccaattgtaagcattgatgtttccaatggaaacagtcattacatgtgttttatcaagaacaataaacgttttggtaaagtaaagaaaattgatcatgatattgaaggattcaaaagacttctagaagatattcaaaagctggaagctgaaaccaatgaaaaggtatgtgccgtatttgaagcaaccggtgtttatacaaaacctttagaaagatttctaagtaagaacagtataaagacatatataatcaatcctttagaatctgccagaaaacggaaagaagaaatacataataagaagacggataagcttgatccaatatctatttcaaaagtttattatgataaagaagaaatgatggaactaaaaaagaaggatgaaacatataactggctcaggaaaaagaatcgattgtatgaagatcagttgaatcatcttagaaaatacaaggttacatttcaaaatcagttaagcatctgttttccgggatatcttgatttatttaaggatggatatagtgatattccaatgacaatcctaaagaaatatccacatccggatttattgaagaacaagaaggctgaaacggttgccagatatcttgagaaaaatacatgtcatattcataaggtatctttagaatatgcattaaaaataatagaatttgcgaaaaagacatatcccggatgtgaaaaggatgatgtagaagttgaaatatttaaaatattacttgataaggtaatcgaaacacagagggaatgtgaaaaaacattgaatgaaatgataacagttgcttctactttagaagaatatagatatatctcaagcattgatggaatagggcccaatcttgctgcaaggatcattgcagagattggagatatagaagaatttaaatcaagagaagcacttgtggcatatgcaggattggatccgcatatatatcagtcaggagaccaggatggaaaacatttaaagatatccaaaaaaggaaataaatatctaaggtgtctattgtttctggctgtaggatgttctataagaggagctaaagataatccagtgaatcgattctatcaaaagaaaaagcagcaatcgaacccgctaaattcgaaagctgccaaaaccgcatgtaccgccaaactgttaaaaataatatacggtatatgcaaaaacaagaccacatatgaaaggtagtcttaaatacattataaacaaaaatttaaaaaattggagaaatccaatctttttgtcgtggaaaatcatcaaaaaatgtgtccttcatggaaagacacaaaattttatgaattaggcttgatttttattatctaa

SEQ ID NO: 7654 - DNA, 1482 bp, unidentified
  source 1..1482: mol_type = unassigned DNA; note = element_bde7da5
  misc_feature 1..3: note = core
  misc_feature 4..238: note = LE
  misc_feature 239..1153: note = CDS
  misc_feature 1154..1482: note = RE
  misc_feature 1185..1369: note = bridgeRNA
aacatggagtaatcgcggcgcgccctagctttttgggatagtgagggtggtttgcccccgatagcatggaaaaacgggctctcgattggatccgggcccaaacatccgatggaggcaaccttgaaccaatatatattggccttgatgtttcattgaaagataccgcaatttcgatccgggaggacgggaacggatctggcgggggaaatgtccttcggatcccaatcttctcgcgcagatgatccgcaaaaaagctccgcgcgcgcggcgcgtcatattcgaaacggaaccgctgtcgacgtggttctatcatgcgctggcgagcgaggggttgccggcggtctgcattgaagcgcggcacgcgcaaaaggcattgaacgagacgctcaacaaaaccgatgccaacgatgcggatggtttagctcaactcgctgaagcaggcctttacaaagcggttcgcgtcaagtcgtttgacgctatgatagcccgcacgttggtggttgcccgcgaacaactcctgtacatctcaacgcaactttgcaatcaaatccgcggcctgatgaagaccttcggtctgatcatcccgaaagggaagggtggggtgtttgatggcgatgtacggaagcttttggatgggaacaacgagcttgcgaagattatcttgcctcttttggaggggtggcacgatatccgcaagcgcgcagccgatcttggtcgccagttgcttatagtggcccgtcggagcgaagccacgaagctattgatgacaattctgggaatcggcgcggtcacagcggtgtcctacgttacggtagttgagaatccagaaaactttcgaacgtcgcgctcggtgggcgcctggcttgggctgacaccgcggcgttatcagtcaggcgaggtcgactatgacggccatatctcgcgaagggatgacaatcgtttacgcgggctgctttatgaagcggcgacagtgctcctgacgagaaccagtgccaggacggagagtagtctcaagcgttggggacttaagctgcgggagcgacttggcttcaagcgggccgccgtggccgtcgcccggaaactcgcggtcatcatgcacagcatgctcaagacgagagaagcgttcaacgcatcggctagcgccactgcatagcagacgctcagccttcgtccctcagcgcgccatctaactttgagcgctgagcgtccctgctgcggacgtgggcaggatcattccgcttctggtggctgcacctcgttgagactgcgcctcgaacatcaggaggatcccacctgcgaagaccattgtgcggcgacatttgtcgaccgcggggacaagcctgctcccagcaccggatagctccgaaggacacggccggtgagggcggatccagccaatcagttcagccggtttgcctgtcccgcaagccggcaaggtcgctgaatgctcaaaccagcttgacgaatggactgcgattagac

SEQ ID NO: 7655 - DNA, 1299 bp, unidentified
  source 1..1299: mol_type = unassigned DNA; note = element_bde99d9
  misc_feature 1: note = core
  misc_feature 2..259: note = LE
  misc_feature 260..1252: note = CDS
  misc_feature 1253..1299: note = RE
  misc_feature 62..245: note = bridgeRNA
cctttggtcttacaaagaatcatttagcacttattgttattgttaaaatggggggccggggggtgttaaaaactaaaaactttgtgaataacgttataataaaaggcagggtgaacttggagattcccagtctgaaggacttagagctgttatagtccctgccttttattattgcccaaggcccaactagaatactttctttactacaacaaaggtgataggcaaaaggcaattaaatgtactaacaaaataaaaacttatgaaaaactggaatgttattttaggcgttgatgtttctaaactaacgctagatgtctgctgggcggaacgcaggctacatttgaagattgacaattgttcaaaaggatttaatgtttttaaagaatggtgtagagccaacgaaattctcttgaatgacactctagtagtattagagtacactggaggttacgaataccgttttattcagttctgtcagtcggtttctctttcttactgcaggataccaggtttagaaattaaacagtcaatgggaatggttcggggcaaaagtgatcgtgatgattccttccggattagtcaatatggtcaagagaaagctgatcgactggttccttcggcgccacttaataattccgtattggcacttaaacaattactttctttccgtaaaagattggtgcgggaaaatgccggtctggtaaacactgtgaaagagagaaagcatatgtatccattcaaggaaactgataccattattcggatagccacggctaagatcaaagcaaataaaaagtttatctgcctgctagaacagcaagtaacggatctgattaaaagtgatgaggcattcttgatgaactatcgaatcataactagcatcaagggtatcggcaaagtaaacgcatggatgactatagcttatactgaaaacttcactagtttcacaaacgcacgtaagtacgctgtatttgtcggtgtggctccatttgaacatagctcgggaaccagtataaagggtagaaaaagagtaagtcatctggctcacaaagaactcaagcaagaactgaatcaagccgcaaaatacgctgtagtgcatgaccctgaacttaggttatatgctgagcgaaaactcaaaaacaagtgttattcattggtgctaaacaaggtaaaattcaagctgatcctaagaatgttctctttggtaaacagaggagaagtttatgtggaaaactacaaaccagcggcttagaaaaaacaattttaaaataaatttggaagtaacttaaacctagaata

SEQ ID NO: 7656 - DNA, 1612 bp, unidentified
  source 1..1612: mol_type = unassigned DNA; note = element_bdf0232
  misc_feature 1..2: note = core
  misc_feature 3..283: note = LE
  misc_feature 284..1495: note = CDS
  misc_feature 1496..1612: note = RE
  misc_feature 14..303: note = bridgeRNA
ctactacaatgtatttatgggtaaagtacacgacagccagtcgtgtctatatccatcttgttgctaaagctgttagaatagagagtgcaatgggctgacggccaaaatcctggactttccgtccgtaaattagtctgtctgccagcctctcattcacagccgttcgttttatgcaggttgaactgctggttttccagtacgtccgtgtcacaccacagtagatagaatcggcaatgagaaaaggttgggttactattgcaaatctagttaaggagctgattctatgaacgcagttggcattgacgtttctaagggcaaaagcatggttgctgccctccgccctttcggcgaaattgttactaaaccattcgaggtacatcatacttccagtgacatccatcagctgattgaccatcttaatgcctttgaaggcgacacccgtatcattatggagcatactggcaggtattatgaacctatggcccgttggcttgctgatgctggtttctttgtcagtaccataaacccaaaactaattaaagattacggtaataataccctccgtaaagtcaaaacagataaagcagatgctgttaagattgcgcgctatgctcttgacaactggcaggatttgcgccagtataccagtatggatatcatacgcaatcaattaaaaaccatgaatcgccagtttggcttctacatgaagcagaaaacctcttacaaaaataaccttatatctctgctggaccagacttatcctggtattaatgacctctttgacagtcctgcccgcagtgatggcagccagaagtgggtagactttgtttcctcattctggcatgtggactgtgtgcgcaatcttgggcttactacgtttactgaccgctatcagaaatggtgcaaacgacacggttataacttccaacccgaaaagcctgctcagatttactcgttttctaaagagctgattgccgtgttcagaaaagaccctgtgactaagcttttagtaaagcaggctgtagaacaacttaatacagtatcttttacagtggaacagctccgtctggaaatgaaccatctttcagctcagctgccagaatatcaagtagtaatggacatgaagggcgttggcccatcactcggacctcaacttatagccgaaataggtgacctttcacgcttttcccatcgtgaagcattaactgcgtatgccggcgtagaccctggagccaatcaatccggtgcatatgaggctcacagtgtgcgtacatccaaacgaggttcaccacagctacgcaagacattatttcaggtcatggatgttctaattaagtctgcaccttcagatgatgcggtttatcgctttatggataagaaacgctcagaagggaagccatactatgtctacatgactgccggtgccaataagttcctgcgaatctactatggtcgtgtgaaggagtatttagctaccttacctaagccagaataaccttgggtcaatacccaatagaccagcgttttgcggtggtctttttgtagtggcaaaacactgcataaaacttttttactaatatattcaattctctattgacttttcatttgcagg

SEQ ID NO: 7657 - DNA, 1588 bp, unidentified
  source 1..1588: mol_type = unassigned DNA; note = element_bdf75db
  misc_feature 1: note = core
  misc_feature 2..130: note = LE
  misc_feature 131..1243: note = CDS
  misc_feature 1244..1588: note = RE
  misc_feature 1266..1551: note = bridgeRNA
agacgatatgagaaagccattgaagggaaagcctccccgcggcatacagggtcgcgggctgggcgggaacaatggttgtgtatcgtcaacctgcggtgccgccgtaccgcacgtatgggaggaggctcccatgacctatattacctccatcggcctcgacgtacacgcgcgctccgtctcggcatgcgccttcgacccgttcaccggcgaggtggcccagaggaggttcggcaccgacgccggcgagatcgcggagtggatcctgggcttcgagagccccaaggcggtctacgagagcggcccgacgggcttcgccctgtgccgcgagctgcgcgcgccgggcgtcgactgcgtcgtgggcgccgtctcgaagatgcagaagccgtcggccgagaagaggcgcaagaacgacaggcgcgacgccgccttcctggcgcgcctgctcgccacgcggaacatcaccgaggtgtgggtgccgcccgtcgaggcggaggccgcccgcgacctgtcgcgcgcgctagacgacgcccgcgaggacctgcagcgcgcccgccagcggctctccaagttcctgctgaggcgcgggctcgtgttcgacgagaccgacgcgctcgggcgcaggcgcggcgcctggacgagggcgttctggaggtgggcggagtcctgcaggccgtccgacccggccgcggcggccgccttcgaccactacgtcacctgcgtgcgctgcgccgagtccgacaagcgcgcccttgagaagagggtgctcgccgaggcccgcgccgaccggtggaggggcgcggtcgaggcgctcccgtgcatcaagggcatcgacgccgtcacggcgttctgcctggccaccgaggcggggtgcttctccaggttccccaccgccggcgcctacgcctcctggctcggcctcgcgccctccgagcactcgagcggcgagaaggaggccaaaggcggcatcaccaagaccgggaactccgcctccaggcgcgccctcgtcgaggcggcgtggcacttcaagtcgtgctcgccgaagcccaaggcgccgccggccggctcggccgtgccggcggccgtgaagcggcgctgcgacgacgccaccgcgcgcctccgccggaggcacgaatccctcggggcggccggcaagcggccctgcgtcgccaacgtcgcggtcgcccgcgagctcgcctgctgggtctgggaggtcggcaggcgcgccgaggggacgctcgcgtagccccccggggcccacatagccttcccgccgggagggcccgcgcttcgacgcatcgccgggaccggctcacgaccctttttatgggcagcccgagggccgcgcccgactatcgagactccaaggtttttcgaaacgacggtcccggacgcagaatcgaaatgcggtagcgcgcggcgacatacctgaacccgcatgccgcgccacgagcccgcggatattagcttgccaggcgagcgacgactaacgagcatccgcgcgggcccgaccggtcggaatacgagaaggtccggaaagaaatttccggacctggcagcttttgcctcttgacaatggctttctcatatt

SEQ ID NO: 7658 - DNA, 1565 bp, unidentified
  source 1..1565: mol_type = unassigned DNA; note = element_be06605
  misc_feature 1..2: note = core
  misc_feature 3..600: note = LE
  misc_feature 601..1434: note = CDS
  misc_feature 1435..1565: note = RE
  misc_feature 3..244: note = bridgeRNA
cttgtatgatgtttatagaaacaaaaacatcatatttcctttcttttttgatctgtggtttaatacattcagatactgtggacttttgatttttacctgtagctctgactactcaacaggagtgtattgccgctacctttatctgaattgtttataagctggatgttgccagagtgttttccctgagtacttatttcactcaagtctacgatgataatcgctggtggatatcacagtatcagactttatgaaagagaggtacaacctcatgatttatcttggcattgatattgctaaactcaaccatttcgcttctgcaatctcctcagatggcgaaatactcatcgagccgttcaaattcacaaacgactatgatggattctatctactgctttctaaactggcaccactggaccagaacagtatcatcataggtcttgagtcaacggcacactacggtaacaaccttgttcattttcttatcaacaaggattttaatgtgtgtgttcttaatctattcagacttcatctatgcgtaagaataatatccgcaaaacgaagactgataaagtcgacacctttattattgctaaaaccctcatgatgcaagactctccaaggttccttaccttagaaaatcttgactttatcgaattgaaagaactcggcagattccgtcaaaagaccgttaagcagcgtacccgtttgaaaatacagctgacttcttatttagatcaggtctttcctgaattgcagtacttctttaaatccggtattcatcagaactctgtctatactctccttaaggaggctccgacacctaatgcaatcgcttccatgcatatgactcatcttgcaagtctccttaccaggacttctcatggtcatttcaataaagagactgccagaaatttaagagttctcgcacaaaagtctgtcggtatcaacgacagtgccctatctattcagataactcagaccattgcacagatcgagttattggatagccagttgttccacacagagcttgaaatagcaaatctagtcacctgcttacactctgtgatcatgaacattcctggcattggttccactaatggcggaatgatcctcggtgagatcggcgatatccatcgcttttctacacctaataaactacttgcattcgctggacttgatccttctgttcatcagtctggtaattttcaggctcaacggactcgaatgtctaaacggggatcacgcgtgttacgctttaccctcatgaatgcagctcataacgttgtcaaaaacaatcttacattcaaaacttattatgacaagaaacgtgccgaaggccgttcccattacaacgcccttgggcattgtgccggtaaacttgtcagagttatctggaagatgttgactgacaatgtagaatttaatctcgaataaagagatctgtatactaatatcgatagatttaaaaagcacctttagggagctttcttaaagttaccctttttttaccatcgatacaaaaaagaaatttttacctaatttatacttgacttttcatagctggt

SEQ ID NO: 7659 - DNA, 1328 bp, unidentified
  source 1..1328: mol_type = unassigned DNA; note = element_be09847
  misc_feature 1..2: note = core
  misc_feature 3..68: note = LE
  misc_feature 69..1073: note = CDS
  misc_feature 1074..1328: note = RE
  misc_feature 1095..1326: note = bridgeRNA
ttaatgagatggtcactccctccttcccagtactatgctgaggacaggctttcattcggagaaccatcatggaaaacattgcgcttattggtatcgatctgggtaagaactctttccatattcattgtcaggatcatcgtgggaaggccgtttaccgtaaaaaattcacccgaccaaagctaatcgaatttctggcgacatgcccggcaacaaccatcgcgatggaagcctgtggcggttctcactttatggcacgcaagctggcagagttagggcattttccaaagctgatatcaccgcaatttgtccgcccattcgttaaaagcaacaaaaatgacttcgctgatgctgaagctatctgtgaagcagcatcacgtccatctatgcgtttcgtgcagcccagaaccgaatctcagcaggcaatgcgagctctgcatcgtgtccgtgaatccctggttcaggataaggtgaaaacaactaatcagatgcatgcttttctgctggaatttggtatcagcgttccgcgaggtgctgccgttattagtcgactgagtacccttcttgaggacagtagtttgcctctttatctcagccagttactgctgaaattacaacagcattatcactatcttgttgagcagattaaagatctggaatctcagttgaaacgaaagttggacgaagatgaggttggacagcgcttgctgagtattccctgcgttggaacgctgactgccagtactatttcaactgagattggcgacgggaagcagtacgccagcagccgtgactttgcggcggcaacagggctggtaccccgacagtacagcacgggaggtcggacgacattgttagggattagcaagcggggcaacaaaaagatccgaactttgttggttcagtgtgccagggtattcatacaaaaactggaacaccagtctggcaagttggccgactgggtcagggagttgttgtgtcggaaaagcaactttgtcgtcacctgtgctctggcaaacaagctggccagaatagcctgggcactgacggcgcgacagcaaacttacgaagcataaaggcagaaatacaccagtttaaacaatcattcatctggttttgcgaatactgatattgatgatactaacggcccaccggcctgttgaggaacctgtaaaacggaaaggctcattgaagccgtatattttctggaggttcatcaggcgcggaactcatcgaggcgcgggaataaaatcccattcagacgccggatagattcaagcaagccaacttgtcgtcaaaatcggtgttgcaaaaacgggagtgaccataga

SEQ ID NO: 7660 - DNA, 1563 bp, unidentified
  source 1..1563: mol_type = unassigned DNA; note = element_be09c4b
  misc_feature 1..2: note = core
  misc_feature 3..270: note = LE
  misc_feature 271..1449: note = CDS
  misc_feature 1450..1563: note = RE
  misc_feature 3..246: note = bridgeRNA
cttgtataatgaaatatagggaaattcattatactttcctttctagattattttctatataatctttaatagacgctgtggattagttacatcacctacagcaactgtccctaaatagttgactgttccaattgaggctctaaccgcagctctatgtttatttgttaattagttagataacgcatgacgttttatatatagcaaggatacattcaacatagagttcgtggaaacatagcgtattacatttttataaaggagttgtttactatgatttttgttggaattgacgtttccaaagcaaaacatgattgctgtataattgattctaatggttcagttttagctgattccttacgaattgataattcaaaggaagggtttgaaactttgtattcagctattctttcctcacttgattataaggatattagtaaagtaaaaataggacttgaatcaacaggtcattacagcactaatatcacaaattatctgtattccaaaggctttgaggttcacaccctaaatccattggctactaatctttttcgtaaggctggaacccttaggaaaactaaaacagataaaactgacgccaaagtcattgcgactatgcttttttctgatgaatctaaatcctattcaccagtatcttatcatattcaagagctaaagtcactaacaagacatagatttcgtttaattggctatcgttccaaacttaaaatttccgtaaccagattaattgatgttatttttcctgaattgccagatctattttggtcaattcatcaagcttctagttattctttattacttgaattaccaacaccaaatgacattaaatcttgtcatttaactaagcttactaacattattagtaaggcttctaatggccgatatgataaagaaaaagccatcgccttaaaagaattagcatctaactcaattggatctgctaatcgttctgttgcttttgaattgcaacaaactattcgtcttatccaatctgttcaaaatgagatagatattttggacaagcagattaaaattgttgtagatgagattgattctcctattatcacgattcctggtattggttataccttagctgctattatattagcagaaatcggtgatattgagcgttttttaactcccgctaagcttctagcctttgctggtatggaaccatccacctatcaatctggaaaatttaatgcttctaaaaccccaatggttaagcgtggttctacttatcttagatgggctatcttgcaagctgctcgtttggttcccatgcgtgatgctacattttctgcttatttagccaaaaaacgctcagagggcaaacatttcaatgttgctcaaagccatgtaggcaagaaacttttaagagtcattttttacctgcttaaaaacaatactgcatttgttccacaaatgtaattttaaattcctatattttcagaacaactctgttgttctatttgtcatgctcttttgtaacaagcatttttgtgttaattttttttaaatttctcttgacttcatatagttagt

SEQ ID NO: 7661 - DNA, 1384 bp, unidentified
  source 1..1384: mol_type = unassigned DNA; note = element_be0b340
  misc_feature 1..3: note = core
  misc_feature 4..85: note = LE
  misc_feature 86..1135: note = CDS
  misc_feature 1136..1384: note = RE
  misc_feature 1088..1371: note = bridgeRNA
tgatggagtggatgccccctcccgacggcatcgcaatatgccatagtgatgtttgcagcaacgtcactcagaggagagagcatccatgaaggaagttagcattgtcggccttgatcttgcaaagcgtgtatttcaagtccatgcggtcagtgccgatggcggttttgttctccgcaagaaattatctcgcgtccatgtaatggctttctttcagaggcttccgagttgcaccgttgcgatggaagcatgtgccaccgcccattattgggctcgtgaaattggcaagctcggccatgaagttcggctgttgccgcctgcttatgtgaagccgttcgtgaaacgccaaaagaatgatgcggcggacgctgaagctattgtagaggcagccatccggccctcaatgcgtttcgttgcaccaaagacagagaagcagcaggctgcttgcatggtttttcggacgcgcgatttgttcgtccgtcagcgcacgcagctcatcaatgctcttcgtgcccacttggctgaacatggtgttattgcaccccagggaattgcgaacctcgctgctttgatagggatcgttgaccatgataataacggtctcaagcgcgtggtcgtagagactgcccgactttatcttgagcagattgatctgcttagctcccgcattggcaatcttgagaaagcaatcaagtcagaagctcgacaatccgataacactgcgcgcttgatgtctatgcctggaatgggccctatcactgccatggccattgaagcctttgctcctactatgacagcgtttcgaaaaggacgagattttgcggcatggctcggtctggtgccaagacagcactcgagtggcggcaaacaggtactgggcagaacgtcaaaaatgggacagcgtgacattcggcggcttttaattatcggtgcaatgacagtaatcagatgggcgtgccgtaaagcaccgccagagaactcgtggcttgggaaaatgttatcacgcaagccgcgtatgctcgtcgccattgcacttgcaaataaaatggcgcgcagcgtctgggcgatgatgacaaagaatgaggaatttaaagtttccgctctcgcctctgcacaagcaaagatagcagtgttgtagcgagatcggatcgtcggcgtgtgaggagatcagcgaacggtaaggacagagattggaaagacggactggaaatgcaaccgggtcagtgagcctcgagctcgtagaactgattttgcgccagctccgcttagctccataccggccagtagtcataaaaggactacagtaaaggcctgatacatgaccgcatccaatcacacgttgaaaccgctcgaagaaaagccttgcatgaacgggggcatccataca

SEQ ID NO: 7662 - DNA, 1455 bp, unidentified
  source 1..1455: mol_type = unassigned DNA; note = element_be0f88d
  misc_feature 1..3: note = core
  misc_feature 4..582: note = LE
  misc_feature 583..1440: note = CDS
  misc_feature 1441..1455: note = RE
  misc_feature 20..202: note = bridgeRNA
tccttacctttcttggagggtgttcggggccgctggccttagttaggcttcgattcacccagggacagcgggtatggctttcattggtcagcccttgatggccgaggaggattggccgcccgctgtcccgcgacgactcgaccgctaattgagagatgcgattcgatcgctgtgtaaggacacgacggcgtggtcgtctgccgggctggtggaaatggtgatgagcacggaggcggtagtgacacaagctgtttgggcgggtatcgatgctgggaaatcggaccacttctgcgtggtcatcgatgctgagggaaagcgactgctgtcgcagcgggtagccaacgacgaagcgactctgttgaagttgatcagcactgtcgcaaccatggctgacggcggtgaggtcacctgggccatcgatctcaacgctggcggtgcggccctgctgatcacgctgctgatcgccgctgaccagcggctgctctacatccccggccgcaccgtgcaccacgcctcgggcagctaccgcgggagggtaagaccgacgccaaagatgccgccgtcattgccgatcaggcccggatgcgccgcgatctgcaaccactgcgccccggagatgacatcgcagtggagctgcgcattctcaccagccggcgcaccgatctggtggctgatcgcacccgcacgatcaaccgactgcgtgcccagctgctcgaatacttcccagccctggaacgcgcgttcgactacagcaccagcaaggccgcgttgctgctgctcaccggctatcaaactcccgatgggctgcgacgagccggtgctgctcgactggcagcctggttgggtaaacgcaaggcccgcaacgccgacgccgtcgcggccaaagccctgcaggccgctcacgctcaacacaccgtcatacccggacaacaactcgctgcggccatggttgcccgcttggccaaggaggtgatggccctcgacaccgaaatcggcgacaccgatgcgatgatcgaggagcgatttcgccgccaccgccacgccgaaatcatcgtgagcatgtcgggcttcggcgtcacgctcggcgccgaattcctcgctgccaccggcggagacatgagtgccttcgactccgttgaccgcctcgccggcgtcgccggcctggctccggtaccgcgtgactccggccgcatcagcggcaaccttcaacgaccccgccgctacaaccggcgcctgctgcgcgcctgctacctgtcggcgctgtccagcattcgatccgaccccgtctcgcgcacgtattacaaccgcaaacgcgccgaaggcaaacgccacagccaagccgtcctggccctggcacgtcggcgtctcaatgttctgtgggcaatgctgcgcgaccacacgacctatcaacccaccacgcctactgccgcagcggcttgacaacctcattgagaa

SEQ ID NO: 7663 - DNA, 1364 bp, unidentified
  source 1..1364: mol_type = unassigned DNA; note = element_be129d2
  misc_feature 1: note = core
  misc_feature 2..280: note = LE
  misc_feature 281..1102: note = CDS
  misc_feature 1103..1364: note = RE
  misc_feature 1134..1355: note = bridgeRNA
tactaagatggtccgccgcttgatcttccccggaagatcttgtaggcagattcaaggaggatcatcgacatgcagattcgatcggttggtattgaccttggcaagacgacctttcacctggtggcacttggtgataacggcaaggtgctgctgaagaagacgtttacccagaagcagttgattgccttcaccgcgaacatgcagacctgcttgatcgggatggaagcatgttcggggtcgcacttcctcggccgtgcttttacgggaacaaggtcatgatgtgaagttgattccagcccagttcgtgaagccgtttgtgaagtcgaacaagaacgatttcatcgacgctgaagcgattgctgaggccgtggatcgcgagaacatgcgcttcgtgccgatcaagacagatgatcagctcgacctgcaagctctccatcgcgtgcgtgaccggctcatggcgcgaagaaccgctctgatcaaccagattcgtgcgtttctgctggtgcgaggcacagtgttcgccaagagcccgattcggctgagggaagctctgcctgaggtgcttgagaacgtcaacgagaacctcaccccgaggatgcggaacctggttgccatgctgtggagcgagtggaaggacctggagcttcagatcgtgcagatgaacgacgaagtggaacggatcgcttcgagcgatgccgcgtgtcggagactgcggcagatccctggcatcggaccgctggttgcaaccgcgatcgtggcctccatcggtaacggcgcagccttccgcaagggacgagagttcgcagcctggatggggctgctgccgaagcagcattcgaccggtggcaaggcgaggctgtatggaatcagcaagcgcggcaactcttacctgcgcaagatcctgattcatggagcacgcgcggtcgtattgcgatccaagcgagaccgaatcgcgatgggcgcctggatgacctcgcttgagacgagggcgccacgaaacgtattgatcgtggcaacagcacacaaactggcgcggatcgcgtgggcagtgctctcaacgggccaggactatcgagcagtacccaaggcagtgacggtataagcaagcttagaaaccagcaacatcaagttctccccaccgaggtctgcaccggataagtgaagatgaaagaacagtcaaaacggcgcacctgaaacctgcttgccgaaatggcccatacgaggccggcgtgttttcaaaggacaggtacgcggcgtatctcatcaaggccaggagaaaactctccacctaaaggccggatacattgacgcagactttccttcattcgaaacttttcccttgcattcacacggcggaccataca

SEQ ID NO: 7664 - DNA, 1529 bp, unidentified
  source 1..1529: mol_type = unassigned DNA; note = element_be1d275
  misc_feature 1..3: note = core
  misc_feature 4..240: note = LE
  misc_feature 241..1416: note = CDS
  misc_feature 1417..1529: note = RE
  misc_feature 8..223: note = bridgeRNA
tttcgtattatcaggttagccagttattactggttggcctttttttatggtcggtatacgatggcggtagccgggagaacgcagggcttttaggggctctgaccccgtcaaaaaaactgttctcccactatccccaatgaccatgtttgagctggttgaggcttttgacctcgtatcacaagcgaagctatgggtttggaaccatcgtgggattgccggctaaacgagcaacaggaggagatgacatggaagcaagcagtaatcggactcgatgtagctaaaggagcgagtgtatttcaggcgtttgtgaagcgcaatgaggtgtacggaaaacctgaacagatcagccataccgaagacgagttcgagagacttggcgatgtgattcgccgactagaggaactgacaggggaacggcctgttgttgttctggaagcaacggggcactaccatcgtattattgtcgcctacttggaacgtatgggcatcatgcatttcatcgttaatccgctcctatccaaacgttcgaagagcacacaactacgcaaagtaaagacggatgcaacggatgcctggcacttggctgaaatgtattgccgtggcgacgtgcaaccacatcgcagatgggcggacaaaataacggagatccagcatctcacacggcagcatgaatttatgacgtcacaatttgtacagtctaagttaaatgcgagggcactgttggatcaggcttgtccggcatacgaaggcgtgtttcgggatatgttttccaaaacagcattgcaagtactgcgtcttttgctttgtgagaccagcgtgaccgaagaagtgattcgggaaacagccggctcttcgcacgggaaagcatggattcgggcgaaagtggaacgcattcaaagtatgccgacgttaagcaagtcaagcgcctctcaaaggacagcattattatgcatagttgaagttctgcttgctcagcaggaacaactcagtcaattagaaaagaagattcaagaagaagcgatggaaatcccagaaatagaattattgaaaaccatacccggaatcggagataggctagcggtcgcattgttcgcagagatcggcgatgttagtcagttcggggaacctaagcagcttgtcgcctacgccggactggatccaacagtgcatagctctggtcagtttatggcgacgagcacccgtataaccaagcgtggatctaagcggttacgcagagcgctgtatttggctgtacagtgcggaattaggggaagtacgaatgaaaaattacggacgtattacgataaaaaaagaaaagagggcaagccctataaggtgacagtgattgcttgcgccgacaagctactgcatcacatttatgccatcttgaagaagggtacaccctataccgtttaaaccatatttaaccaacaccctccgcgccaacggaggttatttggcgtgtaaagagattatatcaatttttcttcgtaagaccaagtcaccaatgcttgacaaacattagctgg

SEQ ID NO: 7665 - DNA, 1430 bp, unidentified
  source 1..1430: mol_type = unassigned DNA; note = element_be22b34
  misc_feature 1..2: note = core
  misc_feature 3..108: note = LE
  misc_feature 109..1125: note = CDS
  misc_feature 1126..1430: note = RE
  misc_feature 1192..1427: note = bridgeRNA
taatgaaatggacccagccttcttcccacacgagcctcaggcgaggcaagatgaggttgtgagagcggacaacctacactcatcagcaggaagaagggaggggctgttatgcacacgacgatcttgggaatcgatgtggcaaaaaacgtgttccagttacacggggtggatgcgcgagggcgagccgtgctcagccgacgcgtgaagcgtcagcagttattggagacggtggcgaacctgccggcctgtgtgatcgggatggaggcgtgcgggagtgcgcagcactggggtcgagcgttcgaacagcttgggcataccgtcaaactgatgcacccgaagtatgtcaagccctacgtcaagaccaacaagaatgatggacgcgatgcggaagcgatctgcgaagcggtgagtcggcccaccatgcgttttgtctcgatcaagacggtcgaacaagccgacatgcaggccgtgcatcggacgcgatccctctttgtgaaacaccgcaccgccgtcatcaatcagatccggggtttgttggccgagtatgggttggtgattgcgccctccccagggaaggtccgacccaccctcgttcgttttttggatgacgcggcgtcgggattgaccgcctgtgcccgagacaccttcgccgagctgtctgcgcaactgacggagctcgactcgcgtatcgagcgggtgacgcaccgaatcgagtgcgtatatcggacgcatccagtctgccagaaactggcggcagtgccggggattggtccgttgacggccaccgcgctggtggcgaccgtcggtcgaccgcaggcgtttcagaacggacggcatctggcggcctggttgggcctggtgcctcggcaatattccagtggaggcaaagagcggttaggcgggatttcgaaacgaggcagtcggtatctgcggacattgctgattcatggggcgcgcgccgtcgtgcagcgggccgcgcggcggaccgatacgcagggacggtggctgtgcgcgctcatgcgccgcaaaggcaccaatgtagccgcggtggccttagccaacaaaaatgcccgggtgatctgggccttgttggcccatgatgatgtgtatcgacaacctgcctaagtgcaggtaaggggcgaaccggtcttcacgaggagagacgagccgtatcacagaaggattcacaccgaggagtgcagcgcggagcatccgtgatgacaccagagggacacccagcgcgttcagaccctggacaaattgtcggcccacacaaggccgttgtgctaatgaggagaacgcgcgcgtatttcatcaaggcccggacacatgcgtggtccaccgagaggccggatatataaacgcagccctgtttttacctggtgcatcgcgtgacaccccgttgttgcatcgaaggctgggtccatata

SEQ ID NO: 7666 - DNA, 1377 bp, unidentified
  source 1..1377: mol_type = unassigned DNA; note = element_be2b14b
  misc_feature 1..2: note = core
  misc_feature 3..71: note = LE
  misc_feature 72..1097: note = CDS
  misc_feature 1098..1377: note = RE
  misc_feature 1143..1375: note = bridgeRNA
ttaatgagatggtcacccccactctgtgagcggtatgctggcagggtgtttttctttcaggagaggccatcatggaaaacgttgcgcttattggtatcgctctcggtaaacactcttttcatcttcactgtcaggacaagtccggaaaggcgcttcagcgtaagaaattcacgcgcactaatctaatgcagtttctggcgacatgtccgtccactgttgttgttatggaagcctgtgccggtgcgcattttatggcacggcgtatcagtgatatcggtcatgaagcaaaacttatctctccgcaattcgtgcgtccgttcgtcaaaagtaataaaaatgattttgtcgacgctgaggcaatatgcgaagccgcatcgcgaccatcaatgtggtttgtccagcccagaaccgaagttcagcaggcgatgcgagcgctgcatcgggtcagagaatcacttatcagagacaaggtgaaaacgaccaaccagatcaacggttttttgctggaatttggtatcagtctgccagcaggcgatactgtcattaagcggctgcccctggtgctcgtggaacacgaaatacctgaatatctgagccgtttgctgatgaaattacacgctcactatctttaccttgttgagcaaataacagaactggaatcagaattaaaccagtcaatcaaaactgatgatgcaactcaacgcatcatgacaatacccggtgttgggccgattacggccagtctgctttcatcacagctcggtgatggcaaacaattttcatgcagcagggattttgctgcttccacagggctttttgctgcttccacagggcttgttccccggcaatacagtacaggaggtaaatcgactctgctgggtatcagcaaacggggcgacaaaaacctccgccgtttactggttcagtgtgcccgctcgttcatgatgcgactggaacatcagcagggcagactggccgaatgggtcagagagcaactcagcaagaagcattcgaatgtggttgcctgcgctctggcaaacaaactggcgcgaatagcatgggcaatcacgacgaatcacaatgcatatcaggcctgatatatgtcgcgctgaatcaacagattgattattaagtagttaaacagtagttacccatctggttttgcgaagactgattattgatgacatgaacggcatatcggcctgatgagaaaccttagacaacaaatggctcactgaagccgagggctttttcaggtgcatcaggcgcggaactcatcgtggcgcgggcatccttgcccatacagacgccggatagattgaagcaagcccaccattaatcaaaaatcagtattgcaaaaatgggggtgaccataga

SEQ ID NO: 7667 - DNA, 1499 bp, unidentified
  source 1..1499: mol_type = unassigned DNA; note = element_be300eb
  misc_feature 1..2: note = core
  misc_feature 3..243: note = LE
  misc_feature 244..1479: note = CDS
  misc_feature 1480..1499: note = RE
  misc_feature 15..236: note = bridgeRNA
ctaataagagttatcgagtccgccatccggcagacttggtcgaaggtggccgccggcaggtgagcactggtgcttcctgggcttcgagccctgccgaaagactgtgcccctgccggtgaccgggagagttgatcgctgctgggatgtcgtgcgcgccaggtggcgtgagcactgctttattaggtcgctgatggttctcccgctggctgctggctgaattcgacatcgttgacgggagcgggcgtgcggctgtttgcaggtgatgactgggctgaggaccatcacgacatcgaggtgatggatgcggccgggaaggtgctggcgaagagacggctgcccgagggcgcggccgggatgagccagctgcacgagctgatcggccggttcctgccggaggacgcggatgaggtggaggtggtgatcgggatcgggaccgaccgcgggccgtgggttgcggcgctggtcgcggccgggtacaccgtgttcccggtgaacccgctgcaggcctcgcggtaccgggagcggcacggggtgtccggggccaagagcgatcagggtgactcgcacatgctggcggacatggtgcgcactgactcccaccagctgcgcccggcagcgggggactcgcctgaggcggcgggcgtcaaggtggtggcccgcacgcacaagacgctgatctgggaccgcacccggcaggtgcagcggctgcggcaccagctgcgcgagtactttcccgccgcgatcgaggcgttcgaggacctggacgcccccgacgtgctggaactgctgggcaaggccccggacccggcccgcgccgcgaggctgacccgggctcagatcagtgcggcgctcaagcgtgcccgccgccggaacatcgcggacaagaccgatgcgatcctggccgcgttgcgcggggagcacctgactcagcccgcggccctgaccgttgcctacgccgccaccgtccggtccctggtcgcggtgatcaccaccttgaatgagcaggccaagctcctggaagagcaggtgaaggagcattttggccggcacccggacgctgagatctaccagtctcagcccggcatcggcgcgatcctcggcgcccgggtgctcggcgagttcggcgacgaccctcgccgctacgtcagcgcgaagtcccgcaagaactacggcggcaccagcccgatcacccgcgcgccgggcaagaagaaggtcgtcgccgcccggttcatccgcaacgaccggctcatcgacgcccttatgagctgggctttcgcgtcgctgaacgcctcgccgggcgcccgcgccttctacgaccagcagcgcgccaaaggactcgagcacaatgacgcactccgcaggctggcgaaccggctggtcggcatcctgcacgggtgcctgaagacacgcaccctctacgacgaggccaccgcccggggtcaccgggaaaatctccctcaatcttccgtcgcggcttgacatctaagctcctgggatgt

SEQ ID NO: 7668 - DNA, 1446 bp, unidentified
  source 1..1446: mol_type = unassigned DNA; note = element_be32285
  misc_feature 1: note = core
  misc_feature 2..133: note = LE
  misc_feature 134..1156: note = CDS
  misc_feature 1157..1446: note = RE
  misc_feature 1187..1444: note = bridgeRNA
atggtatggacgcctcccatccacctcttaaggaggttagggcgggaagaggagtgaagtgggggcctctccgacggcatcgttgtgccaaagtggggagtacggaaacagcccctcaggaggaggccccgagatgaactctacgacgtacggtgtggatatcgcaaagtcagtgatgcaggtgtattgggtcgatggcgacacgggagagatcggacagcgcgcggtgaagcgctcgcagctatcggcgttctttgcccgtcggccggcaggacgggtggtgatggaggcgtgcggcagcagccaccattgggcgcgcacgctggcgcctttgggccacgaggtccgtctggtgcatgcgcggcacgtgaagccttacgtgcgcggcaacaagaacgatctgtcggacgcgcaggcgatctggagcgcggcgcacgcgcctgggcttcgctgggtaccggcgaagagcgaggagcagcaagcggtgttgtcgttacaccgtgcgcgagcgcagtgggtgaaggtacggacgcaaacggtcaacgccctgcgcggcctgctctatgagtttggtgtggtgttacccggcggtcggcgagcgggtatcaaggccatcagccggcatcgtgctgacatcgatgagaagttgcctgtaccgatgcgcgagctgatcgacggtcagttgcagatgctcgagaagatcgaccagcggctcaaggtgttagagggccagctggcagggctcgagggtcaaatgccgaacgcgaagcgtgtccgggagatccccggggtgggtctgctgggcgccacggcgctcgcggcgaagctgggtgaggatgggagcggatatcgcacggcacgggagttcgcagcgtgcgtaggactggtgccacagcacaccggcacgggcggtaaggtgagaatcgggcgcttaagcaagcgcggcgatccgtacctccgtacgttgttgatgcacggcgcacgctcggtgattttccattcaaaacaccgcagcgcgtggctggaaggactgctcgccaggcggccactgaacgtcgtggtggcggccctggccaacaagatggcgcgcacggcatgggccctggttgcccacggtcgtgactatcaggcaggtgggctcgctcacgcggcctgaccgttaaatcaatcaaccactgaaggagaggatgccgcaaagagtgcgtaagtcgaatcgatgaagtgatggcgaacgcggtcggtccgcgggtcggtgaagctgaatggctgttcgagccaggcacgagtcaagctcgccacggagatgagccccgaccctgcaaatacccatcagggccagcagccggtgtatccggcaatgcgtaaacaggccggatataagactgcaaccgtctcgctaagctgaaacttcaacgaatcgattgccacacgggaggcgtccatata

SEQ ID NO: 7669 - DNA, 1103 bp, unidentified
  source 1..1103: mol_type = unassigned DNA; note = element_be38277
  misc_feature 1..2: note = core
  misc_feature 3..159: note = LE
  misc_feature 160..1092: note = CDS
  misc_feature 1093..1103: note = RE
  misc_feature 1..161: note = bridgeRNA
cctgtgtgtccgaactgtgcgaaagtggatacgggcgggagaccgttagattcctggtgatgtcaccgagatcgggcttggtccccgcccgcgtttgtatccacctgaacagttgcacgaggctgcgccaacagacctcgcatcacagggacaggccaaatgactttatcccctgtttgcgtcggaatcgacgtttcaaaaacccatctcgatatctatgacgccatcgaaggccatcgccgagtggccaatgtcggcccccacatcgccgagctgtcgcgctccttgcaggaaaggggctgcttcgtcgtcttcgaggcgaccggccactacgacgccgccttgcggcgcggcctcgaggaagccggcgtcgcgcacgcccgcgtcaatccggaacgcgcccgcgacttcgccagagccatcgggcggcgcgcaaaaaccgacgccgtcgacgcccgcatgctcgccgagcttggcagcaggctcgcgcctgaacagcgcgaggccgccgaccgcacccgcgaacagcttgccttccggcacaagcggcgcgatcagctcgtcgacatgcgccagcaggaaaaggtgcgccgcagcgagtgccctgatccggcggccgtcgccgacatcgagcggcatatcgcctggctcgatgaggagatcgccgccgtggaggccggcatccgcgcgatgatcgacgccgacgcggccttgcgcgaaagcgagcggcgcttgcgcagtgtgccaggcgtcgggccagtcaccaccgtgaccctgcttgctctcatgcccgagctcggccggcgctcgcccaagacgatcgccgctctcgccggcctcgcccccttcaacgacgacagcggcgcacggcgcggaaaacgcgcgatccgcggcggacgcaggcgcgtccggagggccctctacatggcggctctctccgcctcgcggtcgaaatcacgacttggcgatttcgcgcgcgccttgcagaagaccggaaagccgccgaaggtcgtccttatcgccgtggccagaaagatcctcgtcatcctcaacgccatcacgcgggagaacggctcctacgcggcagcataaaaacacagttg

SEQ ID NO: 7670 - DNA, 1399 bp, unidentified
  source 1..1399: mol_type = unassigned DNA; note = element_be3fd40
  misc_feature 1..2: note = core
  misc_feature 3..86: note = LE
  misc_feature 87..1106: note = CDS
  misc_feature 1107..1399: note = RE
  misc_feature 1126..1385: note = bridgeRNA
gatggtgtggatagctcctgctccaaccggcgtcgcaatgcgccatactgcagttgttattgactgcttttgagaggagctacccaatgcaggttacaacagtcgtcctcgatttggccaagaatatctttcaggttcacggagtgactgagaatggcgaagtcgctttcaaccaagctttgcgacgcgcgcagttgttcgcattctttgagaaactcccaccctgtctggttggcatggaggcttgcggttccagtcattattgggcccgacagctaagtaagttgggccatgatgtgcgcctgatcccagcgatgtatgtgaagccctatgtgaaacggggcaaatccgacgcggttgatgccgctgctatctgcgaggcagtgacccgtccaataatgcggtttgtcgcgattaagtcagaagagcaacagggcgttctcttcctccaccgagcccgtgatctgatcgtccggcagagaacccaactaagtaatatgctgcgtggcttgctgggcgaatttggtatcgtaattgtgcaggggatcggcagcgcgatcaagtttgcaaagggtgtgctggatggcgacaagccaggcattccagaagttgccatcgatgtgctcgacaatctgagcaaccaacttgttgccctgcatctccgcgtgcggcggtatgaaatgcgtataaggcttcaagccaagcaggacctccgcgtgacgttacttcggtcgatccccggcgttggtccagtgaccgcgtcagcaattgtcgcaacagcaggagatgccagtcagttcaagaacggtcgcgaatttgccgcctggctggggctgacgccgcttaaccgatcaagtggtggcaaagaaaaacttgggcgtatcacaaagatgggggatcgatatatcagacgcctgctggtcactggtataacttctcggctgaggcagatgaaaacacatcccgaacgcgttgatccgtggtcccgagcattgcttgaccgcaaacctacccgccttgccaccgtggcaatggcaaacaagacagcgcggattatctgggccgttttgagcaagaacgagtactacagaccgcacacgatctaaactgaggagaacagaacacacgagacagcaagaccattgaaatgatggagcacagtcagcccgtcagccaagaaaccccgtcgaatgtcagtggcttcacttgtccgcagaccggtttgggacttggtttgcggaaaccatccactgcccggcagggcattgcacagcaatgtcccgagagggagggccagcggccgcgtgcgccgcgcaaacaggccggacacacgtctgcttctgaccagtgccaaaatcagcttcaaatatgtcttgctttgcagcagctatccacacag

SEQ ID NO: 7671 - DNA, 1569 bp, unidentified
  source 1..1569: mol_type = unassigned DNA; note = element_be412fe
  misc_feature 1..3: note = core
  misc_feature 4..275: note = LE
  misc_feature 276..1454: note = CDS
  misc_feature 1455..1569: note = RE
  misc_feature 13..256: note = bridgeRNA
cttatataatatatttaggttaataaaggcaacctataatcctttattgactgattaattattcagcttgctgtataattaatttattagatagagtgatgtcgttttctccttgagatcttatctcgtacttgaaagactgacacctctaacttttaaactgtttacgaataagttggatgttggctttatttaagcacttcgtatctacaataaggcggtaacgtttatcagtttagaggaacctatctgaaataactttagcaggtgattttatgttttttcttggcattgacattggtaaaaacacccacgttgcttccctcattgatgataatggcaaaactgtttttaaagccttttcttttccaaactcaactattggtgctacatctcttttagataagcttactccattttctaacgaaatcgaaattggaatggaagctaccggtcattactggctggcattgtattctttccttgttgagcatggttttgtcatccatgtcatcaatcctattcaaacggatggctggcgcaatgccactgaaatcagaaaacataagacagatattattgattcactcattattgctgacttcatccggtatggtgaatttctggaaacttctcttgccaatgaagatattctttcacttcgtaaccttactcgttttagaaattatcttgtttcatctattggtgacttgaaaagaaagactatttgcatccttgaccagatttttcctgaatatgagtctgttttttctaatattttcggcaaaacatccaaagagatattactgcatttttcttctcctgccgaatttgaatcaattacttctgaacagcttgaaactgctctagagcaagtttcttttaagaaattcgccagtaaaaaaattagctacatctccaatattgccaaaacttctttcggtattacttttgctgtgcagagccttactttacaattaaaacttctaattaaacagattaatttcatagaacagcaggttcatgatgttgaaattcagataaaacaacttcttcataagattaatacgcctattactacaattcctggtattggtgatattataggcgctactattcttggcgagattggtgatattgaacgattcagtaatccatctaagttagttgcttatgctggcattgatgcatctgttcatcagtcaggtgattacattagcactaataacaaaatgagcaagcgtggttcaccctatctaagaactgcattatttcgtgctgccttaattgcctctgttcatgatccagtatttaaagcttactatcaaaagaaacgttctgaaggtaaacatcacttaacttgtcttggcgctgttgctcgaaaactttgttataccattcatgcaatactgaagaacaattgtgaatataaagtccaactaccaacagagtaaaatatacaaaatattacttttcagcctgtgaaatacaggtctatttgtgttgtataaatataactacactctttgcaaatacatttaatttttatgttgactttttatagttggt

SEQ ID NO: 7672 - DNA, 1355 bp, unidentified
  source 1..1355: mol_type = unassigned DNA; note = element_be41ecc
  misc_feature 1..2: note = core
  misc_feature 3..92: note = LE
  misc_feature 93..1112: note = CDS
  misc_feature 1113..1355: note = RE
tgaaactatgtaggaagcctccgtcggatcgattaacgtataacaagttagtcacaatttgtttcacgttattctcacctcgggaggcaacgatgttgtatgttggtttagatgtgcatgtcaagcatattacgatttgtgtacttaataaaaatggtaagctgctgcagcggtgtcagctgccatgcctggatgatgtgattaaatttctgatgaacctgcgaggacgatgcgaagtctgttttgaggccagtaccggttatggcatctactttgaagctctgagtaagattgcttctcgtgttgccgtggcccatccaggactgttgaaactgatttttcgttccaaacaaaagaatgatcgtgcggacgcagagaaactggccaaactgttgtttctcgatgaagttccgaccgttcatgtcccgactgcagacgtgcgggcctggagagagttgattacattccgaggcaaactgattcaaaaacggacccgggctaaaaatggaattcgctcgcttctgagaagtgttggttgcagggttcccaaagagtttggtctctggaccatacgggggatggaatggctaaaacagaaagatctgaaacagccgatgcaaaatctgaaacgggacatgctggtagaagagatcgaaaccctgacgaggcaaaccaggctggttgaaacggaactggcccgctattcgaaagagaacattgccgtgcagcaattgcagagtatccccggcatcggcttacgcactgctgaggcattcgtggcctttgtggatgacccgcatcgatttgccaacagtaagaaagtgggggcctacttcggtctgatcccgatccaggatcagtcagggagtactaatcgactggggcatatcacgcgcgaaggatgtgcagaggtccggcacctggttaccgaagcagtttggcaggggattcgatattcaccgacgattaaagcctattatgaacggattcatcgccatgaaaaagacaggaaaaaaatcgcgattgtagccacatcgcattacctggtgcgtgtgatgtggtccatgttgaaaaatggaaccttgtggaaagaacggagcctggcagtctgagcgactgcagtttcgataagtaaattcaaagagttgtgtcggacttaagtttcacgttgagatcgaaagtgggattcaggtgacatcccgacgtgtgccatggcgcaatgcgatgccgtgacagtgaatgggagtcaccgtaatttgtcttgtggcgcctcgccaaggcgagtgatgccggatggatggttggataattccgcgttcttctcactacggtcttgacagaagcttcctcatgga

SEQ ID NO: 7673 - DNA, 1437 bp, unidentified
  source 1..1437: mol_type = unassigned DNA; note = element_be429e6
  misc_feature 1..2: note = core
  misc_feature 3..231: note = LE
  misc_feature 232..1422: note = CDS
  misc_feature 1423..1437: note = RE
  misc_feature 16..206: note = bridgeRNA
gtcctaccttccaagcgtgggtttgaggcggtcattcgtaagatcgtcgggcccaggggttccgggtatggctgtgagcttgtcgccgttagatggctcaaatgacttggccgcccggagccccgcgacgactcgaccgctcattgggatacgcgactcgatcgctgtgtaggacaacgtcggcgaggtcgtctgcgggtctgttgcgacgacgagctggcggaggtgcccgtgcccgagatctgggccggagtggacatcggcaaggaacatcaccattgcgtggtgatcgacgcgcagggcgagcgccttctgtccagacgggtcctgaacgacgaatccgcgctgctggagctgatcagcggcgtactcgcgctctccgaggacgcgctgtgggcggtcgacatcaaccacggcggtgcggcactgctcatcggtctgctgctgggccacgaccagccgatggtctacctcaccggcctcgccgttcaccaggcatcggccgcctatcgcggtcagggcaaaactgatgccaaggacgccttcgtcatcgccgatcaggctcgcatgcgcagggacctcggcgtcttgcggcctggtgacgagatagccgttgatctcaagatcctggtcaggcgccgcaccgacctcgtcaacgaccgcacccgccagatcaaccggcttcgggaacaactccttgaaatctgcccggccttggaacgagccctcagcctgacgaacaaggggccagtgctgctgctgaccggctaccaaacgccggccgccatccgtcgaagcggcgccaagcgcattgagacatggctgaagaaccgcaaggtcaaaggcgccgcgacgctcgcccaggcggccgttgaggctgcccaggcccagcacaccgccctgccgggagagagactggccgcctcgatggtggcccgcctcgcgaagggggtgatagccctcgaagaggaggtcgccgaacttgacgcactcatcgaggcccggtttcacgaccacccgcacgcggaagtgatccgcagccttcccggcatgggcgccatgctcggagccaccttcattgccgccaccggcggtgagatggaggcgttcgggacggcggaccggcttgcggcgtttgccggcctgtcaccggtgccacgtgactccggccgcgtcagcggcaacatgcgccgaccccgccgctaccaccgcggcctcctgcgggcgttctacctctcctccatggccagcatcaggtcctgccctgcctcacgcgcgtactacgaccgcaagcgtgccgaagggaagggacacaaacaggctgtgctgtccctcgcccgccgccgagccaacgttctgtgggcaatgatccgcgacggagcgtcgtatcaaccagcaccaacggtcaccatggccgcttgacattccgattgggaa

SEQ ID NO: 7674 - DNA, 1198 bp, unidentified
  source 1..1198: mol_type = unassigned DNA; note = element_be4563f
  misc_feature 1..2: note = core
  misc_feature 3..217: note = LE
  misc_feature 218..1195: note = CDS
  misc_feature 1196..1198: note = RE
  misc_feature 37..199: note = bridgeRNA
tcctttagattagcataattaaatttaatgaataaaacagattgagaagaagcagggtacgctatgttatcgctctgagttaatggctcatatcctgataaagcccctgcctcttttcatcaaccttaaactcaaatagaaattcgggctagtgacccattatcaaggagttgagtagtgttgatgatctcaatcattaactttcatttacaaaattatgcaaaatcaaatcattattggtattgatatcagtgcagctacattagatatctgtatatctgctaaagaccaaaaatcggtagttattaaaaatgaggtagccgatattcgcaaattctttaatgcttatccgttcgaaaacctgattgtcggtatggaaaacacagggcggtataactgggccttgtatgaagtattgaaagatctgcatcaccgggtgtatataatctcgccacttcacctcaaaaaaagcttgggacttgtaagagggaagtccgacaagatcgacgctgtaagaattgctgcctttaccgctaaaaaccatactgaactttcccagtggaagccctcatcaccagctattcaaaagctgaaaatattacttacagaacgtaatgcacgtgtaaaatcaaaaaggcaattacttaaacaacaatatgattatactaagatgaaacatcttggtcttgataaagcattacgggaactaaaccagcaacagcttatgctgattgatcgacagatcctcctgattgaacacgaaattgagcagcttattaaagtggatgagcagatgaataaacatgctaaacttatgcgctcggttcctggcgtaggtaaagtactctgttggatgatgctggccaagacggaaaactttacaaccttaatggaaccgcgcaaaatggcctgttacagtggagtagttccttttgctaaccaatccggaacatcaatccggggtaaacaaagggtatcttcttatgccgataaaaccattaaaaccgtattacacttagctgccatgagcgcaatacggttaaaaaatgacctgaaagaatattatctacgaaaaattgctgaaggtaaaaacaaaatgtctgtgctcaatgctgttagaaacaaaatcgttcaccgaatatttgccgtcatcaaaaatcaattaccttatcagacccatttggttatatcatagaaa

SEQ ID NO: 7675 - DNA, 1165 bp, unidentified
  source 1..1165: mol_type = unassigned DNA; note = element_be4a55b
  misc_feature 1..2: note = core
  misc_feature 3..157: note = LE
  misc_feature 158..1159: note = CDS
  misc_feature 1160..1165: note = RE
cttgtattagcgcgaatcgatattttgggtcgttccgtgaggaacggcccgacccgggcggccacccgggccgggccgccgatcgtcggatcgttcgcaccgcagccttttgggctgttcctgagcaagatcgcgatcggctcttcatcgggcccggatggttgaaggaaccgagggttcgcatcacaaggaagggacgacgaagatgagcaagcatagcatggtctgcgccggcatcgacacgggcaaacacaagctcgacgtggcgttggacggacacccggagcaaatgcaggtcgacaacacccctgatggtcacagggtgttgtcgacctggttgcgcaagcatcgagcccaacggatcgggatcgaggcgagcggtggatatgagcaggcggtcgttgcaacattgcgccgcaacggctttgtcgtcatcgtgttccagcccgcgcaagtgcgggcctatgcgaagttccacttgcaacgagccaagaacgacaagatcgatgcagcgctgatcgccctctgctcggccgcgaccaagacggtccatgctccgccggatccccgtttggtgccatttgccgcgtcgctgacaatgatcgagcagatcaccgaagacatcgcccgtcttaagacgcgccgcgagtcctgtcgcgaccagcggctccggcgcttctggaacgaggagatcggtcgtctcaaatcgctgatgcgcggcgagctcaaacaattgatcgcagccatccgccagcaccccgatttcgctgagcagctcgacctgattgccagcgtcgaaggcatcggacatcgaaccgctgtcgccatcctggtgcgcatgcccgagatcggcagcctcacccgcgaagaggctgccgcactggccgggcttgctccctatgacgacgacagcggcaagcggctcggagaacgacacatcgccggaggccgcgagcgtctgcgaacaagcctctatgctgcttcgctcccggcagccttcaattggaacccgcagatcatcgctctctaccggcgactcaccgccgcaggaaaatcccacaaagcagctcttgtcgcttgcgccagaaaactgctcatcttcgccaataccgtcgtcgcccgcggcacgccatgggtcagtaaaaccgctaccagctaatggttg

SEQ ID NO: 7676 - DNA, 1497 bp, unidentified
  source 1..1497: mol_type = unassigned DNA; note = element_be4fb2b
  misc_feature 1..2: note = core
  misc_feature 3..240: note = LE
  misc_feature 241..1470: note = CDS
  misc_feature 1471..1497: note = RE
  misc_feature 7..228: note = bridgeRNA
ctaatggggttgcatcgcctcgctttgcggcaaggtgttgctcgagtccagccggtgggtgagcacttcgccagccagaccgtgcgaggtctagtcctagatcgtgcccccgctggttgctcgggaaggcgtggacggctggtgggatgtcgtgccggtgagcactgatccattagggcgctgcgagcctttctgtgactccgatgtgtgcgttggtcaggaagggaaggtggacgcgaggtgcaggtgttcgtcggcgatgactgggccgaggaccatcacgacatcgaagtgcaggacgagaccgggcgggtgctggctcgtcgtcgactgcccgagggcatcgaaggcatcacgacgttgcatgagctcgtcggggaacacagttccgggttggagagccccccgcaggtggtggtggggatcgagaccgaccgcggcccgtgggtgcaggccctgctggccgcggggtatcaggtgttcgcggtcaacccgatgtcggtggcccggtatcgggaacggcacgcggtctcgggcgccaagagcgaccccggggacgcgcacgtgctggccgacctggtccgcaccgaccggcaccggcaccgacccatcgccggggattcggagctggccgaggcgatcaaggtgctggcgcgggggcaccagtcgctgtgctggatgcgtgggcagcaggccaaccagctgcgctcgacgctgcgggagttctaccccgccgccctggtcgcgttcgagcagctgaccagcgctgacgcgctggcggtgctggccatcgccgccacccccgaccagggccgggcgttgacccggccccggatccaggccgcgctgcgccgcgccggtaggcaacgcaacctcaccgcccgtgccgaggccatccagatcgccctgcgcaccgagcagctggcccaaccaccgctgatcgcccaggccttcggcgcgaccgtgtccgcgctggtcggtgtcctgtcggcgtcggtcgcagcggtcacggacctggagaggcagctggaggcgtcttttggccagcacccggccgctgagctgatccggtcccagcccggactgggaaccgtgctcggcgcccgggtgctcgccgagttcggagacgaccccgaccgctacgccgacgccaaggcccgcaagaactacgccggcacctcaccgatcaccaaggcatcgggcaagagccacgtcgtcctggcccgctacaagaccaacaagcgactccgcgacgcgctgcgccagcaagccttcgccgcgctgaccgcctcacccggcgcacgagccttctacgacgcccgccgcgcggccggagacggccacgacaaagccctgcgcgcactggccaaccgcctcgtcggcatcctccacggatgcctgcgccacgcgaccctctacgacgagcacaccgcctgggcccaccgcagcgaccacacgcaggcagcctgaccttgacacgttagaaccgtgggatgt

SEQ ID NO: 7677 - DNA, 1555 bp, unidentified
  source 1..1555: mol_type = unassigned DNA; note = element_be51a46
  misc_feature 1..2: note = core
  misc_feature 3..270: note = LE
  misc_feature 271..1437: note = CDS
  misc_feature 1438..1555: note = RE
  misc_feature 3..247: note = bridgeRNA
cttgtatgattagctcataggctaaatcatactctcctttccatttttactgtctgtgtcataatacatttagatactgtggactttttatttgtctctgtagcattgactacttgataggagtgtattgccgctacattatctgaaatgtttattagttggatgttgccggaggctttgctttccgagtacttatatcgatcaagtttacgaggataatcgtaaggtggacctgacagtatctaatctttatgaaaggaggcgtcttcaatgatatatgttggcattgatatcgccaaacttaatcactatgcctctgccatcgattcagatggcgtggtactcatcgagccgttcgaattcttgaatgacaatgcgggtttttacaccctcttatccaagctcaattcctttgaattggatgacatcatcattggtcttgaatccactgctcactatggcaacaacctggtttctttccttgtcaccaaaggtctgcacgtctgtgtcatcaatccgatacagaccgccactttgcggaagaacaatatccgtaaaaccaagacggacaaggtcgatactctggtaattgctaaagccatcgcattgatggatcacccaagatttgttactctgtatgatattgcactcatgcaactgaagaatctagggagattccggatgaatcttgttaagcagcgttctcgcaccaagatacaactcactgcttacctggatcaggtttttcctgaactccagtatttcttcaagtctggtattcatcaaaagacggtctacgctatcctaaaagaggcaccctctgctatccagattgcttccatgcatctgactcatcttaagaaccttcttgtgtctaattcccacggacacttcaagaatgaaacggccttagaattaagagttctggcacagaagtccgtcggcactgccgacagatctctatccattcaaattactcaatctatcgcccagatcgagttactggatagtcaaatcgatgcggtagagtctgagatgaaagatattgtcacatctctcgactctgttatcatgaccataccgggtatcggtcccatcaacgggggaatgattctcggtgaaatcggtgacattaaccgcttttccaagcctcgcaagttgcttgcctttgcgggtcttgatccatccgtttaccaatccggaaacttcactgcgaagaaaaccaaaatgtcaaaacggggatcttccgcccttcgttatgccctcatgaatgctgctcacaatattgtgaagtacaatcagacattcaaggaatactatgattccaaaagggccgaaggccgtggccattacaatgctcttggacattgcgccggcaagcttgtccgtatcatctacaagatgcttaaggacgatgtggaatttaacttagattagattccatccatatgttttttgaggcttcctgctgggaggtctttttaggctgcgcttctttctaaatgcaacttattctattttcttctgaaatttatcttgacttttcatagttggt

SEQ ID NO: 7678 - DNA, 1462 bp, unidentified
  source 1..1462: mol_type = unassigned DNA; note = element_be57e26
  misc_feature 1: note = core
  misc_feature 2..154: note = LE
  misc_feature 155..1177: note = CDS
  misc_feature 1178..1462: note = RE
  misc_feature 1220..1460: note = bridgeRNA
gaatggaatgaacgcatccccccggagacgggctaggcaaattacgtaggcatagtgagtggaaatgagaagatggaacctcacgggccgacggcatcaaagtgcccaaaggtggaaaatccaaagactttcacaggcaaacaggaggatccaaatgaatcataccgtatatggcatcgacatcgcaaaatccgtattccagttacataccgtagacatgacgacaggagagatcgtgagcatcaaattgaaacgcgaaaaatttctagcacacttcatcaaccttcctccctgtctgatcggcatggaggcttgtggaggtgcgcaacattgggcgcgtgaattaatcaaattgggacatcaagtcaaattgcttgcaggaaaatatgtaaagtccttcgtaatgggtaacaaaagcgacactgcggatgccaaagccatttggacagcagtccaacaacccggcatcaaaccgatagccatcaagaccgagcaacaacaagctatcctggcgttgcatcgattacgccaaggattggttaaaacgcgcaccatgcaaatcaatgcccttcgaggcttattgactgaatatggtttcgttatgcccaaaggcaaagcaggactgcgcagagatattgccacaacacttgaatcacttcgcttacggttgccatctatagttgtcgatgcactcaccgatcaatggcaacgcataaacgaacaagacaaacagattgctgaaatcgaacacaaactccatatttggctcaaacaagacaaagcagctcaagccattgcaaaaatacctggcgttggtctactgactgctaccgttgcagttgcggccatgggtgatacaaaaacatttaaatcaggacgagaattcgcagcctgggcaggactcgtgccaaaacaaaccggcacaggcggcaaaacaaaattattgggtatcagcaaacgtggcgacacctatctgcgtaccttattaatacacggtgcacgtgcggttctcacccacgctaaacaacctagccaatggataaaagaaatcggtcaacgcagaccacccaatgtcgttatcgtcgcgttagccaacaaaatggcacgaaccatctgggcaatacttgctcatgaccgtccgtaccggagtgactgggtcagcgttaaaccagcgtaaatggtaaacacaaaccagttttaacattaactaacaaaggaatgaacacttgaaagattgcgataggtaaacattgtgtgatggcaaacaggtcagaccgtgacttgctaaacctgaatagttgcatggactccaaaagtccgctaggagaatgaggtgcaagtcagcgtattccatcgaggctcgcaggaatattccctgcaataaagccggatatagaactgcagcctaccttcgtttaacaaaacacaattaaacccttggcaatcgggatgcgttcatata

SEQ ID NO: 7679 - DNA, 1381 bp, unidentified
  source 1..1381: mol_type = unassigned DNA; note = element_be5821e
  misc_feature 1..3: note = core
  misc_feature 4..84: note = LE
  misc_feature 85..1110: note = CDS
  misc_feature 1111..1381: note = RE
  misc_feature 1118..1368: note = bridgeRNA
tgatgaggtggacggcgcccgctcgcggcatcgaagtgccatagggtgatcgtcgtagacgaatcacatgagggggccgtccatatgcaggttagcacgatcgggattgatctcgccaagagcgtgttccaagtgcacggcatcgatgctgtcggcaaagtgaccatcaccaagcagctgcggcgctcacaggtgctgcctctgttcgcgaagctgccgcgctgtctcatcggcatggaagcctgctccacctcgcaccattgggcacgcgagctcaaggcgctcgggcacgacgtgcgcctgatgccggcgagctacgtcaaggcgtacgtcaagcgcaacaagaacgacgctgccgatgcagctgccatctgcgaggcggtgacgcgaccgagcatgcggttcgtgccgatcaagagccccgagcagcaatccattctgatgctacaccggacgcgcgatcttttggtgcgccagcgcacgcaactggtcaatgcgatgcgggcgcatctggccgagctcggtttggtagctcctcgaggcggcgagggtctgcaggcgttgatcatcgtggtgcgggacggaacggacgagcttcccgacctggcgcgcaaagccttgcaagctctacttggccagctggatgctctggcccggcagatcagcgagatcgagcgcgacattcaggctcagcatcgcttgagcgaagcaagccggcggttggagacgatccctggcatcggcattatcggtgccacggcgattgccgccacgatcacagatccgacgatcttcaaatcggggcgcgagttcgcggcctggatcggcctggtgccgaggcagaactcgacgggcggcaaggagcgattgggctcgatctccaagcagggcgaccgctatctgcggcggctgctcatcgtcggggcaacggcagtcatacgccaggcgcgcacccatcccgacaagcatccctggttgatccagctgctggcgcggagaccggctaaggtcgttgcggtagcgcttgccaacaagaccgcgcgcatcgcctgggcggtgctggctaggggtgggacctatcgcgcgccggtgcttgcggcgagggcgtaagtgggctgccgatgattgcttagagttcgcgtcgacgggcgcattccaattgcgagggtgatgatgacgtgatgcgaaacggtcgagccgtcgatcgggaaaaccagcttgggtctatgggcctccaagcccgaaatcatgatcaggacccgatcagcggatcacatcagggccagcggcatccgccgcatcaacaggccggacacatgacttgcacccgaccgcacgcagcacgccagattcctcttgcaataagggcgccgtccacaca

SEQ ID NO: 7680 - DNA, 1533 bp, unidentified
  source 1..1533: mol_type = unassigned DNA; note = element_be5a0fd
  misc_feature 1..2: note = core
  misc_feature 3..240: note = LE
  misc_feature 241..1416: note = CDS
  misc_feature 1417..1533: note = RE
  misc_feature 3..217: note = bridgeRNA
cttgtattatagagtagtagttattagagcccctctccaagggctgtgctacactgtaagggatgctgtggattggttgcaaactcctaccgccagacggttcttgaaaggttccaaccacaggtctttgcagttttgttaatcagttaaataccgcctgacggtttatgtggaacaaggttacaagagcaaagtgccctgtggatgcagcatcaacatttcactgcaggaggaattgctatgatttctgttgggattgacgttgccaaggacaagcacgactgcttcatcatcaactcggagggtgaagtcctcgcggacgtattcaccattccaaacaacatggatggattcaacagcctgctgcaaagaattcgcgagtgttccgcgcctcaggacaaaataaaagtagggcttgaggctaccgggcattacagctacaacattctcgggtttcttcttgacaacggtctgaccacctatgtcttgaaccccttgcacacgaatctgtaccgaaagagcctcagccttagaaagacgaagaccgaccgggttgatgcgcgtaccattgcggctatgcttttgtccgatgtgggcctcaagccctacacagacacagcttaccacaacgaggagctaaagtcactcacaagatacagattcgacaaggtgaaggagcgcggccagcttaaacagtcggtgtccagactggtctgcatcctgttcccagaattggaaaagctggttccgacgctgcacctggcctccatatatgccctgttggatgagttcccgggcgcaaagcagattgccgacgcgcaccttacccatttgaagaccgttcttgttgacacctctaaggggcactacggcagggacaaggcggtggagatacgggagtcggccagaacctcaattggctccgtgatgccggcgaagtccttggagcttcgccacaccatccggctcatccgagagcttgatgccgagataaacgagattgaaaccgcgattgacggcataatggatgagatccattctcctatcacgactatcccaggcattggcacccgcatgggtgctatgattctggccgaagtcggcgacttctcctgcttcgagtctcccgataagttgttggcctacgctgggctttcgccatctacctaccaatccggacaactgaacaactgctatgcacatatggagaagcgcggctcaagatatctgcgttacgccatcttcaacgctgccaaatgcgtctgcctttgggatccaacctttgtagcctaccttgccaagaagcgagctgagggcaagcattacaatgttgccatctcacacgctgccaaaaagttggtacgaattatttttgcattggaaaagtccggccagccctaccgcttggcatcgtaacctacaccagatagcccgcatggcgtcctccagggcgtctgctttgctataccctttttgaaccatctgcttctttgccaccatcctcattttccagcttgacttttaatagttaat

SEQ ID NO: 7681 - DNA, 1534 bp, unidentified
  source 1..1534: mol_type = unassigned DNA; note = element_be5aaf6
  misc_feature 1..3: note = core
  misc_feature 4..372: note = LE
  misc_feature 373..1419: note = CDS
  misc_feature 1420..1534: note = RE
  misc_feature 8..222: note = bridgeRNA
tttcgtattattaggtcaaccagaatatactggttggcctatttttataggtaaattatgatggcggtagccgggaaagcgtgcggcttttaggggctgagaccccgaaacaaaaactgctttcccactacctccaatgaccatgtttgagctggttgaggcaatgacctcgtatcacaagcgaagctatgggtttggaaccatcgtgggagtgccggcaagtttgcttaggaggttgttatggaaccagtggtaggtttagacgtttcaaaagagaacagtgttattcaagcgtttttacagagaaatgaagtgttcgggaaaatggagataattccgcacacttaacaagggtatgtacgactagatcgtgtgctaacagaattgtgtagtacttcaggcaatgaacctgttgttgtgcttgaggcaaccggccactatcatcgaggacttgtctcgcatttgaagcataggggatggaagcatgtcatcataaatccattacagtctaagcgagcgaaaggtacgcaacttcgaaaggtaaagaccgatgctgccgatgcatggcatttggctgaaatgtactaccgcggagacgtaaaacctcatcggacgtgggaagaagcttacacagagcttcaacatgtaaccagacaaaatgagttcgtcactggaatgttcgtgcaagctaagttaaactcacgagcattgctcgaacaggtttttccgacgtactcacaaatgtttcgagacctattttcagtcacatccctgttggtattacaacgatgcttggaaggcaacgtttttaggatcgatgaagtgctgagggaagttacgggtaaggctcgttcgaaacagtgggcggccgagaaagcagagaaactacaattgttgctggccgattggtccgaacagcccaaaagccattcacaggcaaaagcattgagtggaatgattgccttgttgcttgaatttacgaagcagttaaacaatctcgaggaacttatggagcagattgcgaaggaacttcctgaggtggagctggtaaaaagtgttccgggcattggtgacaagcttgcagctgtcctagtagcagagattggcgatgcaaggcagtttcatgacgcaaaacaacttgtagcttatgcaggcctggatcctggcatctttagctcagggaagtttacggcaacaagtagccgaattacgaaaaggggatccaagcgcttgagaagagcgttgtatttggccgttcaatgcggaattcgaagaagtgcaaacagcaggatgaaagaatattacgacaagaaaaggaaagagggcaagccgtacaaggtggtcgtgatcgcttgcgccaacaagcttctccatcacgtgtacgccatccttagtaaaagcgagccctacagagcataaccatatttaaccaacatccttcacgccaatgaaggattatttgttgtgcttagaaagcagtataccagtaattcaaagattgaccaacatgaaatgcttgacaagtattagctgg

SEQ ID NO: 7682 - DNA, 1603 bp, unidentified
  source 1..1603: mol_type = unassigned DNA; note = element_be5ac3a
  misc_feature 1..4: note = core
  misc_feature 5..274: note = LE
  misc_feature 275..1477: note = CDS
  misc_feature 1478..1603: note = RE
  misc_feature 34..294: note = bridgeRNA
ttttagtaccataaaagtgtagttgatagagagtaattaactctagcatctgcacttatttttatataataggggaagcagttggtatggcgtggtcttttttggattaatcacatccgtcaataaaaccgtcaaccaaccccttattatgtatattcgcttaggcaggttgatacttcttaatggagctttcgtgtaacgaactaaactggattgtaataagtgtgggtggttattagcaattgcgattattacagtttgaaggaggtcaattatgattagcgtaggaattgatgtggcaaaaggtaaaagcactgtgtgtattttaaaaccatatggtgaaattgtgtgtaagccatttgacattgagcatcagaacaaagatttaagtgaattagcatcaatgattcttaaatttgatgatgaagtaaaggttgttatggaggctacagggatttatcatcttccggttcttacgtatttgcaggaaaagggtatatttgtaactgttattaacccatacctcatgaaggtttatagaagtgaaagtttgagaaaagctaaaactgacaaaatagattccagaataatcgctaactatggaattgaacattggtttactatggaggaattcaaggtatctgaagatatatatggagaattaaggcttcttggtcagcaataccgacactatatgaaattgcatgttacatcgttacatgaactgacacatttgctggattatacaatgcctggaataaaaacaatgttagcgagctggaacgagggaaatagaaaagataaattaagtgattttgtcgagcagttttggcactttgacgagataacaaagtattctgagtccgaatttatagatgcttatgctgcgtgggcaaaagataagaaataccatcagagccagacaaaggctaaggccatatatgaactagctcatgaaggtattcctacactgtcttcagaaaccccatccgtcaaaatgctggtgactgaagctgttagagtgctcaaggaaattgatgcaactctaggagtaatactatcacgaatgcaagaactagcaaagagcttgcctgaatattctgtcgtaagagaaatgggtggggttggtgatgtactggcacctaaattaatagcagagataggtgatgttcgtagattccatagcggcaaggcacttattgcttatgcaggaatagatacaccaccttatgagtcggggcaatttataggtagtaatagaacaattaccaagcgtggatcagcggcattaagaaaagtcggttatgagacaatgcgatgtatcaaaacgtgccctagaccagatgatcctgtgtatcagtatgtaataaagaaagaagctgagggaaaagcaaagaaatcagcaaagatagcgggattaaataagtttttacgaatttattatgctcgcgtaaaagaaatctataacaattcataaatatactgaattgtaattacataactaagcaggctgcctcaagacagcctttttgtcatacacaaaaatatagaaattataaaaaatgaaaaacctgctaagaaattcttgatttttcttagcagg

SEQ ID NO: 7683 - DNA, 1297 bp, unidentified
  source 1..1297: mol_type = unassigned DNA; note = element_be5cc52
  misc_feature 1: note = core
  misc_feature 2..208: note = LE
  misc_feature 209..1252: note = CDS
  misc_feature 1253..1297: note = RE
  misc_feature 34..198: note = bridgeRNA
ttatatattcggtagaactttgtaattttgcagaaattatcaatatcatgagtggaagaagaccgatctcgcgtttgtcataaagaccgtagccgatgttcagtccccactcttttttacattagaaactggatagttcaatgggcattgaccccgcaattataatggaagttcatgatgtaaagatgttgattaaacatatgtaaccatgcagtatatcggaatagatgtaagcaaagcaacattcgttgtagcttactcctcagagaaaagtcgcaaaacttcaactttcgcaaatacagcagcaggcataaagaagtttatgaaaactattgacccatcgaagcaccattgcgtgatggaagcgacaggaaattacagcctactattagtatacctgctctcgaaagccggctacaccgtaagtatggagaatcctctcaaagtcaagaatttcgcacgtacaatgcttactgtcattaaaacagacgaagtagatgcccgacttattgctctctatggcgagaggatggaacctgcaccatacaagattaaagatgattctctactgaagcttaagcaaaagcgtactatcttaagacaactaaagaagcagttgtctgccaataggaatattcaagaatccttcaatgctttacctgtaaaggatcaatcttgcgagaaagctctaaagaaaaccatcgaattcctagagaagcaggttaaagctatgacagcagaactcgagacttattccaatgaagagttcaaaaagcagctaaacctacttacatctgtcaaaggcattggaataactgtagcaacagctttaatagtagcgacaggcgcctttacttatttcagtagcgcaaagcagttgacaaggtacttaggtctgtctcctacctatcagcagtcaggcacctctgtaaggtatcgaggacatattaaccgcaatggagacccttatttgcgaagtaatctatacattgctgcatgttcctctttgcgatgcaataaggaatgtaaggcattttatgaaagattgagagccaatggcaaaccagctaaactggcagtggttgctgtagccaacaaacttgttcgacaagccttctccgtggtcatgaacaataccccatatgaagatggtttcgtctctaatcgtccgaatggctcctgcggagggagcgccatgcggcaagggactgcgcagtcaggcccgacgagcacagttaaacaagtatcatgacccttaataattattaatcaaaatcacttttattactatagttca

SEQ ID NO: 7684 - DNA, 1392 bp, unidentified
  source 1..1392: mol_type = unassigned DNA; note = element_be5ffdf
  misc_feature 1..2: note = core
  misc_feature 3..88: note = LE
  misc_feature 89..1120: note = CDS
  misc_feature 1121..1392: note = RE
  misc_feature 1116..1379: note = bridgeRNA
agatggagtggttgccgccctacccatccgacaattcctgttggaggattgtcggcctagttccgccaagatgggaaggacggcgaagatgacgacggcgacaatgattgggatcgacctggcaaagaacgtattccaagtgcatggaacttcgatgacaggcgaactcaagttccgcaagaagctatcgcggatacacttccgcagttttatgtcggggcatccaagagcaatcgtggtgatggaagcctgcggcagcgcacactattgggctcgtgagatagccaaatacggccatgaggtaaagctgatcgcacctcagtatgtgcggcctttcgtgaagcgccagaagaacgatgctgcggatgccgaagcgattgttatcgctgcacagcgacctgagatgcgtttcatcacgccgaaggcagaggaacagcaagcgagagcgcttcttttccgtggaagagaacgacttgtgcgtcagcgcacagagctagtgaacgcactgcgctcggtcctttacgaattcgggcatccgaccccgcagggcatcgtgcatttggcgcgggttgaagcgatcgtcgaggccgagaacagcgatcttccaagtctggttcgcgaagagtgccgcgatcttctcctgcagatttgcgagaagacgcagcggatcgaggccagaactaaacagattggcgctttggcaacacagacggatactgcgcgccggttgcaaacgatgccaggggtgggtccggtgagcgcgttggccgttgaggccttcgcgccgccaatggagagcttccgacgcggtcgagacttcgcggcgtggttgggcttggtgccacggcagcattcgtcaggaggaaaagagcgtctcgggcgcatctcgaaggccggacaggccgacatccggcggttgctgatcatgggcgcgatgtctcgattgaactggctcgggcgaaagaagattccagatgggtcatggctgtctcggatgctggccagaaagccgagaatgcttgtggcgatcgcgttggcgaacaaaatggcgcgggggatctgggccatgatgacgaagaagaaggattatgagaaaccggcacagtctgcgtttgcgtgacagaagtgcagcacgaggcagattggttccggtaacggaggtgtgagaagtcgacgacccatatgggcaaaatgatcgaacagatctggatcaggaaaaccagttcggggctaggagccattcagctcgctgaatagatttggacctgatccgctgatcaccatatcggccagcggcttcgaaagtgccgcatgtgaaggcctgacagaagaccgcactcgatcacacccaatggctcataaacttcttgcatcacgggcggcaaccacaga

SEQ ID NO: 7685 - DNA, 1153 bp, unidentified
  source 1..1153: mol_type = unassigned DNA; note = element_be6a4f7
  misc_feature 1..2: note = core
  misc_feature 3..202: note = LE
  misc_feature 203..1141: note = CDS
  misc_feature 1142..1153: note = RE
  misc_feature 11..211: note = bridgeRNA
cttgtcttatgctttctccatcaatcggtaatgattgaaccggttcacgccagaacatttttggcgggcacaggcggcggctggatcgttttgggcttggtcaacgaggaccgtttttgagtttgatcagccgccgtcgtcgcatgaggcctgaacggatacgcaagccgacgagcttgcatgacaagcataggacatgacgatgaagacagatgatagcgttggcatagatatttcgaaggattttctggacatccatcgtttacgcagtggaaaagtagcgcgttttcccaacgcaccctccggatttcgatctctatccaaatggctgggccgcgatataccgacacgggtcattttcgaggcgacaggaccttatcataggtgctttgagctggcgttttcaggaaaactccccttggtaaaagttaatccgttacaggcacgtaggttcgcccaggcctgcggaaccagggttaaaaccgatgcggtggatgcgcgcatgcttgcaagcatgggacgtgccctaactttagaaccggaccgaccaatcgatggaaagcaacaggaactcaaagagttattcagcgccagaggcggtctcatcagggatcgctcccgctcacttaaccgtttgaagacacaaagcttggccctcgtgtgccgacagaccaaggcgcggatagatcagataacgcgccagttaaaggttttgcggttcgacattgacgcgcggttgcaggactgcccacaacgcgcccgcgcccaaactattctgcgctcaattcccggcatcggagagatcgcggctgcagccatacttattgaaatgcccgagatcggcacactccagaaaaaacggcccgcgagccttacgggattggctccgatgaccagacagtctggaaagtggcggggcaaggcatctattcagggtggccgaaaacacctgcgcgatgcgctgtacatgcccgctcttgttgctgccaggttcaatcccgacatgcgcaaaaaatacgaagcaatgataaaacaaggtaaacctcaaaaagtcgccctgacgaccatcatgcggaaactcatcgaactcgccaacaccttggtaaaacatgatcgcgaatgggtgcaaaaaagcgcttgatcaaaacggata

SEQ ID NO: 7686 - DNA, 1380 bp, unidentified
  source 1..1380: mol_type = unassigned DNA; note = element_be6dcf4
  misc_feature 1..2: note = core
  misc_feature 3..115: note = LE
  misc_feature 116..1114: note = CDS
  misc_feature 1115..1380: note = RE
  misc_feature 1088..1364: note = bridgeRNA
agatggggtggatgccgctctcccctgacggcatcgcgatgtgccaaactcgtggtgtcgaagcacaagctgaaggagagggcatccatgggagaagttaccatcatcggcgtcgatggcaaagaacgtgttccaggttcatggggccgctgcggacggatccgtcgtctatcgcaagaagttgtcgcggccgcaatttgcgcggttcatggcggaccagccgccgtgcctggtggcgatggaggcctgcgccagcgcgcaccattgggcgcgggaaatggcccggcacgggcatgaggtccggctgatcgcgccccattacgtcaagccgttcctcaaacggcagaagaatgacgcggcggatgcggaagcgatcgtcgaggcggccctgcggccgaccatgcgtttcgtcgaaccgaaatccgccgaccagcaggcgcgagccgtcgcattccgcacgcgcgaacagcttgtgaagcagcgcaccgaggccgtgaacgccctgcggtcgcatctctacgaattcggccatatcgccccggaggggatcggctacctgccacgcctcgccaaggtcgtcgttgatctcagcaccgatttgcccgagctggcccgggacatctgccgcatgctccttgaccagatcgcccagctcaccgggcggatcgatgcgctgaaggcccggatcgcggcaatatcgcaggaagcggatctgccgcgccagctgcagacgatgccgggcgtgggtccgatcactgcactcgcggtcgagaccttcgctccgccgatggagcagttcaggcgtgggcgggacttcgccgcctggctcggcctggtgccgcgccaacactccagcggtggcaagcagaagctcgggaagacctcgaagatggggcaacgcgacatccggcgattgctggtgatcggggcgaccgccgtaatccgctgggccgcgcgtcgcggtgcgccgaaagggtcgtggctggcgcggatgctggaacgcaaaccgatcccggtcgtggccgtggcactggcgaacaagatggcgcggggcatctgggcgatgctgacgcgcggtgaaagctatcgtggtccggtgctgatcggcgcctgatacggcgtcgaaggggcatcgggccaccgagttgtgaggaaggcatgatctgaatgggcaaatgatcgacatgatccgggtcgggaaaaccagaaaccttctccgagcctcgagctcgctcttggagatgtggccccgctccgcgcatcaccatcccggccagcggcgccaatcagccgcacgaacaggcctgacaaaagaccgcactcgatcacatgtccagaagatcagaaattccttgcaaaccgagcggcatccacaaaaga

SEQ ID NO: 7687 - DNA, 1541 bp, unidentified
  source 1..1541: mol_type = unassigned DNA; note = element_be74cac
  misc_feature 1..2: note = core
  misc_feature 3..85: note = LE
  misc_feature 86..1114: note = CDS
  misc_feature 1115..1541: note = RE
  misc_feature 1140..1366: note = bridgeRNA
cgatggaatggactcctcctgccgtgcggcatcattgtgccaacggtgaaacggccacttgaggccaaagcgaggaggagtccacgtggagcatacgaccatcgccgtcgatctcgcaaagtccgtcttccaggttgccgtgtcgcatcggccgggtcatctcgacgaagaacgacgactctcacgcgatcgactggtgtcgttcttcgcccagcggccgccggcgacgatcgtgctcgaggcctgcgggtcggcgcactactgggcgcgccaactccaaccattcggtcacacggtacggctgctacccccgcatgatgtctgcccgtatgtgcggcgcaacaagaccgaccgcaccgacgcgaaagggcttctcgaggcgaaccggaacgaggagattcacccggtccccgtcaaatcgatcgagcaccaagcgattgcctcgttgcaccgtctgcggtccacctggctcgcgacgcgcaccgcgcggctcaatacggtccggggcctgctgcgcgaattcggcatcttcatcccggtcggcgcacagcgcgtcgtccctcacgtccggactctgctggtcgagccgaccccggtgccggtgctgctgcacacgactctcgcggcggcttgtgacgagattgaaatgcttgagatgaacatgcgtgcggtcgaacgacagctcggggcgctcgcggccgagatggccgacgtgacgctcttgcaaacggtcccgggcgtgggggtgatcaccgcaacggcgctggtcgcgctcgtcgccgacatccggcgctttccgtccggtcgacatttcgcgagctttctcggcttgacgccgaaggaagactccagcgggtcgcgtcgacggctcggcgccatcagcaaacagggcgacgtgtatgtgcgcatgctcttgacgcacggcgcgcgctcggtcgtctggcacgcaaagacggcggcacggcccacgccgctgcaacagtgggccgtgcaggctgagcagcggcgcggccgcaatgtcgcggcggtggccgtggcgaacaagctcgcccggatcgtgtgggccgtgtgggcgcaacaccgcccgttcgcggccgaccaccgccccgggtaatcgcggatttgacgctcgctcacacccagaggactgcaccgagtgctccgcaatcatggcgcaccggtcggaccggcgcgggggaaagccgataactcggctggccgtaagggccgtgcatgcgattggctccccgcgtgcggatttccatgatggcccggagccgaaccggctccacggacgaggccgaagatacgactgcagtccgaccgtcgtgcaacgctctgggttcgacaaccagccacggcgctccgcgcgcgtcaaggccctgcggccgcctccggcggtgcgctccgcgcagccttgacccgtgctcacgccgcggcttgtgcgcagctatgccaacgaaggaacaccttcgttggccagtcaacgaaaggacttcttatcgccacgtttctttttagttgacggaggagtccagata

SEQ ID NO: 7688 - DNA, 1275 bp, unidentified
  source 1..1275: mol_type = unassigned DNA; note = element_be757bc
  misc_feature 1..2: note = core
  misc_feature 3..207: note = LE
  misc_feature 208..1263: note = CDS
  misc_feature 1264..1275: note = RE
  misc_feature 37..213: note = bridgeRNA
cttgtcttatgacctttaccgctgattgggcgagaaaggaaccgctgagagaaggttctggcctcccctcagcggcgagggacggatcgttgatctgctggccaactgacgggccgagttagagtttgatcgccctcgtcttttccctcaggcctgaacggataccaggggtttagccccggatgacaagcataggcagggcaaaagatgacagagactaacatcgggattgacatctcgaaagaccatctcgacgtgcatcgcctcccaggcgatgagcgccggcgtttcgataattccaaagctggccacaaggccctgatccactggatcggggagaccccagcgcgggtcgtctatgaaccctcggggcgttatcaccgcaccctgaagcgggcgctagccgcagcaggcatgccaatcgccaaggtcaatccgcgccaggccagacgcttcgcagaagccaccggtaacctcgccaagaccgatgcgcttgatgcggcaatgctcacccgtatgggggcggttctgtcgctggaggcgcggcccgtaccaagcgccatcatcaatgagctcagggatttgcgcacggcgcgcaacgccctgatcaaggatcaggtcgcggcccaaacccgggccaaagccatcacgctgccccttctcaagcgccagaacgccgcccgtttgaagcagattgaggcgcaaagagaggctgtcgatgcagcaatcaacgcgctgatgcagggcgaccctgacctggcccagcgcttcgctattctgtgctccatcccaggcatcgccgaggtcagcgccgccatgctcctcattgagatgccagagctcggcagcctcgatgaaaagcaggtggcagcccgaaagcattttcaagcaaagtggccacacttggcggctcggaaaatgcgacaagatgaggggaattttcaagcaaagtggccacacttggcggctcggaaaatgcgactaacaaaaagctcgacaggcttggctcccatcgccaggcaatccggcaattggaaagggaagtccttcatccggggcgggcgccagcaggtccggcaagggctttacatgccggccctggtcgccatccgcttcaatgcagatttgaagacaaaatacgaacaactcatcaaggcggggaaagccccaaaacaggccatcaccgccatcatgcgaaagctcatcatcctcacaaacgcgctactcaaaaaaggtagaaaatggcaaacacgagtggcttgaccatcacggata

SEQ ID NO: 7689 - DNA, 1565 bp, unidentified
  source 1..1565: mol_type = unassigned DNA; note = element_be89640
  misc_feature 1..3: note = core
  misc_feature 4..278: note = LE
  misc_feature 279..1445: note = CDS
  misc_feature 1446..1565: note = RE
  misc_feature 13..259: note = bridgeRNA
cttatataatgtatttaggttgataaaggtaacctataaccctttattaattaatttatttatacaagatattcttgtataataggtttattagatagagtgacatcgttttctccttgagattttaaactcgtaagaaagagtgatgcctctttctgttaaacagtttacgtattagttagatgttgaccagcttctggtacttcgtatctcgcataaggtagtaacgtttctcagattagaggtctttatctaaaattctttttataggcgattttatgtttttcttaggtattgatattggtaaaaattctcatgtcgcttctcttattgatgataaaaagaaagtcatttttaaagctttctctttctctaattctactgaaggagctaactctttaattaaaaagttagagcctttttgcgattctttagacattgctatggaagccactggtcattattggattaatttattttcattccttcttcaaaaaaacttctctgtccatcttatcaatccaatccaaactgatggttggcgtaatagtactgaaattcgtaaaagaaaaaatgatactattgattcaatattaatcgcagatcttcttcgttatggagattttgttgaatctactttatcaaatgaagattatctatcattgaagaatttaactcgttttagaagctatcttatatcttctactggtgatttaaaaagaaaaacaattgcactacttgatcaagtatttcctgaatatgaaaaatgtttcagtgatgtttttggaaaaacatccaaagaaatactattgtcatttactactcctcaagagtttgaaaatatttcttcaagtaaacttactaaagcattagaaaatattactctaaagaaatttgcaaaaaagaaaattgaagaattatctgaaaaggcaaaaactacaataggtattaagttttgcttagattctttttcattgcaaattaaaatgttaatagaacaaattatttttatagaaactcaagtagaatcaatagaagaagaaatatcaactattatgagtaaattagattctcctatcactacaattccaggaattggatctgtaataggtgcaactatactaggcgaattaggagatatttcaagattttctaatgcttctaaagtagttgcttatgcaggactagattcagtagtttcacaatcaggaaattatgaagcaaaatctatgtccataagtaaaagaggttcatcttatttaagaaaagttttatttcaagctgcacttagagctgaattttgtgatcctgttttctcagattattatcagaaaaaaatcgcacaaggaaaacatcatttggtagcaactaatgcagtagcgagaaaattgtgttatacaatatttgcagttctcactaagaatgaagcatacaaaatacaatagtaaaaagtaaatatactgttttttagagttgttaacacaactctttttatgctacaaatttcttaaaagaaaaatacctaaaaaattttttattttacctattgacttttaatagttagt

SEQ ID NO: 7690 - DNA, 1158 bp, unidentified
  source 1..1158: mol_type = unassigned DNA; note = element_be8bd89
  misc_feature 1..4: note = core
  misc_feature 5..118: note = LE
  misc_feature 119..1135: note = CDS
  misc_feature 1136..1158: note = RE
ctccgtaagtcgtcgggtggcgcgggagggccggatgtggcttatggggtcttgccttcagtggcttccgaggagtggccgtccggctttccggtgcgccctggctcttgattgagatgtgctggacatctccggcacgtcctccgctccgcttccggctctgctcgcagcccacggccagcaggcggtctacgtgcccggccgcgcggtcaaccgcatggcaggtgcctaccggggcgaggcgaagaccgatgcccgcgacgcttacgtcatcgccgagacggtccgtcaccgcaacgacttcgccgcgatcgacctgcctgcccagccggctgccgacctcgcgccgctgaccgcccaccggtccggcctggtagccgaccgggtgaggacgatcaaccgcctgcgtgacgtgctgaccggtgtctttcccgcgttggagcgggccttcgactacagctcgcagaagggcgcactgtctctgctgacgggataccagaccccggtcgccatccgccgccgcggccgggcgaggctgacggcccggccggccaaccgtggcgtccgcggtgccgacgcggtcgctgcgaccgcgcttcaggccgcgcaggcccagcagaccgcgctgcccggcgaggatgccgccgcgcagatcctcgccgacccggccgtgcagatcctcgccctggacgaccggctgaagcggatcgacaagcagatccgcgcgacgttccgcagccacccgcaggcggagatcgtcgggtccccgcccggtatgggtccgatacccgggacggagttcgtggtcgcagcgggtgacctttccgcctacccggatgccggtcatctggcttcggcggccgggctcgtgcctgttccacgcgactccggccgccgcaccggcgacctgcgccggcccaagcgctacagtcgccgcctgcgacgggtgttctccatgtccgcacggaccagcatcatccgcgacgggccggaccgggccttctgcctcaagaagcgcggcgagggctgtaaagacgtccaggcggtcatcgcgccggcccgacgacaggcgggcgttttgcgggcactcctgcgtgacggacgagtcttcacctccgccccatcggtcacgtaaccggcttgacgtcatcatggaga

SEQ ID NO: 7691 - DNA, 1211 bp, unidentified
  source 1..1211: mol_type = unassigned DNA; note = element_be8f4cb
  misc_feature 1..2: note = core
  misc_feature 3..267: note = LE
  misc_feature 268..1119: note = CDS
  misc_feature 1120..1211: note = RE
  misc_feature 12..189: note = bridgeRNA
cttgtatctttcctccggtggtgattagctatcaccaccgcgcgccgatgaccgcgagttggtgcccaaagcgaggactttgtgggacagatagcggctcggcagcgcactgctgggccggcgagacactggacggtatcgtagggcgaggaccctgtatgtacaaggcaagtgggcgcagtggctgatagcagtttgttatctgcaggaggccaagtccatgttttcataggtattgatgtatcaaaggccaagctggattgcacgttgctgacggctgaggctgacaagtgtaagaccaaggtggtggtcaacaccgccgcgggcgtacaagccctgctggcgtggtgcgccaaacacggcgcacagccggcgcagttgcacgccatcctggagcctacgggtctgtatcacgagcaagcggccacggcgctgccccaggtccgggtctctttggtcaatcccgcccaggcccgggactttgccaaggccttggcgctgcgctccaaaaatgatgcgctcgacagctacgtgctggctcgctatggacagacgctgagcccggcgctgtggcacccggcgcccttgcatgcgcgtcaactgcgcgccttgttgacgcgacgcgaggcgctgagcaaggatctgttgcgtgagctcaatcgcaaagagaagagccagttcagcccctcggcgcccttggtcgatggttccatcgacaaggccatcgcgttcttgcgcgaacagatcaaacaaatcgagcgggcgatcgatcagcacatcgacaaccaccccgacctcaagcaagactgcgagctgctgaactccatccccgccatcgggcctcaggccggcaacgccatcctggccgtcatgcacaatcggcatatcgactccgcccagagcctggccgcctatctcggggtggtccctgtgcagcgccaatccggcagcagtctgaacagctgcgcacgcctgtccaaagccggcccctcccaggtgcgcgccacgttatacatggcggccctggttgggacccgccacaaccccacatccgcgccctttaccagcgcctgctcaaagcaggaaaaagcaaaaaggccgcgctgggcgcggccatgagaaaacaggtgcatctgtgcttcggggtcctcaaaaaccgcatcccctaccagcccaattacgccatgaacggttgactgccaagacggtat

SEQ ID NO: 7692 - DNA, 1514 bp, unidentified
  source 1..1514: mol_type = unassigned DNA; note = element_be967fa
  misc_feature 1..3: note = core
  misc_feature 4..246: note = LE
  misc_feature 247..1266: note = CDS
  misc_feature 1267..1514: note = RE
  misc_feature 3..220: note = bridgeRNA
cttatattatatttagcgcagttagctactgccaaagcccaagtggtatacttggaataagccactgtggattagttcatttcctccaatcgcttgacgatttccgaaagggtctaaccacagctttttgtttcaattggtaatgagtttgataacgcatagacgttttatctcgtctaaggtaacaaggcaaaaagttcgtggataaccaagtagacttgaaatactatatctggaggtactcccatgctttatgtgggcattgatatcgctaaaaataaacacgatgttacagccttgaatgttccaggaaaaactgttcttaaaccactcactttttcaaataataaagctggttttgaactcttagatctgtctcttcgacagctcaaccaagactgtctcatcgctcttgaaaataccggacattatgcctttaatctactgaacttcctgcatgaacaaggatataaagtttacacctacactcctttgctcatcaaggaatttgccaaatcattatcacttcgcaagactaaaacgaataagaaagacgctcatggcatcgctcttaaacttctttctgaccccaatcgtgaacaatttcaacacgataatcggcaagtagaactaaaaatactggctagacatattcatcgtctcaagaaaaaacagtctgattggaaagtacaatacactcgttgtcttgatatcatctttcctgagttggataaaatcgttgaaaagcattcagaatatacctaccaactcttgacatgctaccctaatcctcagaaaaggcttgaggcaggatttgataagctgatagaaattaagcgattgaccgcttctaaaattcaggatatcctctcagttgcacctcgttctatcggaacaacatctcctgctcgtgaattcgaaatcatcaaacattacaagaggctcattgacaaggcggaaacatgtgtcaatgacttgatggctgagttcaactcggtcatcacgacggtcactgggattgggaatcgtttagaggcggtcattttagccgagattcgaaatattcatgcctttgataatcctgctcaattacaagctttcgctggactggattcttctatttatcagtcaggtcagattgatttagctggaagaatgatcaaacggggttcccctcatctgcggtgggcactcatacaagctgccaaagcatgccctcgcttttcacctgcttttaaggcctatcttaagactaagttagaataaggaaaacattacaatgtagccatcatccaccttgcaaaaaaacttatccgaaccctgttttatatcctaaaaaagagctgccatttgacgaacaaaaagtgatgtaatttctgaaattaacacaggattacctttgaaaaaatggactttttcaagggccttttgccgtgctctaaaatcatcgccaaatcatcaaattgaaataagaaataatttagataaaactattgacttttcttatagtttgt

SEQ ID NO: 7693 - DNA, 1406 bp, unidentified
  source 1..1406: mol_type = unassigned DNA; note = element_be96d04
  misc_feature 1..2: note = core
  misc_feature 3..185: note = LE
  misc_feature 186..1127: note = CDS
  misc_feature 1128..1406: note = RE
  misc_feature 1167..1404: note = bridgeRNA
cgatgagatggtctccccccgcttcacaaaacggcgtctttgcgccaggatggaaaataaagtctatccatcaaccggaaacgagaggagaccaccatgaacattaccactattggcttggacctggcaaaaactaacttcacctcgtctgcttcaaccggcattttaaggaagttaaaaaacgcatgctaaaacgacatcaaatgcttcctttttttgcccaattaccccccttgcatatcgccatggaagcttgctccggagcgcattactggggacgcgagttgaaaaagatgggccacgaagtcgccttgataccgccccaatacgtgaagccttatctgcgcggaaacaagaacgacttcaacgatgcccgcgctatcgctgaagcaggcacgcgaccgggcatcccaacaacggccattaaaagctctgaagagcaggacatacaggcgcttcatcgcatccgttcccaatgccagaaggatcgtaccgccttgatcaattccacccgaggcctcttgagcgagtacgggatcgttatccccaaaggaagccataagctacgccggcgtatcccggaacttttggaagatgcggacaaggccttgagtttctctttccggctcctactggcacgtcgctatgagcagctcgtggaactggatggacacatcgcgttctacacggacgaactcgaaaagtatggccgccaaaaccaggcttgccaacggctgcaaaaagttccagggttcggtcccatcgtttccagcgccttccacagtgcgataggcgatggccgccatttctccaaaggccgggacgtttccgcctccctgggtttggtgccacgccagcacagcagtgggggaaaaaatgttctgctgggcatcagcaaaaggggcgaccgctacttacgcagcttgcttgtccatggcgctcgtgccgtcgtcaacagggcggtcggtaaagatgaccgcctgagccgctgggtcaatcgcatacgcgaaaaacgcggctggaacaaggcggtcgtcgccatggccaacaagatggcccgcatgggatgggccatcttgagatataacaccacgtatcaacccttgtcggcagaatcggcttactgacaaggtaacgctaacaccaaaacgtatccagggaggtttcccacccgagattgcgaaggctctttgttgagcgatgacacaacaggtcaaaccggcgtatcgaaaacctgaccaagggcatgattctcgaaaccgataatgcgataaggacgatacgcgcgaatttcatcgaggccagagggaggaagtttctctcaccaaaaggccggatatacggcagcaatcctgtccctgtcatctccacaaaaagtccttgcaaaaaaggggggagaccatata

SEQ ID NO: 7694 - DNA, 1498 bp, unidentified
  source 1..1498: mol_type = unassigned DNA; note = element_be98e32
  misc_feature 1..2: note = core
  misc_feature 3..244: note = LE
  misc_feature 245..1477: note = CDS
  misc_feature 1478..1498: note = RE
  misc_feature 7..239: note = bridgeRNA
ctaatggggctgcatccggtcgcttctggaccaggatcgggtgtccgagccgccggcgggtgagcactgccagtcccgggtccgttggtcgaggcccacgcttagatcgtgcccccgccggtgagcgaggaggagcggatggccggtgggatgtcgtgcctcgagcactgatccattaggtcgccacggtcttctcctccagggttcgggccggtggtgccgatccggaggaggccgtagcgcagtgttgtttatcggagatgactgggccgaggcccatcacgacatcgagatcgtcgatgccgagggccggcgccttgcccggcggcgactgcctgagggcgtcgaagggttagcgacgttgcacagcctgatcgccgaccacttgaccgaggacgacgacgctgaccaggtagcgatcgggatcgagaccgatcgcggtccgtgggtcggcgcgctgatcgcggccggctacatcgtctatgcggttaatccgttgcaggcggcccgctaccgggaacgacacggcacctccggtgccaagagcgaccccggcgacgcgcacgtgctggccgaactggtgcgactagaccgggcccatcaccgcccggtggccggtgactccgcaaccgccgaacacgtcaaggtgctggcccgtgcccatcagtcgctgatctggtcccggcagcggcagaccaacgcgctgcgctccatgctgcgcgagttctaccccgccgcgctggccgccttcggcgaagagctcgacggccgggacgcgctggcgatcttggccatcgccccctctccagaagccggccgacggctctcccagagcaagatcgccgccgcgctgcggcgggccgggagacaacgcaacctcgagcccaccgccgaacggatccaggccactctgcgcgccccgcagctggctgcccatcccggcgtggtgggcgcctacgccaccgcagtgcgttcgcttgtcgcggtgatcgccgagatggcgacccagatcgaggggctcagggcgcaggtggaggcgggttttggtcagcacccggacgctgagatctacctgagccagcccggactggggccggttctgggcgcccgggtgctcgccgagttcggagacgacccgacgcgctacaccgactccaaggcacggaagaactactccggcatggcgccaatcacccgcgcctcaggcacccgacgcatcgtgctggcccgctatgcccgcaaccgccgcctcgccgacgccctctactgccagtcattcagcgcgcttaccagctcaccgggcgcccgcgcctactacgaccgccagcgcgcccgcggcgccacccaccaccaagccctgcgcgcccttgccaacaggctcgtcggcatcctgcacggctgcctgcaccaccaccgccgctacgacgagaccaccgcctggcccgccgagaacatggaggcttccatcgccgcttgacgacttacagccgtgggatgt

SEQ ID NO: 7695 - DNA, 1155 bp, unidentified
  source 1..1155: mol_type = unassigned DNA; note = element_bea8ffd
  misc_feature 1..2: note = core
  misc_feature 3..204: note = LE
  misc_feature 205..1143: note = CDS
  misc_feature 1144..1155: note = RE
  misc_feature 14..210: note = bridgeRNA
cttgtcttatgacaatgcacggctcctgaggcaaaagggagccgctgcccagcaccgcatattgcggggcagcggcgggggtggcgtcgtgcggagcttggtttttgggaaccgcggtcgagtttgacgacccccgtcttttcttgcgacctgaacggataagtgggctgcgggcccgaacgacaagcaagggtagaagaaaagatggccaaggataccattgggatcgatgtgtcaaaagaccgtctggacgctttttggtactcccgtgaggagctgcgcaccctgcccaattcgccggagggtttcattcagttgtgcgactgggttgggcaaaacgacggcgttctgttcgtgtttgaggccaccggtgcatatcacaggggcctggagcggcacttgagtcttgcgggtgtatgcttcatcaaagtcaatccgcggcaggccagacgcttcgcacaggccgtcgggcgattggccaagaccgacagcgtggatgcgaggatgctggcgcggatgggcgtcgttcttgagctggcacctcaggccgcagaaggcgaagatgttcatgatctcagagagttgctgacggcccggcgcgccttggtcaaagatcagatcacagcaaaaacacggctcgccacggcagtgaacccgctgatacgcgagcagctgtgccgcaggatcacggacatctgcgcggacatcaaggctctcgatgacgtcattgcgcagatcgccaaacagcgcggcacactggaggatcgcatccgccggttgatgaccattcccggaatcggcaggttgacggccacgaccatgctgatcgacatgccggaacttgggcatctggagtccaagaagatcgccgccttggctggccttgcatcgatgacgcagcagtccggtcagtggcaaggcaaagagcggatcaatggtggccggtcctcgatccggcgggcaatctatatgcccgcgctggttgcaattcggttcaatcgggacttgcgggtcacctaccagcatctcctgaaggctggcaaagcaaagaaggtcgccatcacagccgtcatgcgccgcatgatcgttctggccaatacgctgctgcgcgaaggtcgtgattggcagttcgaacgcccttgaccaagacggata

SEQ ID NO: 7696 - DNA, 1345 bp, unidentified
  source 1..1345: mol_type = unassigned DNA; note = element_bea93fb
  misc_feature 1: note = core
  misc_feature 2..62: note = LE
  misc_feature 63..1094: note = CDS
  misc_feature 1095..1345: note = RE
  misc_feature 1118..1336: note = bridgeRNA
taatgggatggtccgccgcagacctctagaagttgtagagtgcggtggcaaggaggcattccatgaaactacacgtgctcggcattgatttgggcaagacggtttttcatttggtgggactggattcaacaggcaaggtggtgatccgcaagagatgttctcgcacccaactgctggccttcaccgcgaatttgcaggtgcagttgattggcatggaggcttgtagtggagctcactttctggggcgggcactgcgcgaacaaggtcatgaagtgcgattgatgccagcgcaatatgtgaagccctacgtgcagacgaacaagagcgactacctggatgccgaagccattgccgaagcggtgcaacgaccgagaatgcgttttgtgccgatcaagacggaggagcagttggacctgcaggctctgcatcgggtgcgcgagcgttgggtgatgcgacgcacggcggtggtaaaccagattcgcagtcttcttctggaacgtggactgaccctgcccaagggccgaagtcatttggatgagcaactgcctcgtatcctggaagacgctgagttgaatctgtccgactcattccgtgttctgctggctcagctccaattggaactggagcaactcgcagcacgcgttgaggagatggatcgggtcatccagaaaacggccagagagaatgaagcctgccaacgactgacggagattccaggagtcggcccggtcaccgccacagccctgatcgctgcggtgggcaacgccagcgcctttcgaaaagggcgaaatctgtcggcttggatggggatcgttccgggagagtactccaccggcggcaaacagaagttactgggtatcagcaaacggggcaataagtatttacgaagactcttcgttcagggcgcacggagcgtactgcaacagcgacacaagcaggctcccggtctgagcagttggttagcgcaactgttggggcgcgcacaccagaatgtggtcgtcgtggctttggccaacaagctggttcgcatggcctgggcggtcttgtgcaagaacgaacgctatcgcgcacccgtttttgcggtgacaacttaaaatccctgtttagagaaaagagttcctgccaggtctgctggcggaaaatagagatggcaatgggtctctcccacgctttcgaaacccgatatcggaaaaggtcgcttccagaccgtccagtttatgaggacgaaagcgagcggaaatccatcatggcccggggtcacggactccactaaaggccgaatacattggcgcagacccactgccattcttcgtttttcgcttgcaactctgcggcggaccataca

SEQ ID NO: 7697 - DNA, 1499 bp, unidentified
  source 1..1499: mol_type = unassigned DNA; note = element_beacbd3
  misc_feature 1..4: note = core
  misc_feature 5..241: note = LE
  misc_feature 242..1483: note = CDS
  misc_feature 1484..1499: note = RE
gtcactagggcaccctctttctcatgggcatcgctagggtgctcgatgttgggactcggcgggggccggggagacggcctaggtcggtcgccagtgaatggccgcaatgacaccgccgcccctggctctcgcggggccgcagaccggcaacagggagacgcgccgcagagcgccggttagtgaccgcccgggagccggcctcgccgccgccgggtcgtcgctgccatcgtgaggagaccagatgcttgcgctgcccgaagcgcagttcttcaccgggatcgactgggcatcggctgagcacgcggtgtgcgtgctggacgcggccgggaagatcacggcccagttcaccatcgcccgctccgccgaggggatcgcgtcgctggtgcgccgcctggcccggtacggcgacccggcggacctgccggtcgcgatcgagcggccgtcggggcggctggtggacctgctgctgcaggccgggcacccggtggtgccagtcagcccgaacgcgatcaagacctggcgggaaggcgaggtgctgtccggcgccaagtccgacgccggggacgccgcggtcatcgccgggtacctgcggctgcgcagccaccggctgcaacccgcagccccgtacagcgacgagacccgggcgttgcgcaccgccgtacgcacccgcgatgacctggtccagatgcgcgtggcggccaccaatcagctctccgcgctgctggaggcgcactggcccggcgccaaagccgtcttcgccgacgccggatcgccggtcagcctggaattcctgacccgctacccgaccccggccgccgcccgccacctcggcgagaagcggatggccgcgttcttgatcaagcacggttacagcggccgccggcccgcggcccagctgccgggccggctgcgccaggccccgcccggcagcaccggcgaggcgctcaccgaggcgctgcgcgacgccgtgctcgccctggccaccgtgctgcgcgcgctcaacggcgcgatcaaggacctggaccgcccggccgccgcccacctcggagagcacccggacgggccgatcttcacgtcgctgccaaggccggggcacgccgactggatgctcgccgagtggggcgactgccgccaagcctgcgcaggcccggactccgtcgccgccctcgccggcgtcagtccggtcacccggcaatccggcaagcaccgatccgtcagcttccgctgggcctgcagcaaacggttccgccgcgccatcacgaccttcgccggcaacagccggcacgccagtccctgggcagcccaggtctacgcggacgcccgggccgccggaaaggaccacccgcacgccatccgcatcctggcccgcgcctggatccgcgttatctggccctgctggatcaacggcgtgccctacgaccccgcccggcacggcgcggcagcggccctcgccgaacacacttccacccgatttgtcgcttgaggttgacacagggggt

SEQ ID NO: 7698 - DNA, 1365 bp, unidentified
  source 1..1365: mol_type = unassigned DNA; note = element_beadd73
  misc_feature 1..2: note = core
  misc_feature 3..76: note = LE
  misc_feature 77..1102: note = CDS
  misc_feature 1103..1365: note = RE
  misc_feature 1078..1353: note = bridgeRNA
cgttggggtggacgccccctgacggcatcgatgtgccatagtggaggtgttgaaaacaccactgaaggaggcgtccatgggtgaggttagcacagtcggcatcgatctggccaagtcggttttccaggttcacggctcggatccgagcggtgctgtcatcttccgcaaaaagcttcggcgtgatcaggttctgtcattcttctcgaccttgccacgatgcgtggtggcaatggaggcctgtgcgagcgcccattactgggcccgcgagatcgccgcggtaggtcatgacacgcggctcattccgccagcctatgtgaagccgttcgtgaagcgacagaagaacgacatggctgatgctcaagcaatctgcgaggcagcacagcgcccgaccatgcggttcgtgcaaggcaagagcgccgaagctcaggcatccggcgtaatcttccgtacgcgcgacctgctcgtgcgccaacgcacgcagctgatcaatgccctgcgcgggcaccttaccgagtttggctacatcgttcggcagggcgtcggacacgtcgccaagctggtcgatattgtcggcgaccctgcttctgaaatcccgaccgaggcccgaccggtgctcaccgttatcgcagagagcttgcaagcgatgcaggcgcagatcgctgtgttggaccgcgaaattgcaagccgggcaaaagctgatcccgtggcgaagcggcttatgacgatacctggtgttggtcccgtgattgcgacggcgctggttgcgctggcgccggccgccagtactttccgccgcgggcgagactttgcagcctggctcggcctcgtcccacggcagcactccagtggcggcaaggagcggctggggcgaacgaccaagatgggcgagcgcagtttgcgacgacttctgatcctgggcgcgagctcggcaaccaaggttgcggcccgtgaccccgacaaagccggagcgtggttggccggcatgctggcgcgtaagcctcgcatgctggtcaccgtcgcgctggccaacaagatggcgagaaccgtctgggcgctgatggcgcacggcggctcctacagagctccggccgcggcggtgtaaccgccgaggcttgaggcgtcagggacgcaaggaaaggtcagtagagaggtatggcgcaacggtcagaagacggggtcgggaaaaccagtgaaatgtccaggcgcctcgagcgcgcacttgcggtctggacccgatccgcgatctccatacaggccagcagccgtgatgatggctgcatcaacaggccggacacacggaagcacctgaacctgcgcgtacaaatctctcgaaaacccccttgtatccagcggggcgtccacaca

SEQ ID NO: 7699 - DNA, 1448 bp, unidentified
  source 1..1448: mol_type = unassigned DNA; note = element_bec521b
  misc_feature 1: note = core
  misc_feature 2..335: note = LE
  misc_feature 336..1442: note = CDS
  misc_feature 1443..1448: note = RE
cacttcctccaggattgttcgagcgaggtttggccgtggggtatccacagggttgtcctctggtgatccacagcaaccttcgcgcaggctggtcgcgtcctgccgccggccccggtcttggccctgcgcatagctgaccgcgcagatcgcgtgtcctgccgccgaaccgccgggccggggccggcgggaggacgcggcaaccgccggccgggacgttcgtgacctggtaggagcctgaccttcggtgtcccggaagtgctctgtccgcccgccccggccggcggcgttgttcccccttccccgggctgtgctggtatcgcgcggaaggagaggtcatgcccaggatcgcagaacaggcgctgcccgtcacggggggcgtggacacccacgccgacgtgcacgtggccgcggcggtggatcaggtgggccgggtgctgggcacccagtcattcccggccgatgcggccggataccaggctgcgctggcctggatgagcgcccatggcgcgctggccagggtgggggtggagggcaccggcagctacggcgccgggctggcccgctacctggccgcttgcggcgtggaggtggccgaggtgatccggccgaaccggcaggcgcgccgccagcgcggcaaatccgattccgcggacgcggtggcggccgcgctggccgccctcagcggcgaggcgtccggggtgcccaaaagccgcgatggggcagccgagtcgatccgggcggtgcgggtggcccgggccggcgcggtcaaggcccgcacccaggcgggcaaccagctgcgtgacctgatcctcaccgcccccgagcaggtccgccagcagctcgccgggctgccacgtaaccggcaggtggacgtggcggcacggttccgcccgcacgacctggccggcccagctgcgggcgtccgggcggcgatggcttcggtggcccgccgccaccaggcgctagccgccgagatcgcccggctcgacgccgccctcgaggaactggtcacgcacgccgccccggcgggtttcctggccaagcggggcgtggccaccgttgtcgccgccacgctgctggccaccgtcggcgacaaccccggccgggtccgccgcgaagccagcttcgccgcgctgtgcggcgccagcccggtcgatgcctcctccggcaagcagctgcgccaccggctcaaccgcggcggcgaccggcaggccaactccgcgctatggacgatcgccatgacccgcctggcccacgacccgcgcacccaggcctacgcggcccggcgtaccaccgagggcaagaccaggaaagagatcatccgctgcctcaaacgctacatcgcccgcgaaatctacaagaccctatgccggcccaagcagccaggccgggattcagcgccacaagtcaaacaagatctttcggccaaggtcttgacgtaggagctt

SEQ ID NO: 7700 - DNA, 1198 bp, unidentified
  source 1..1198: mol_type = unassigned DNA; note = element_bec7a17
  misc_feature 1..6: note = core
  misc_feature 7..394: note = LE
  misc_feature 395..1168: note = CDS
  misc_feature 1169..1198: note = RE
  misc_feature 9..193: note = bridgeRNA
gtatctctcattgataaatgattagctatcatttatcacatcgaagtcagtgagcttgcctgtgcgtctagtatttaatactgctccgtagataaggccctgactttctattctcagaaactgaatggtattcaagcacactttttttaagtagatgctgtatgtacaaggggagtaagtagagatgatgtttatcggcattgatattagtaaagagaagattgatttatcgtggttgagagaccagcttacaaacaaaattaaaacaaaagtctttaaaaacaagaatcaagactttttagcaatagaaaaatggctttaaaatacaactaaaagcgctgctaatgagctcgttatcaccctcgaaccaacgggtgtttatcatgaagcactgatgtattttttacacgagcaaggctttaatattattttagcgaatcccggtaaagctaaaaagtatgcagacgctttaaacataattcataaaacagacaaatctgatgcaacgatgcttgctcattacggctgtgctaagcacgcagtcgttagttattggcaacctgatgcattagaagttagagagcttaaagcccttatccgtcgtttagatgcgcttgagagtaaccgacaacgagaagctaaccgattagaagcaagtgaattcagcaacgtttcagcacgtgtttgccaatcgataaaagtgactatcgcgtttttagacgatgaaattaaacagcttaaatctgacattgataaccacatagataatgaacctgatttaaaaagaaacaggaaactacttgagtctatccctggcattgggcccgtattatcgagagagctgacgtatttgtttgcggctaaaaaatttaataaagccaaagaagcggcagcttattgtggattaatcccacggcataatgaatcgggtaaattaaaagggcgaacatcaatcagtaaacttgggccagccagaattcgatgcaaactttatatggcggccattgttgcagggcaatggaataaaacaataaagagacacaagttaacgttaataaacaatggtaaaacaccgatgcaagctgtgtgtgcaaatatgcgaaagctaattcatatatgttttggtgtaataaaaaaccaggaagcgtttaagctccaagaaagttaaatacggccttgaagcttaaaatgagagatg

SEQ ID NO: 7701 - DNA, 1567 bp, unidentified
  source 1..1567: mol_type = unassigned DNA; note = element_becc327
  misc_feature 1..3: note = core
  misc_feature 4..282: note = LE
  misc_feature 283..1455: note = CDS
  misc_feature 1456..1567: note = RE
  misc_feature 36..258: note = bridgeRNA
cttgtataatatagttacattatacaagctcctttctttaaattttttatattgattatatatttttttatttatataatatacttaattagatagagtgacatcggtttttccttgttgttttaacttcgttagaaagagtgatgcctcttctgataaagtgtttacgaattagttagatgttgacgcttcctgtgtacttcgcattttgaacaaggtagtgacttttatcagctcttgaggacttctatctaaaatatattaacggaaggtgtgttttttatgtttttcctaggtattgatattgctaaacataatcatgttgcttcattaattgatgataacggcaactctatttttaaagcctattctttttctaattccagcaatggggctgattccttaattgacaaattaaaaaaatattctacagatgatatcatcatcggtatggaagctactggacattactggctggccctatactcatacctgttagaaaaagatttcaatattattgttataaatcccattcaaactgatgcctggcgtcatgcaactgacatcagaaaacgtaagacagatagcagcgactctgtcctgattgctgactttatccgctttggaaactttaagacttcttccattgccgatgaaaaatatttaaatcttcgtaatatgactagatttagacattctttaatcgagcagattggtgatctgaaaagaaaaattattgccaacctggatctagtttttcctgaatattcatcatattttagtgatatttttggacaaacttccaaagaaatattgcttaacttcaatactgctgaagattttaaaaatcttaagacaagagattttgaaaaagttttaaggaatattaccttaaaaaaatctgcaactattaaattaaacagtcttaaacaaatgtcccaatcttcttttggagttaaatttgcccttagttcctactctatacagattaaatgcttaattgaacagattaaggtaatcgaagatcagacaaaactcattgagaatgaaatagaatcaattgtaaaagacctgaatacaccaatttttacaatacctggcataggctatgtgacaggagctgtcatactcgctgaattaggcgacatcaacaaattttccagtgataagaagatagtcgcatatgctggtttagatgcaactgttaatcagtcaggacaatctgacggacagcatggacatttaagcaaacgtggctcaacacacctaagaaaagccttgtttcaagctgcttttgttgcaagtacgaatgacaccatctttaaagatttttatgacaaaaaacgcaaggaaggaaagcatcatttagtagctgtaaatgcagttgcccgtaaaatgtgccatgttatttatgcagtactaaaaaagaatgaaccttatgtagagcaaaaatagaataaattaaaaatacattaacctaactgacaggtatttttgttgtgcataaatttttcaataaattttatctaaaaactttaaaatttatgcttgactttttatagttagt

SEQ ID NO: 7702 - DNA, 1241 bp, unidentified
  source 1..1241: mol_type = unassigned DNA; note = element_bed1440
  misc_feature 1..2: note = core
  misc_feature 3..263: note = LE
  misc_feature 264..1223: note = CDS
  misc_feature 1224..1241: note = RE
  misc_feature 6..217: note = bridgeRNA
cttatatcttgattctgtcttcttttgaagtcagaatccccgactgatcatcgggagggtagcggggaagtcgcacccgaccttaggcttaaaagcctgccacgtagattgaactccccgctatccgcactcgctataaaagttcgaacggtatacttaggactccattgactggatgatcctgtatttataaggctgagcacagcgagcgcactttgtgattaaaacaattgttattcaaatacttatcaaatactaaaatcatgtcaaacgttatcattggtgtcgatattgctaaattgaagttcgatgtagctcgtttgtatgaaagtaaatacaagcatgctaaattcacgaacgatgctcaaggttatgccaactttatcatttggttagctagctttggcgacattaatgttcgcatttgcatggaagctacaggagcttacagcataccgcttgccaaatttatggcagatcgcgggtattttgttagtgtcattaatcctgctcaaattcacgctttcggtaaaagcgagttgatccgcgcaaaaactgacaaagcagatgccaagctcatcgcccgctatggactgcaagcagagttaaaagcttgggttcctttacccattaatattcgtgacttacaggctatgacccgccgtattgagcatttgcttgaaatgcaacagatggaacaaaaccggctggataccgccgatccagctatcatcccatcaattaatgcggttctattgaccctggataccgagctaaaagccacccgtaaagccattcatgaccacatagataacgacccagatctcaagaatcgcagcgacttgcttgattctatccctggtatcggccctgcagccatcgcccatctcctcgttgccttgagcttacaccatgggtatgccagtgccaagcaagcggtagctcacgcaggccttgcgccaaaaatcagcgagtcaggcacctggacaggcaaaactcgcattgccaaaaatggtgattcaagattgcgtaaagctttatacatgccagcattggtagcctggcagcataatcctgtcatccgtattttctgtgagcgccttaaagccaatggcaaaaatggtaaggcaattgcctgtgccgccatgcgtaagttaattcatcttgcttttgctatattaaaatcgggtgagaaattcgatccaaattttttacttgcataatgtgcttcaagacggtat

SEQ ID NO: 7703 - DNA, 1634 bp, unidentified
  source 1..1634: mol_type = unassigned DNA; note = element_bed95e1
  misc_feature 1..2: note = core
  misc_feature 3..294: note = LE
  misc_feature 295..1479: note = CDS
  misc_feature 1480..1634: note = RE
  misc_feature 60..272: note = bridgeRNA
ctggtatattgtaattgactcatctaacggtcacttacaaatataccttctcctttctatcaaccttttaatccgtggttgattacggtgctgtacatttgtatgatataaatatgtgatgtggatttgtacgttcaacctgtggctttgactacttaacggaggttcttaccacacctcatttctaaataatgattagttagatgagtctcgaattcgtatcttgtaccaggttttatgaaatgagtgctgtggataacacattacatattttcacgaaaggaatgtattatcatgattttagtcggaattgacatcggtaaaaaccaacacaccttttccatcattgacaaaggaaccggagaaatactatcaaatccttctgtttttaataacaatcaggaaggattcctgtcactcatcaaaaaactaagcgactatgccaaatcagaacttctgattggcatggaagataccgggcattatcactttgccttgctcaagtatcttcttgacagtcattatactgttgcactgattaacccagccactactgaccttaccagaaaacttcaaggcggcatcaccaaaaatgactccctcgattctcttactatttgtgatgtaataagctccaaccatcgtaagaaaccatatcgcattacaaaagtgaatcgctttgacctttatgaacaaaagcagctgacacgtcatcatcataacctgaaagaagaattaaacatctacaaaaaccggcttcagaaatgcattgatatcgtattccctgaatttaattccttgttccgttcaaagtacggcattgtttacatgaatgttttgaaaacatttgcatctgccaaaaaaattgcagactccgatattcaaaccatccgagaatgttttgaatataataggcgtggaaagcggatttcactttctgccgagcagcttaaagcagcagctaaaacttctgtcggcatacattctgttgctgaagaaatacagattagacaccttgtccgtcagattgaaatgattgaagaacaactttctgaaatagacaaaaagatagaagagttctccttacaaaacgactctcctatcctctccataccgggaatttcacacttttccggtacatccattttagcggagttaggagatatttgcaactacacaaaagcatctcagataataaaatttgcaggtgttgcaccgtatcaccatgaatccagccagtttaccgcccagcacaccgcaataaccaagaaaggttcaaggtatctaagaaaaacactgtatcagattattttgacggttatcaataacaataaggtttttactgcttattacaacaaaaagttggccgaaggcaaaggtcacagatgtgctcaggggcactgtatcagaaaacttttaaggatcatctatcatcttttaagtaccggacaaacctttgatcctgatttactgagataaccatacatacaactcaacttatacaatcagccttttttgaaaggtctgtttgttgtgccataaaatccataattattcacatattttcaaggtacatagttttgataactaaaattcattttttctaaaaaactacttgatttttatatagttag

SEQ ID NO: 7704 - DNA, 1561 bp, unidentified
  source 1..1561: mol_type = unassigned DNA; note = element_beddf7c
  misc_feature 1..4: note = core
  misc_feature 5..287: note = LE
  misc_feature 288..1451: note = CDS
  misc_feature 1452..1561: note = RE
  misc_feature 51..267: note = bridgeRNA
tcacgtataattaaaaccatctcgaaaggggtggttttaattatatctcctttcctacaaaattggttgtacagcaggagtagctacctgcggtataatcaggtcaagcactgtggatctgtatctatttttttacagtctgactgttatgaggtgactcataccacagtggcttgcctgcattggtaatcagtcggttaacgcttgacgtttcattatttgcgtgaatacataggcaagtcgtctgtggagacaacagtgctaatctaccgtaaaggaggcattccatgtactgcatcggtatcgacatttccaagtacaagcacgactgcactgtcatcgatgatctcggtgatacagtcacaccctcatggtcgtttaccaacgaccgcgagggtttttctctcttcaagcagtttttgaacagccttgaaggagagaaaaagatagagcttgaatccaccggtcactatgggcagaatctgaagctgttcctcgaatccaacggcctcaccttcatggagttcaatccgctcctgatctccagatttgttcacagcaaatccctcaggaatacgaaaacagattccattgacgcactcagcattgcccgctatgtgatgacggtagagtacaagccctatccgccatcattctaccacttggacaagctgaagtcactcacaagatttcgtgacagcttggtgcgtcaacgcagccgccagcttgtagagcttaccaacgtcctggacagggtgtttcccgagtttaagtccttctttaagggaaggctatctgcgacagctctatacattctggctcattaccagaacccagagaagattgcaaacatgaacgctcgttcgtatgaacctcttcgcaaactgtctcgcggtcgctttacaatgtcgaactttgttgaactcaaggctttggctaagaacacggttggtgtttcaagcgactatttgctggatcagatgaacatccgcttggaaatttactctcagctggactccaaagtggacgaactggactgccagatcaaagaatgtgtgcagggtattaaccctcccattctctcgttgcctggcatcggtgagctttccgctgccgtcatcctttctgagtttggtgacttcagtaaatttgacagcccttcaaaaatgctttctttcgctggcttggaacctggttattaccagtccggccaatctgagcacaccggtcacatggtcaagcatggctcttctcaactcagatatgctttgatgaactgctgccttcctcttgttaccaatgaaccaacctttgcagagtattacgccaagaagcgggcagagggcaaacctcatcgcgtggccataacccatgttgccaaaaagctcttaagagtcattttcactttacagacaaggaacatcctgtacgatccttcgatgatccgctgatcctaatcgttcatatctctaaaaaagtcctctgctgagggcctggatttgtgcgcccttttttgcctccacagttttttcgcctcaagggcttgactttctatagttgg

SEQ ID NO: 7705 - DNA, 1648 bp, unidentified
  source 1..1648: mol_type = unassigned DNA; note = element_beed8cb
  misc_feature 1..2: note = core
  misc_feature 3..246: note = LE
  misc_feature 247..1431: note = CDS
  misc_feature 1432..1648: note = RE
  misc_feature 3..224: note = bridgeRNA
ctcgtataataaagtagtagttattagagtccctctccaaggacaatatgctatactgtaatggatgctgtggatcggtaatcactcctaccgcttgacggtttcagaaaggctccgaccacagacctttacgagtttgttaattagttagataccgcccgacggtttatttagaacgaggttacaagacgtgaagcgccctgtgggttcatacagtgtcaaaataaactttacggaggcatcattatgatttatgtcggaattgatgttgaaaaagacaagcacgattgtttcatcgttaatttagatggtgaagttttacacgatgttttcaccatacaaaataatatggcaggttttaaagatttgcttttcaaaattaaatctgccgaaccaaatccagacaaagtaaaagtaggacttgaagccacgggacactacagttgcaatatcttaggatttttgaaacgtatgggtctaacaaccatagaaatcaatccactgtacaccagtctgagccggaagagcatcagtctgcgtaaaactaaaacagataaggttgatgctcgtacaattgcaaatatgataatgtctgacgtgagcttaaagccctactcagacaaattatatcataatgaagacctaaagtcactaacaagatacagatttgataaagttgcacaaagagccaaactcaaacaatctgtgtcaaggcttattaacatactttttcccgagcttgaaacactcgtttcaactttgcacggcaaagctgtttacacacttttgtcagaatttccaagtgctcaacatattgcatctgctaatttaaagcatcttacacatttgttggacaaagcttccaaaggtcgtttcaagagagctactgcagaccaaatcagagaaactgcaagacagtcaatcggttcctatcttcctgcaaaatctcttgaattgaagcataccattaaactcatcaatgaattaagcgacgaaatcgcagaaatcgaagcagaaatcaagaaaatcatggatatcattgattctcccattttatctataccgggaatcgggattaaccttggtgcaattattattgctgaaatcggtgacttttctcgatttgacaaccctgacaaaatacttgcttttgcaggttgttcaccatctacgtaccaatcaggacaactttattcttctcatgccaaaatggagaaaagaggttcaaaatatctgagatgggcattgatgaatgcggcagcttatgtgtgcaaatgggaaccgacatttgccaactatctttcaaaaaagagatccgaaggaaaacactactatgttgcactttctcatgctgctaaaaaattagtgcgtcttgttttccatcttgagacaaccggagaaaagtacaaatttcaaaaattgtcatcctgagcctgaactgaaactttatactccgcagtcggcgtagcgaatcctttacaaaccgaagaattttaatgctaaaatttttcagtgaaggcactacgtctttttgtcttgtcatccatcgccttcactgttctttgtggtgcattaaaattctgtttgtcaaaaacgacggtgttttttatcttttctctgtttttacccttgacttttaatagttagt

SEQ ID NO: 7706 - DNA, 1248 bp, unidentified
  source 1..1248: mol_type = unassigned DNA; note = element_beef511
  misc_feature 1: note = core
  misc_feature 2..241: note = LE
  misc_feature 242..1234: note = CDS
  misc_feature 1235..1248: note = RE
  misc_feature 23..238: note = bridgeRNA
ccgttactttcttcgtagcccttgatcgcgtagttatgtgagggtgttggcctgtcaggcccggcatggttcttgcccccagtcgcccatgatccggggggtgttgtcaccgggcctgactggcatcaggtgatcgctgataggggctggaccgggactcgtctcaggccgttcgtaacgtggatgccgagacttgatgccgcggttcaggccggcttgtggaacctgagacggaggattcatgatcgagaactacgacagcgttgacgtcttcatcggcgtggacgtcggtaagggagaacaccacgcggtcgccctcgaccgggccggcaagcaactcttcgacaaggcactgcccaatgacgaagcgaagctccgcgagctgatcgggcagctgaaacgacacggccaggtcttgttcgtcgtcgatcagcccgcgaccatcggcgccctgccgatcgccgtcgcccaggccgaagacgtgctcgtgggctacctgccggggctggcaatgaggcgcatcgcggacctgcacgcgggcgaagccaagaccgacgcccgcggtgccgcgatcatcgcccaagccgcgaggagcctcccgcatgctttgcggtcactgcagctggccgatgagcaggtcgctgagctctccatgctctgcggcttcgacgatgacgtcgtcggccagatcacggccaccagcaaccgcatccgaggcctgctcacccagatccaccctgcgttggagcgggtcctgggccccaagcttgccgaacagctcgccgccctccgccggcaacgggacgagatcgccgtcgaagtcgagcggcttgtggaggctcactctcttcaccccgtcctgatcagcatgcccggagtcgggatcaggaccgcagccagactcctcaccgaagtctccggcaaggactccgcgaccgccggccacctcgccgcctacgctggcctggcccccgtgactaggcgctccggcagctccatccgcggtgagcacccgtccagacgcgggaacaagatcctcaaacgggcgctgttcctctcggctttcgccgccctccgcgacccggtctcacgggcctactacgaccgcaagattgaccaaggcaagcgccacaaccaagccctgatagccctcgcccgacgacgctgcgacgtcctctacgccatgctgcgcgacggcaccctctatcaaaccgaccatcaactcgcggcttgacaagaacatagggg

SEQ ID NO: 7707 - DNA, 1378 bp, unidentified
  source 1..1378: mol_type = unassigned DNA; note = element_bef10b2
  misc_feature 1..2: note = core
  misc_feature 3..86: note = LE
  misc_feature 87..1112: note = CDS
  misc_feature 1113..1378: note = RE
  misc_feature 1145..1365: note = bridgeRNA
tgatggggtggacggcccctgctccccggcatcgaagtgccatatgatggtcgtgctaaacgtcacattagagaggaaccgtccaaatggatattacaacaatcggcctagatttggccaaaaacgtttttcaggtgcatggtattaatgcggctggtgatatcatcgttcgccgtcgcttgcgtcgaactcaggtctgtacatatttcgctggattgagaccttgcctgattggtatggaggcttgtggcacatcacatttttgggcacgtgagctggtagcacttggccacgaggtgaagatcattcctccatcctatgtgaagccttatgtccggcgaggtaagaacgatgcagcagatgccgaagcaatttgcgaggccgtaacacgtccgaatatgcgttttgtgccgattaagacagaagaccaacaggcggcgctcatgctgcacaaggcccgcgagcttttggtgcgtcagcaaaccatgttaaccaatgcgcttcgagcacatatggctgaactgggtatggtcgctccgctagggcgaggtaaacttaacgatattattgccgtgatcgaggataccgaagatgagagcattcccgccttggcaaaggccgccttaaagccattggtgatgcagctaagcgcgaatgaggccgcaacggcggcacttgatgcggagattaagacttggcacaaaagcaacgcagccagtcaacgcttggcaacaattccaggtgttggttatttaacggcatctgccatagccgccacggtacccgacccttcatttttcaaatcaggccgtgaattttcagcttggctcgggttggttccacggcagaattccagcggtggaaaagagcggctcgggcgaatatcaaagcaggggaacccatatattcgtcggcttctcgtcattggcgcaacgtccatgttgcgctatgcgcgggctaaaacggcacctggtgcagattgggtcaatggcttgcttgaacgccgtccagcacgactggtcactgtggctatggccaacaaaacggcgcgaattgcttgggtcctgctggctagagaagaaacatatcatactcctagtcccgccttgtaaagagcagggaccgagaaacgaagacaggaacaagaatttgcaagggtgaaaacgacttgatgtcaaccggttgaaccggggatcgggacactccgtcaggaccaagcgctacgagcacgctgaagtgattggaaccagatccgcgaattccatcagggccagcggtcatgaagtgaagactgcatcaataggccgaacacatgactgcacccgaccggggtgggattgagccaaatattccttgcaatgtgggggccgtccacaca

SEQ ID NO: 7708 - DNA, 1442 bp, unidentified
  source 1..1442: mol_type = unassigned DNA; note = element_bef6ff4
  misc_feature 1: note = core
  misc_feature 2..225: note = LE
  misc_feature 226..1428: note = CDS
  misc_feature 1429..1442: note = RE
  misc_feature 12..243: note = bridgeRNA
ctactagagactttcggcaaggccggcgtctggccagactcggcctaggtgctcggcaggttcgctctcttttgggctgcccatccgtcctgcgggtgtggctctattccggtttgcagcctgccgggccccgctgacgaggcgtggctcaagaggggactgcccagctcgtagtagcaatgcccacctcgccgtccattccggtgccgagtgagcaggagcgagatggtggagcaggtcatcatcggggtcgatccccacaagctgtcagcgacgatcgaggtcgtcgaccacaacgagcggatgttgggatcgggccgattctcaacagaccaggccggctactccgcgatgcgggccttggtgaagtcctggcccgaacgagtctgggcagtcgagggcgcgaacggggccggtcgcccgttggcccaacgtctgctcgaagccggcgaacaagtcgtcgacgtcccggcgaagctagccgctcgcgtccgactcttcgacaccggccacaaccgcaagaccgacgcactggatgctcactcagtcgcggtcgtggctgtccgcacctcgaacctgcgagcgctcaaggtcgacggggagctcgaggcgatgcggatcctcaccgaccgtcgcgaagccctgacccgacgacgggtccagaccgtctgccgactccaggcgctgctcgccgagctgctccctggccaggccaaacgtgacatcaccaccggtcaggccaaggccatgctggccaccgtcagaccccgcgacatcgccggcaagacccgacgccgcattgctgcagaagaactggctgagttgatcgcggtcgaggccaagatcaagaagagcaccgccgagctcaaggacatggtcctggcccgcgactcacgactgatggacattcacggcatcggagcggtggtggccgccagaatcctggccgatgtcggcgacgtcacccggtttgccgaccgcaacaggttcgcgtcttggaccggcaccgcgccgttggacgcctcctccggcgagcaggaccgccaccggctatcccgggcagggaaccgacgggtcaatcacatgatccacatcgccgcggtcacccagttacgcctcgacaccgagggccgcgcctactaccggcgcaaacgcgccgccggcaagaagccacaagaagcgctccgctgcctcaaacgccgcatctccgacgtcatctaccgacagctcatcgcggacaccaaaccagcaggcaaggcggtcccgggagagcaccgcggggcgactcctgagtccagcgcgaccgacctacccccgcacatcggcacttcggaaaagccactcccgggaccgcagtcacgacgctacgcccagcccaccacggcacgaaagaaccaacctgccaaacccctccaagacgccagttgacaacagaggggagc

SEQ ID NO: 7709 - DNA, 1557 bp, unidentified
  source 1..1557: mol_type = unassigned DNA; note = element_befa25a
  misc_feature 1: note = core
  misc_feature 2..244: note = LE
  misc_feature 245..1444: note = CDS
  misc_feature 1445..1557: note = RE
  misc_feature 6..219: note = bridgeRNA
tcgtattattaggtcaaccagagattactggttggcctattttaatggtcgttttatgatggcggtagccgggagaacgtgacagcccctggggaatcaccccgtactaaaaacagttctcccactaccccctactaccatgtttgagctggttgaggcattgacctcgtatcacaagcgaagctgtggagttggaaccattgtgggattaccggtgaatagaagatgggaaaggaaagataatatgagacctgttattggtattgatgtagcaaaaggaaaatcagtcatacaagcattcattaaacgcaacgcaccctatggacgtgatcaagttatttggcacactctaaatggtcttgaacaccttcttcgagtattacgtgaaatggaaagaaaaacgaagatgaagccagcggtcatattagaaccgacaggacattatcacagagttctggttcaacgcctacagagtgagggatatgaccccatactaattaatcctctacaagcacaaagagctcggaggacaagcttgcgcaaagttaaaacggatgcctcagatgcatggcatttaggagacttgtactaccaaagggaagattggatcacccagcctcagcgagaagaacacctcgtggacctgcagtttctaactagacatcatgagttcattacaagtctttatgtgcaagccaaactaaacttgcggacattattagatcaagtgttccctggctacgaaggtgtatttaaagatttgttttcaaaaacctctctaaatctgctcgaaatgttgcttacgcatgaaaaagttcaaagcggagaagaagaggagtggaaagaagccgtaaggcaagcaacaagaacatcccgttcggaggcttggatgaatcgaaaaatagatcatttaaggacggcaatgcttcagaatcctgtcacgtacgtcccattcggcttagagacagctctgcgcagcatgttagctactgttcgagagtttcaagtacaactgacagaactcgagaagaccatcttggagttgtcagagttgattgaggaagtaaaactgctagagacaatccctggagtaggcgcgaagatagcagcctcaattgttgcagagatcggcgacgcgacacaattccaaaatgctaaacagttagtggcctatgcaggacttgatccaagtgtatttagctcaggtaagtttacagccactcaaaatcgtataacaaagcggggctctaagcgtttacgacgtgccgtttatttagcggtcacatgtgggttgagagtagggttaaatcttcacctccgagagtattatgacaagaaaaaaagtgaagggaagccccataaagtagctgtgatcgcttgcgccaacaagttactgcatcacatctacgctatgctcaaaagaaggcaatcctacacttattaatccgcaaaatccataaacttccattaactggaggtttatttgttgtgtttatttttagtatagcaaattcgatgaaattcaaaaagcttgacttgacataccattagctggtt

SEQ ID NO: 7710 - DNA, 1468 bp, unidentified
  source 1..1468: mol_type = unassigned DNA; note = element_bf00849
  misc_feature 1..2: note = core
  misc_feature 3..229: note = LE
  misc_feature 230..1447: note = CDS
  misc_feature 1448..1468: note = RE
  misc_feature 7..228: note = bridgeRNA
ctaatgggggtcgattgttctggctgagttcggtcaggatggttgccgagccgccggctggtcagcactgtccccagctgggcgttgagccctacatctagatcgtgcgccggtcggtcggtgaggttggccgtgatggctggtgggatgacgtgcctcgagcactgaaccattagcgagctgctggtcgcctcagggcttgaacgcttcacgagttgaggaggtgcagatggggaaggtgttcgttggtcatgattgggccgaggatcatcacgacgtgttcgtcgaggacgacatcggctgtcggctggcgggtggccggcttccagaaggggtcgacgggatcgcccggttccatgagctggtcgctggcagggttgaggatccggccgacgtggtgatcgccacagagaccgatcgcgggttgttcgtcaacgccctggtcgctgccggttacacggtgttggcggtgaatccgatgtcgacgtcgcgatatcggcaacgacactcgacatcgggggcgaagtccgatccgggtgacgccaaggtgctcgccgatctggctcgcacggacgctcacaaccatcgaacggtggcgggtgacagtgagctcggtgaagcgatcaaagtgctcgccagggcgcatcagtcgatgatctggactcggcagcgccagaccaaccagcttcgctcgaccttgcgagagttctacccagctgccctggaggcgttcgatgagctggctggacgcgacgcattggccgtcttgacgattgcgtcgactccgaccgccggcagtcatctgtcgctgtcaaagatcgcctcggcgttggggcgggcaggtcgacaacgtcgcctcgctcaacgcgccgccgagatccaaacggcactgcgctccgagcagctcgcagcacccgctctgatcgccgaggcaatgggtgccaccgtcaccgcgctggccgccgtgatcgtcgagctgaacacccagatcgccagtctcgagacccgactggccgaccattttgagcagcacccggacgccaagatcatccgctccctaccaggactggcgatgacactcggcgcccgggtgctcggcgagttcggggacgccccgaaccgctatgtggacgccaagtctcgcaagaactactccggcatgtcacccatcaccaaagcatcaggcaaacaccacgtcgtgctcgcacgccacgcccgcaacaaacgcctctccgatgcctgctacctatgggccttcgcagcgctcaccgccagtcccggcgcccgagcgttctacgaccaacatcgcgccaacggcaacacccacaaccgtgcgctccgagcgctcgccaaccggctcgtcggcatcctccacggctgcctccgacatgacgctctctacgacgaacacaccgcatgggcccaccgccaccaacacgccgcttgacaccaaccacccgtgggatgt

SEQ ID NO: 7711 - DNA, 1344 bp, unidentified
  source 1..1344: mol_type = unassigned DNA; note = element_bf02287
  misc_feature 1: note = core
  misc_feature 2..240: note = LE
  misc_feature 241..1329: note = CDS
  misc_feature 1330..1344: note = RE
  misc_feature 4..232: note = bridgeRNA
cagtgatgatggaggtggcatccccaggagggggtctgactcgattgtcgacgggcgtcgttgactgcctttgcatgggatttgtcgatcttcgccctggggatgccatgcacgtgaccggtcgaactgcgtgacctcataggagcgcgagcagaagccctcatcactgtcctgtccgccagctcggaccggtacgtgccagtccgcacggttggcattgaaaggcagggatagagacggatgacaaatgaccttatggcactggatgtgttcggcggcgtggatactcactcgcgaactcatcatgtggcagttgttgatgggctcggtcgggaattgggagatcgcgaatttcctgcaacgcctgctggctatgacgcactgcattcgtggttggtgggcttcggtcagctcgtgctcgtcggggttgagggcacaggctcgtacggggcgggcttgatgcgtacgctcaccagggccggaaccaagctcgtcgaggtggatcgccctgaccggacggcccgacgagctcaaggaaagtccgatccattggacgcctacgcggccgctcgagctgcggcctcgggccgagcggccggcacgccgaagtcgcgggacgggattgtcgaatcaatccgttgcctgcggcttgcgcaacgctcggccatcaaggctcggacgcagtgcatcaaccagatccgggcgctgttggtcaacgggcccatcgaccttcgtgagcagatgagacctctatccacctcgcagatgctcaagcggctctctcacctacgccccaccgctgatttcacccgaccggactcagcatgccggctagcactgagatcgctggcacggcgccacggggacctggatcgtgagatcaaagagctccaccatgtgatcgctgatctcactgaacaagccgcaccggagctactcgaacgccccggcgtaggtgttcaggtcgcggcgcaattgctgatcacggcaggcgataaccccgacaggctcggatccgaagcctcttttgcccacctggcgggagttgctcctgtccccgcgtcctccgggaagcggcagaaccgccatcgccttaaccgaggcggcgaccgtgcggcgaataacgctctctacacggtcgctcttgttcgcatgcgataccacgagcccacgcgcgcttatgtccaacgccgcaccgcggagggactgtcgaaaaaggacatcattcgttgcctcaaacgcgcgatcgcgcgcgagatgttccgggtcctcacaacaccatcgaagccaatcacacagtccgcaccaccggttctcctagcagcttgacgtctataggagcat

SEQ ID NO: 7712 - DNA, 1267 bp, unidentified
  source 1..1267: mol_type = unassigned DNA; note = element_bf0b71e
  misc_feature 1..2: note = core
  misc_feature 3..227: note = LE
  misc_feature 228..1253: note = CDS
  misc_feature 1254..1267: note = RE
tccattagacttataactatgaatttattaaaataataatcaaataaacaaggtaccgaataagaaggctgaataagtctaaggcagcttaacggtataacctacattgcgaataagacccagccttctcgatgattaaagctaaatagtgccatcatcgccaatgaagcggttagtaatggagtaagctcatatcatcatggttcggcaccggaaaaggattaatcatgaaaaagaacttctgttttatcggcattgatattgctaaggatacctttgtggccagcatctaccataaacccaataagcctgtcctgaccaaagaagcacttgccaataatcctgaaggatatgaccaattgctgttatggttacaagaccacaaaattggcaaaagtaactgccggatctgtatggaggctaccggcgtctactcccagggcattgcctactatctcctgtcccagggttatcaagtaagtgtagaatctcccctgaaggtcaaacgtgccttccatccggccggacacaagaccgatccggtcgattcccggcagattgccgaatatgcctaccgtttttccgatcagctcattccctggcagcccaaagaagagctgctggagaagatcagacagctactgagtctcagagaacagtttaccaaacaaaaagtagccatcaaaaatgccatgggagcctatagccaacagaaggtacaggtgaaactcatcaataaagctcaccagcaaaccttaacccagctggaaaaacaaatcagcaggattgataaggaattggataaccttatcaaagaagatcctgatatcctaagcaagtttaacaagttagatagtattcccggctatggtatgttactttctgcccatctattggtcatgacaaataatttcagccaaattcaggattacaaacctctggctgcctttattggtattgcgccctatcagtatcaaagtggtagctcagtccacaagaaggccaaaatccgtcactatggacctatggccagccggaagtttttaagacttgctgcccaatcggtggctacccatgataaaacttttagacaatactacctgcgtaagctggcctctggtaaggataaagccttggtgttgaacaatattgccaataaattactgaaagtggcctgtgctatgatccggaagaatacccggtatatcaaagaacatcgttctgtgcatcctatgtatctaaaaagtgcttgacaaagtcatagtgt

SEQ ID NO: 7713 - DNA, 1586 bp, unidentified
  source 1..1586: mol_type = unassigned DNA; note = element_bf2444a
  misc_feature 1..2: note = core
  misc_feature 3..123: note = LE
  misc_feature 124..1164: note = CDS
  misc_feature 1165..1586: note = RE
  misc_feature 1304..1514: note = bridgeRNA
agatggggtattcggctcgagcctcgtcttttggcggtgatgccatcaaggtgctgcgcttcgagctgatgataaacgtggtctgtctggaacagccacaagcatcagaaggagaagcgcagcatgaaacattataccggattagatgtctcggtaaaagaaaccgcaatttgcatcgtcgacgaaacaggcacggtgtgccgcgagatgaaggtgccgagccatcccgaggatcttgcgcgggtgctgaaggatcccgcctggcggttggaacgcgtcgggcttgaggccggaccgttgtcacaatggctgttcagcggtctggccgaagccggtctgccagtgatctgcatcgagacccggcacgtcaaggcgttcctgaaggcgcagccaaacaagaccgaccgcaatgatgcgcgcgggatcgcgcagatgatgcgggtcaatctgttccgcccagtgcatgtcaagaccctgacgagccagaagcgccgggcgctgctgacggcgcgcaagctcttaaaggaaaaggcgattgccatcgagaacgacatccgcgggctgttgcgcaatttcggcctcaaggtcggcaaggtcggcgcggtcaagtttgaggagcggattcgcgagctcaccgacggtatgcccgatttggctgagatcgttgaaccgctgctcgatgcacgccgcaagctgcgtcagaattttgccgcccttcaccgcaagcttctggcgatcgtccgggatgatcaggtctgctgccggctgatgtcgatccccggtgtcggccccgtcgtgtcgctggcttacgcggcgacgatcgatatcccggcccgcttccgcagctcgaaggcggtcgggccgattttgggcctgacgccggcgctccatgaatcgggcgaaagccgccggatgggcgggatctcattatgcggcgatgccatgatgcgcacgctgctctacgaggctgcgcagaccctgctgaagcgggtgacgaaatggtcctggctgaaggcctgggcgatgggcatcgccagaaggcgcggggaacagaaggccatcgtcgcgctcgcccgccggctggcggtcatcatgcaccgcatgtggagcgacggcacacagttccgctggaccaggacggaaatcatgccggtcgccggctgaccgcagcccgaccgtcgttagccagcgcgaaaccaaggtcgggacgagaagatcgtcgccaatcggccgaacaaagagataggggaataaaccaggattgaatttgataagcatcgcaccccgatagacggggacgacacccgttccacctgcacgtggaaagctgtccttcgcgggacgaggatgaggtgagttcgctgatcggcttagctcgattgccccccatcacggggcgatcaaggcgcgcgaaagattgttccacctcatccttctgaatccccatcaagggtagggccagagcgccgatcccggagagaagcaagaccccgcgaaagaagcaagaccccgcgaaagacgggcccaatgccggcgaagcggaaaagatctaggagggcgcttgacttcaaaacgccgaatagaga

SEQ ID NO: 7714 - DNA, 1167 bp, unidentified
  source 1..1167: mol_type = unassigned DNA; note = element_bf25eab
  misc_feature 1..2: note = core
  misc_feature 3..216: note = LE
  misc_feature 217..1155: note = CDS
  misc_feature 1156..1167: note = RE
  misc_feature 36..222: note = bridgeRNA
cttgtcttatgactgtgcctgcttcttgtgagaaaaagaagcgccggagaggacggccatcctcttccggcgatgggggatggatcggagacgcgcaggccgccattctgatgaatgccgggccgaactaaagtttgatcgcccccatcttttccaatcgtcctgaacggatacccgagctctaggctcggatgacaagcatgggagacggaaaagatgactgagattatcatcggtgccgatatctcgaaagatcatatcgatctgtaccgactatcagatggcgacaggctgcgcgtgagcaacgacggcaagggatttgccgccatccttggctggatcggcaacacgcctgtcgcgcgtgtggtctatgagccgaccggtgcctatcacagggcattcgaacgcttcatgctcacccgtagcctgccagtttccaaggtcaatccgcgtcaggcgcgacggtttgccgaggcgattggaaaactggccaagacagaccgtgcggatgccgggatgctggcgcaattcggcatgctgctgaacccgcgcctcctgtcgccggatgccgcttctttcagtgagctcaaggagttgcatgccgcacgtctggcgctggtgaaggataggacggctgctaagaaccgaggcaagaacatcacccagccgctgctcaaacggcagaataccgcccgcctgaagcagatcgaagcgcagctcgcccaagtagagcaggccatcaccgaccacatcgcaatcgacgagagcctcaaggcgcgctttgatatcctggtttccatccccggtctgtcgaagatcacagcctttacccttctcatcgaaatgccggaactggggaaactcgatgagaaggcagccggcaagcttgcgggcctcgcgccaagcgacaggcagtccggagtgtggaccggccgcgccttcatcgttggtggccgcgccatcgcccggcaggctctttacatgccggcccttgtcgccactcgcttcaatcctgatctcaaggccaaatacgacacgctcagaaaagctgggaaaccgcccaaagtcgccatcaccgctatcatgcgaaagctcgttgtccttgcaaacgcactcctgcgaaaacagcaaaaatggacaccaaaacccgcttgattgagacggata

SEQ ID NO: 7715 - DNA, 1360 bp, unidentified
  source 1..1360: mol_type = unassigned DNA; note = element_bf32694
  misc_feature 1..2: note = core
  misc_feature 3..76: note = LE
  misc_feature 77..1093: note = CDS
  misc_feature 1094..1360: note = RE
  misc_feature 1100..1346: note = bridgeRNA
tgatgttgtggacgggctcggctcccgtcgcggaaggtgcgtcttgttgcaggacgtcacttcataggagccgaacatgaagacgattgcggttgtgggtctcgacctcgcgaagagcgtatttcagattcatgcaattgatgctgacggcaaggttgtggtccgccggcagctgcgtcgtggcgaggtgctgaagttcttcggcatcctctcgccttgtctggtcggtatggaggcgtgcgcgtcggcccatcactgggcgcgtgaattggtcgcacgcggacatgaggtccggctgatgccgccggcctatgtgaagccgtatgtgaagcgcggcaagaccgatgcggcagacgccgaggcgattgccgaggcggcgacgcgaccgacgatgcggttcgttgccataaagacggtcgaccagcaagctgtgctgatgttgcacaagacgcgtgatctcttggtccgacagcggacgatgctgatcaacgcacttcgtgggcatcttgccgagtacggcatcatcgcagccaaggggccaggcggtgtcagctccctcatagcgatgctgcatgaggcgcagggatcgctgccgccactggcgcgatcggcgctgcacggaatcgcggcccagctgcatgcgctcggaagtgagatcaagcgcatcgagacacagatcctcgactggcaccgagccgacgcgacaagccgtcggcttgcgacgatcccgggcatcggcccgatcacggcgagcgcaatcgccgccactgttccggacgcctcgctcttccgatcgggacgacagtttgccgcctggctcgggctcacgccgcgcgctcacagcagcggcggtcgcgagcggcaggccggcatcagcaagcagggtgatggctacatccgccgcctgctggtcgtcggcgccacggccgtgatgcgcatggcgcgcaagaacgcagctgaccgtggctgggccacgcagctgctcgagcacaagcccccgaagatcgtggcggttgcgcttgccaacaagacggcgcgcatcgcctgggcggtcatggcgcgagatgaagtctacgtagcgcgagccgcgtagccaagatctggcccgccgatcacacgacgtcgggccagatgtgcgagggtggtgagatgtgatgacgaaccggtcgagagccggggatcggcagaacccaaggggcgcgagcgccatcgagcgcgctggagtgattagggatccgacccgcggacttcatcaaggccagcagccaagtgctgcgcgaacaggccgcacacatgactgcacccgaccaacgtcagacgtcgcattttttcccttgcacctgccgagcccgtccacaca

SEQ ID NO: 7716 - DNA, 1352 bp, unidentified
  source 1..1352: mol_type = unassigned DNA; note = element_bf3690d
  misc_feature 1..2: note = core
  misc_feature 3..75: note = LE
  misc_feature 76..1101: note = CDS
  misc_feature 1102..1352: note = RE
  misc_feature 1077..1340: note = bridgeRNA
tgatggggtggacgccccccgacggcatcaatgtgccaaggtggaggtgttaagcaaccaccagaggaggcgtccgtgggagaggctagcacgatcgggctggatattgcgaagaacgttttccaggcgcacggcgtcgatgcggatgggcatgtggtgttccgcaaacgcctggtgcgggccaaggtgctcgagttctttgcccgacaggcaccatgtttcgtggcgctggaggcctgtggcggtgcgcaccactgggcacgagaacttggcaagctgggccataccgtgcggctgatcccgccggcctacgtcaagccctttgtcaagcggcagaagagcgacgtggccgatgccgaggcgatctgcgaagcagcgcagcggccaagcatgcgcttcgtgccggtgaagactgacacgcagcaggcgaacgcccttgtgttccggacccgcgacctgctggtgcggcaacggacgcagtgcatcaacgcgttgcgcgggcacctgaccgagtatggccatgtcgtgccaaagggaaccgatcacgtcgatcagctaatcgctctggtcaaggacgagacatcgtctataccgcaagctgcacgagacattctgcaagtacttattgacagcatcgaggtgctcgggaagcagatcaacgacctcgatgcccagattggtcggcgcgcgaaggacgaccctgtcgcgcggcggctcatgacaatcccaggcatcggtccgatcgcagcaaccgcgatcaccgctctggtgccggcgccagagggcttccgggcagggcgcgactttgcggcctggctggggctgacgccgctgcagaagtcgacagggggcaagcagaagctcggagctatctcgaaaatgggtgagcggaccatccgacggctgctcatcttgggcgccagcgcggtggtgcgctgggccgttcatcgcggggcggcgccgggctcatggctggcccagatgctcgcgcgcaagccgcgcatgctggtcaccaccgcgctggccaacaagacggcccgcatcgtctgggccctgctggtcaggggcgggacgtacaaggctccggctgtggcggcgtaactccgccgcggtcactgaggcgtagggcgagcgaacggaggacatggcgcaatagtcgacgagacgggattgggagaaccaggccgcaccaacgtaccctgagtacgcgggtctgatgtggacccaatccgcgaactcccatgcaggccggcggtccatggccgcgatagaggccggacagatggcagcatccgactacgcgtcaccgcactcctgcggttttcccttgccctgaagggggcgtccacaga

SEQ ID NO: 7717 - DNA, 1374 bp, unidentified
  source 1..1374: mol_type = unassigned DNA; note = element_bf39afd
  misc_feature 1..3: note = core
  misc_feature 4..75: note = LE
  misc_feature 76..1104: note = CDS
  misc_feature 1105..1374: note = RE
  misc_feature 1111..1361: note = bridgeRNA
tgctggtgtggacggcctctcatcccaacggcttaatggcgctcccgcgtcatagccagatgagaggagagcacgatgaacacaccggtccgcatcggcatggatacttccaagtcggcgtttcagctccacggcgtcgatgaagacgaggtcgtggtcgtccggcgccagttccggcgaacggagatgatccgctactttgagaagctcccaccagcccttgttgccatcgagtcttgcggaagctctcatcactgggcgcggctgctgcagtcgttcggccacgaggtgaagctcatccctccgcaatatgtgaaggcatatgtcaagcgcggcaagaacgacgctgccgatgcggaagcgctgtgcgaggcggtcacccggccgagcatgcgcttcgttccggtgaagtcaaaggaacgccaggcggcttgcatgttgatgaccgtgcgggagcgcctggtaagcgtgaagtcccaactatcgaacgcattcaggagctatgcggcggagttcggcatcatcggcgcggccggccggcagaacgtcaatgcgctcatcgagcgcgtgctcgaggatgatactctgcccgagatggcgcgagatctcttccggttccaggcgaaggagtacgccgcggtcgaggcgcgccttgaagagatcgaggccaagctcatgaagtggcaccgcgaggatgatctcagccgacggatcgcgaccattcccggcgtagggccgattgggtcgactatgctcagcatgaaggcgccaccgccggagacgttcaggtccggtcgcgacttcgccgcctggatcgggctcacgccgcggaatcactcaacgggcggccggcagcggctcggcggcatcacgaaggcgggcgactcagcgcttcgatcggtgttgatcgtcggtgcgaccgcactgctgagacacgtccgaaagggccgtcacaagccgaccgcatggctcgccgcgctgctggagcgcaagccgccgaagctggtggcggtcgcacttgccaacaagttcgcccgcatcgcatggcgattgatggtatcgggcggcgtttataaccggccgatggtcgccatgcccggctgacccgctatcgagcccgcgggcggcagaggcagtctggcggctacataccgaacttgcaggagcgagtagatggaatgaccgatcggtcgatacgcgcgagattccgaaggttacactggcacctcgatgtcgcttgtgtgcttggagcgggcgtagcgaacaccatctgggccagcgagctttgcccgcgcaaacaggccggacatctgatagcaagcgatctggtcaaaagtatgctagcatcctgacaagtggggggccgtccacatc

SEQ ID NO: 7718 - DNA, 1449 bp, unidentified
  source 1..1449: mol_type = unassigned DNA; note = element_bf4524a
  misc_feature 1..3: note = core
  misc_feature 4..238: note = LE
  misc_feature 239..1432: note = CDS
  misc_feature 1433..1449: note = RE
  misc_feature 1..226: note = bridgeRNA
cccgttacctttttcgtgggcccgggaaccgggcccacggtcgccaggcccggtatgacttcttgcccctgcctttcgaatgatccggggggtggtgtcgccgggtcctggtggcgtcgacggaccgctgatggggacagggccgctggtaggtctcttcgtaacgtgggtgccgggcgttgacgctggatcggcgaccgtccggaaggcgtttcgaagcagttgaggaccgagcaaggtgacacaaccttatgccgtgttctgcggcgttgacgtgggaaaaggcgaacatcacgcggtcgggctcgatccggccgggaaacggttgttcgataaagcactgccgaacgacgagtcccggttgcgggcggtgttcgacaaactcgctacccacggccgactgttgatcgtggtcgatcaacccaacacgatcggcgccctgccggtcaccgtcgcacgagcctgcggccacgacgtcgcctacctgcccgggttgtcgatgcgccgcatcgccgacctctacccaggtcaggccaagacagacgcccgcgacgcccacatcatcgctgacgccgcccgcacgatgccgcacacgctgcgccgggtcgacatcggtgatgaaacgctcaccgaactcggtgttctggccgggttcgacgacgacctggccggcgaagccacccgcaccagcaaccgcatccgcggcctgctcaccagcgtccatcccgccctcgaacgcgtcctcggcccccgcatcgcgcacccggcggtgctggagatcctgtcgcgttgcggtggtccagaggggatccgggccgccggccggcgcaaactcaccgccatcgccaccaaacacgctcctcgcatgggcgcccggctggtcgaggagatcctggccgcgctgcccacgcaaaccgtcaccgttccgggcatgaaagccgcggaaacagtgctgccgaagctggcggattcgttgaaagcggttctgctgcaacgcaagcagatcgccgccgatatcgaggagatgttcgccgatcaccctcttgccgaggtcctgacctcgatgcccggcatcggagtcaggaccggcacccgcatcctgctcgaagtcggcgacgccaccgccttcgcctccgcggcacacctcgcttcctacgccggcatcgccccgatcacccaccgctccggcagctccatccgcggagaacaccccgcccgctccggaaaccacaaactcaaacgagcgttgttcctgtccgcgttcgccgcactgcacgacccggccagccgcgcctactacgaccgcaaacgcgccgaaggcaagaaacacaacgcagccctcatctgcctggcccgacgacgctgcgacgtcctctacgccatgctccacagcaaacagccctaccgggcgccggcagcctcagcagcttgacgaacaccatagggaca

SEQ ID NO: 7719 - DNA, 1373 bp, unidentified
  source 1..1373: mol_type = unassigned DNA; note = element_bf516d1
  misc_feature 1..4: note = core
  misc_feature 5..79: note = LE
  misc_feature 80..1111: note = CDS
  misc_feature 1112..1373: note = RE
  misc_feature 1145..1361: note = bridgeRNA
atgatggggtggacggcccccgaccggcatcgatgtgccagaatgaggttgtcgaaaatctcatccgagggagccgtccatgacaaagattagcacgattggtttggatttggcgaagaacgtatttcagatccatggggtcgatgggtcgggaaaggtggtgctgaggcggcagcttcggcgaggtcaggtggagaagttcttcgccgagctgccgccctgcctggtggggatggaagcgtgcggcagcgcccaccattgggcccgcgtgatcggccgccacggccacgaggcgcggttgatgccgccgggctacgtgaagccctacgtcaagcgcaacaagaacgacggacgcgatgccgaagcgtgttgcgaggccgtgggtcggccgaccatgcgcttcgttgcggtgaaaagcatcgagcaacaggcgacgcttgcggttcactcgacgcgcgccctgctgacgcggcagcgaacgatggcggcgaatgcattgcgggcagcgctgagcgagatcgggatcgtggcggcgcagagctacaagggattgcgcgagttgatcgccaggctcgaacagccgagcgatgagattcccgagctcatgcgagcggccttgtcggtgctggccaagcattggcaggcgctcgacgccgatgaacgcgtacttgaacaacagatcgtcaaggccagccgtcacaatcaagatgcccagcggctgatggaggtgccgggcgtcggtccgatcatcgccagcacggtgctggccaaggtaccggatgcaaaactgttccgctccggtcgcggctttgcggcttggatcggcctcaccggtcgggaccacggcaccggcggcaagcatcgcccggggcacatctccaaacagggagatcgtgtgttgcgcgcactgctgatcaccggggccagcgcccatctgcgccagcagaaggcgcgcggcgtcactgatccctggctgcgcgagttgctggcgcgacggccttacaaggtcgtgatggtggcattggccgccagaaccgcgcggatcctctgggccttgctggccaagggggaagcctatcgcgaccgcgcgagtgcgccggccgctgcctagttgaggggcgacagccgccgcgctcgcgctcagagctatcggaagggcaagaaggtgtgatgggaaatggtcaggaaaccgggatcgaaacactccgtgcagtcatcgcgcgtcatagcacgtcggaatgattggagctcgatccgcgatatccatcaaggtccgcggtcaatggccgcatctcgaggccgtatacatgaccgcaccccgattcatttgccgaaacaccaaaatgcccttgccgagagggggccgtccatac

SEQ ID NO: 7720 - DNA, 1488 bp, unidentified
  source 1..1488: mol_type = unassigned DNA; note = element_bf52d99
  misc_feature 1..5: note = core
  misc_feature 6..376: note = LE
  misc_feature 377..1471: note = CDS
  misc_feature 1472..1488: note = RE
  misc_feature 14..243: note = bridgeRNA
cccccgtaatcttcttcggcggtcctgcaagagggccgctggcctccgggcctggcatgactgttcccccctgttggaagtcgatgacctgggggtggtgtcaccgggcccgtggggtgccgtgggagacgctgatgagagacctgaccgtcatctggcccggcgcaacgccgagccgatcgtaggtggctggtctgcataacgtggatgcgcgcgtacggcgccgttgccctggccagcaccgcaccggccccactcgggaggacgggttgtacgagatcgacgaggtgagcgtcttcctcggcctggacgtcggcaagagcgcccatcacggcacgggctgactccggccggcaagaaggtcttcgacaagcccatgcccaacagcgagccgaaactgcgggccgttttcgacaaactggccgcgaagttcggcaccgtgctggtcctcgtggaccagcccgcttccatcggcgccctgcccttgaccgtggcccgggacgcgggctgccaggtcgcctaccttcccggtctggcgatgcgccgggtcgccgacctctacccgggcgaggccaagaccgacgcgcgtgacgctgaggtgatcgcgggtgcggcccgcaccatgccgcacaccctgcgctcgcttgcgctgaccgaggagatcaccgccgagctgaccgtgctggtcggcttcgatgaggacctcgcggccgaggccacccgcacctccaaccgcatccgcggcccgctcacccagttccaccccagcctcgaacgcgtcctcgggccacgtttggaccacccgtccatcacctggctgctggaacgctacggttccccacaagcgttgcggatggccggacgccgcaggctggtcgaggtggtccggcccaaggccccgcgcatggcccagcgactgatcgacgacatcttcgacgcactggacgaacagaccgtcgtcgtccccggcaccggcaccctcgacaccgttatcccgtccctggcccggtcgctgggggccgttcacgaacagcggcgggccctggaagcccagatcagtgaactgctggaggcccaccctcttcacccggtcctgacgtccacgcccggcgtcggcgtcaggaccgctgccaccatgctcgtcaccatcggcgacgccaccggcttccccagcgccgcccacctcgcctcctatgcaggtctcgccccgaccaccaaggcgtcggggacctccatccacggcgaacacgcgcccagaggcggaaaccggcagctcaaacgagccgtgttcctctccgcgttcgccgccctgcacgatcccacctcccgcacctactacgacaaatgccgatcccgggggaaaacccacacacaggtcctcctccgcctcgcccgccaccgcgtcagcgtcatcttcgccatgctccgcgacggcaccttctacgaaccccgaaccgccaccacgacttgatcaaagacatagagaca

SEQ ID NO: 7721 - DNA, 1475 bp, unidentified
  source 1..1475: mol_type = unassigned DNA; note = element_bf5383c
  misc_feature 1..3: note = core
  misc_feature 4..235: note = LE
  misc_feature 236..1450: note = CDS
  misc_feature 1451..1475: note = RE
  misc_feature 1..215: note = bridgeRNA
cccttaccttctctgtaggccctgggtcatgcttggggtctgggaagtccggcggtgtcggcatggctcattgccccctgtcacttgatggcctggggggtgttgccgctggcacggtcgggtgcgacgagacctctgatggggacatgcgattgatcgctggttcgtaaggtggatgacggcgagcgcacccaggacggccttccccccgcagaccacgagtggaggagacagggtgagcacaccggacgaggtgaacgtctggatcggactcgatgtcggtaaggaagaccactttgctgacgtcctcgacgatgagggcgtctcgttgttcgctcgcagcatcgcgaacgacgaagccgacctggtcgccttgctcgagcaggccgccagacacggcacgccggcgttggtgatcgaccagcccggttcgatcgcgcagctcgcgatagcagtcgccgctcagcagcaggtcccggtcgcgtacgtgcccgggctggtgatgagacgggctgcggatctgtatccgggcgaggcgaagaccgaccgccgcgacgcgttcgtgatcgcagacaccgcccgcacgcgtcgtcgaagcgtgcactggctggatgctggcaacgacgagatgctcgaccagttgcgggtcctcaacgggttcgacgtcgacctcgccgcagacctgacccgcttgacgaaccgactgcgcgactcgctcgtggccatctcgcctgccctggagctggccatcggctcgcggctgcaccaggccggcgtgcgagacctgctcgcgaagttcccgacgccaaccgcgttgcgtgctgcgggccgaacccggatcgccacggcggtgaagaagcgttcgccacgcgtcgccaccaaggtcgccgacgccgtcaccgcagcactggacgcccagacggtcaccatgcccgccgagacggcggtcggccgggtcgtcgccgagctcgctgtcgaactcgaccggctccacggtcgccgtgacgccctggctgccgagatcgaagaggtgttcctcgcacaccctttcggccaggtcctcgtgacccttccggggatcgggccgaggaccggcgccaggatcctcgccgagatcggtgacggcacccgattcgcgaacggctccaagctcgccagctacgccggactcgccccggtgacacgccagtccggcaccagcatccgaggcgagtcccagtcccggcgaggcaaccaccgcctcaagaacgccatgttcctcgccgcgttcgcctcgctacgctcgcccgactccaaggccttctacgaccgcaaacgcggcgaaggcaagaaacacaacgccgcgatcatctgcctcgcccgccgacgctgcgacgtcatcctcgccatgctccgcaacctcgagccctaccgcgccacaacccaggacgacaccccgatcgccgcttgaaccccttgacaagaagatggggaca

SEQ ID NO: 7722 - DNA, 1418 bp, unidentified
  source 1..1418: mol_type = unassigned DNA; note = element_bf53cc6
  misc_feature 1: note = core
  misc_feature 2..65: note = LE
  misc_feature 66..899: note = CDS
  misc_feature 900..1418: note = RE
  misc_feature 1192..1412: note = bridgeRNA
taatgagatggtccgccgccgggtaggattacggctcggcagcttaaataaggaggatcatcgcaatgcacatcgcatccatcggcatcgatctgggcaaggccacctttcacctggttgcattaggagagcacaacaaggttctactgcggaagaagttctctcggccgcaactgctggcctacactgcgaacctgccggcttcattaatcggactagaggcatgtgcgggagcacactttatgggagccgcactacgaggacaagggcaccaggtgcgactcattccggcgcagtttgtgaagccttaccgcaagtccaacaaaaacgacttcatcgatgcggaagcgatcgccgaggccgtgaccaagcagaacatgcgctttgcgcaactcaagacgcaggagcaactcgactggcaggccatgcaccgggtgcgggatcgactcgtgcgacgtcgcaccgcgctgatcaatgagattcgcggattcctgctggaacgcggcatcacctttgcggctcaaccaattcacttgcgcaagaacctgcccgctgtgatcgaagatgccgagcagaacctgagcccgcgcctgcgctggttgctggatcgcatgtggcaggagtggaagcagacagagaccgagatccaggcgatcaccgacgagattgaacgtattagtgaggaagatgcacgctgccggcaacttcgccagatccccggcttcggcccgctggtctccactgccaccgtggctgccatcggcaacggctctgcctttcgtcgcggacgcgacttcgcggcctgggtgggcgtggtgcctcgacagtactccactggggcaagcagaaactatacggcatcagcaagcgcggcaacgtctatctgcgtcgtctgttgatccacggtgcccgcgcggtcctatttcgcgtgaagtacgacacggcagggttcggacagtgggtgcatcgactggcccagcgtgctccccgcaacaaggtggtggtagccattgcgaataagctggcgcgcatcgcctgggccgtgctgtccagcggcaaagactatcgacatcagccactgctgcagctggcggcggcttgatggccatggaaaagacgctacgcttggaaagcacaaaacgctttccacttttccaccgccacgacgacggacgttagattcaattccaccaaggtctgctgaggagagaagaagacgaaaagaacagcccaatggcgtgtcggaaaacctgatgttgcaaatgcgtccctggtgaccgagggatttgtaaggaccgacacgcgcgtatcatcatcgagtgcccggagataattctccactagaggccggatacatttacgcagactgtcccttcgctcagcttcaaacctcttgcagtccggcggcggaccataca

SEQ ID NO: 7723 - DNA, 1621 bp, unidentified
  source 1..1621: mol_type = unassigned DNA; note = element_bf595db
  misc_feature 1..2: note = core
  misc_feature 3..275: note = LE
  misc_feature 276..1499: note = CDS
  misc_feature 1500..1621: note = RE
  misc_feature 14..298: note = bridgeRNA
ctactacaatatatttgtggttaatactcctaacatccagttaggatgttatccttcttgttgcttaagctgttagaatgagcaaggcaatcggtctgacgtctcctttcttggactcccgtccgcagaaaagtctgtcaaccagccctcattcgcagcgttcgttttacgcaggttgaactatcgcgttcgtgtgaatatacccagtagattgaataggcaatgagagaagctggcttcagccattgctaataataatcaaaggagtatttatcatgttgaacgcagttggtatcgacgttgcaaagcgaaaaagtacgatcacgatcaggagaccaggcgatgagatcgtcttgcccccatgtgatgtccatcacaaccagacagaaatcaacgagctgatctcctacatcaaaagcctcgagggagagaccaaggtctgtatggagcataccggcagatactatgaacctatggcttactggctttccaatgccggtatctttgtcagtgccgtcaacccgattctgatcaaggacttcaaagatgatgattcgtttagagctcctaaaacagataaggctgatgcagcgaaaattgctcgttacactcttgaccgctggtccaaactgaagcaatatggtcttatggacgagatacgcaatcaactcaaaaccatgaacaggcaattcgggttctatatggatcagaagactgctatgaagaacaatctcatttctcttctcgatgaaacatatcccggagccaacagcttctttgacagctctgtccgtgaagacggcagccagaaatgggtggattttgtatatacctactggcatgtcgactgtgtcagaggcaagtctcttaaagcctttactgagcattaccagaattggtgtaagcgtaagggctataatttcagtgtgcgcaaggtcaaggagatctatgaaaagtcctctggccttatcgccatgttccccaaggatggcaacaccaagatgcttatccaccaggctatcgatgtcctgaattcgatctctgctacagttgaactgcttcgcagagagatggataaagtcgcttctacacttccagaatatcctatcgtcatggctatggacggtgtaggtccgactcttggtcctcagctcatagctgagattggtgatgtcacccgatttaccaagagaggtgccttaactgcatttgctggagttgatcctggcggagatcagtccggagatcatgaacgcaagagcaatcgtacctccaagaaaggatccccgcacttaagaaagactcttttcgtggtcatggatggtattctgaaacgctcgccaatggacaacccagtctatcttttcatggataagaagcgttctcagggaaaaccttactacgtctatatgactgccggagcgaataagttcctgcgcatttactatggacgtgtaaaggaatatctcgaaaaactcgaagaatcccaagagtcataacaccgataataggttccattttcctgccgatgcactgcattggctttgtttgattgcatagaattcaacctgtataaaaatgtcaaagttcctcaaaatctgcttgactatttatttgcaga

SEQ ID NO: 7724 - DNA, 1388 bp, unidentified
  source 1..1388: mol_type = unassigned DNA; note = element_bf5ba15
  misc_feature 1..2: note = core
  misc_feature 3..320: note = LE
  misc_feature 321..1115: note = CDS
  misc_feature 1116..1388: note = RE
  misc_feature 1086..1375: note = bridgeRNA
agatgggatggttgccgccctccccagacggcatcgcagtgtgccaaaatgtggtgtttcagccaccaagcggagaggacggcaatatgaagaatacgatgattggggtggatttggcaaagaatgtaatcgtgctccacggcgcgtcgattaacggctatgtgaagtttcgaaagaagctgtcacgcctccagtttcagaagttcatgacggagcatccgtcggcagtggttgtgaaggaagcctgcggcagcgcccattactgggctcgggagatgaccaggctcggccatgaggtgaagctgatcgcgccgtaatatgtgaagcctttcgtaaagcgccagaagaacgatgccgccgatgccgaggcgattgtgattgcggcccagcggccggagatgcgattcgtcgagccgaaatcggaagaacagcaggccagggcagtgttgttccgagctcgccagcgtcttgtccatcagcgcaccgatctggtgaatgcattgcgtgccattctctacgaatacggccacgtcgtcgcgcaaggcatccaccacctcactcgcattaaggagatcgtcgaggaaacaaagagcaatctgcccgaactggtccgccacgaatgccaggaccttatcgaccagattgcatggaagacgcagcggatcgaggccaagaccgtgcagctcaggaagctggcgacagaaaccgaaacagtgcggcggctgcagaccatgccgggagttggcccgctgaccgcgctggcggttgaagcattcgcacccgacatggccagcttcaaacgcggccgggacttcgcggcttggctgggccttgtcccacggcagcattcctcgggaggtaaggaacgcctcgggcgggtttcgaaagagggacaagccgacattcgccaattgctcatcatcggggccatgtcacgtttgaactggctaggtcgcagatcgatctccacgggatcttggctggcgcatatgctggcgagaaagccgcgaatgctcgtggcgatcgccctggcgaacaagatggcgcgggcaatctggacgatgctgagaacgaatgaggatcatcggaatccggcgtcggctgcggctgcatgatcgacctgcagcaaacagcccggcactggtaaagggggtgtgagaaggcgacgacccgaatgggcgcaacgatcgaacagatctggatcaggaaaaccagctggagccaaagagccaatgcgctcgttgttgagatttggacctgatctgcagatcaccataccggccagcggcttctggacatgccgcacatgaaggcctgacagaagaccgcactcgatcacacgtcgaaaagggccagaagcctcttgcattacgggcggcaaccacaga

SEQ ID NO: 7725 - DNA, 1368 bp, unidentified
  source 1..1368: mol_type = unassigned DNA; note = element_bf7cbf4
  misc_feature 1: note = core
  misc_feature 2..79: note = LE
  misc_feature 80..1117: note = CDS
  misc_feature 1118..1368: note = RE
  misc_feature 1140..1359: note = bridgeRNA
taatgagaaggtccgccgtatagaaagccaacaggagtaatgattgagttggcaaaaagccagacggaggatcatcgccatgcagattaaatcgatcgggatcgatttgggcaagaccacctttcacctcatcgcactgggagagcgctcccagattgtaatgcgcaagaagttctcacgctcacagctattggagtacagggccaatctgccttcctccttgatcgggatggaggcgggagtggggtcgcattttctgggacgagccctgcgtgaacaagggcaccaggtgcgtctgattccggcgcagtttgtgcgcccgttcgtgaagtccaacaagaacgactaccgcgatggggaagcgattgccgaagccgtggagcgggagaacatgcgtttggtgcccctcaagacagaggatcagctcgatctgcaagctctgcatcgagtgcgcgatcgcctggtggcccggcggaccagcgtgatcaatcagattcgcgccttcctgctggagcgtggcataagtttccgcaaggggccggccactctacgtcggcagatgcctgagatcctggaaaatgccgacgcaaaactgagcacggccatgcgtcgcctgttggatttcttgtggcaggaatggaaaagcctgcagttgcagatcgagagtcttaacaccgagctcgaacaaattgcgagcagcgatccgagttgtgttcgattacagcagatccctggagtcggtccattggtttcgaccgccgtggtctctgcgattgggaacggcgccgctttcaaaaagggacgtgagtttgcggcgtggctgggactggtgccacggcaatggtctaccggcggcagggccaagctgctgggcattagcaagcggggaaacccttatctgcgcaggatgttcatccatggagcgcgcgccgcggtgttacgagtcaaacgcgaaggctccagtctggggacgtggatgagcggattggaaaccagaaccgcacgcaatgtggtgatcgtcgcaactgccaacaagctggccaggatcagttgggccgttttggccagcggaaacgattatcaaccccggcacaaagcggccgtgttttccaactagacgaagtgggatcttaaattctttcctcaggagtctgcagaagacagaaatgacgaaaacacagtcaaacgacgtgcctgaaaacctgtgtcgtaacgaggtcttttatgaccgcggcgattattaaggacaggcacgcgcgaatcatcatcatgcgcccggagacccgtctccactagaggccgaatacattttcgcagacggttctcgtcgcatccgattcttcttgcacttcggcggcggaccataca

SEQ ID NO: 7726 - DNA, 1584 bp, unidentified
  source 1..1584: mol_type = unassigned DNA; note = element_bf7f9e0
  misc_feature 1..2: note = core
  misc_feature 3..100: note = LE
  misc_feature 101..1228: note = CDS
  misc_feature 1229..1584: note = RE
  misc_feature 1324..1525: note = bridgeRNA
agacataatgtattaaacctgtccaaccttaaagcgcgtgggttaagctttaaggtaagagaaaccaaaggctcagagccacaattaaggaggacaggttatgaataagtatagcaccaaatatgtggggatggatgtgcacaaggaaacgatagcagtagcagtcgcaaaagaaggtcgagtggatccggcttattatggcgagataccaaatacctctgaggcaataagaaagctggtaaggaaagtggcctctaacggagagaaagtatcattctgttatgaggctggcccctgcggttatgacgtatatcgtcagctgatcgatcttggtcaacggtgtgatgtggttgctccttcccttattccgaagaaatcgggagaccgtgtcaagacagatcggagggatgccaacacgctgactcgtttatatcgagcaggggagttgacgccggtgtgggtcccggacaaagaacaggaagcgataagagacctgacccgtgcccgagaagacatgaaagccatggaagggcatgccaaacagcggcttggagcatttctgttgcgtcatgggaagagattttctgggaagtgtaaaagaacgcaggcgtattttagatggctggaagagataaagtttgagatgccggcccagcagattgttttgcaggagtacgtggatgcggtcaaacacatgaagggccgagtggaagcattggaagaggaaatgcgtcaggcaatgcaagggtggtctttggctcctgtggtgactggcctgatggcccttcggggcgtagagctcattacggcaatgactgttgttgctgaactgggcgatatgagtcgctttgactccgctcgtcagattatggcccacctgggattagttcccagtgagcattcaagtggacatcgccagaaacgaggaggaataaccaaaaccggcaacgggcacgccagacgtgtgctcatagaagcttcgtggtgttatcgttcaccggcccgaaaaacagctcaaattcagcgacgtgctcaaaagaccagcgaaacagttcaggcgatagcatggaaagcgcaaaaacgtctatgcagaaggtattggtatctgatcaataaagggaaacgtcctgtggaagcatgtaccgccgtggcacgtgagttgagcggttttatgtgggcgattgcctgtgaggtaatgggtaagaactatgtttgcgctcctgcatagggataaaaagaattgaccaaagcagaaaactatcggtgttgtctttcggaactccgaaaaggtgggaggctccttcagacaacgttactgattgagaacatgtggacttcaggcagggcagcagtcggttgggagaaccctcgaacctcctatgaggcacctaaagacgggatgaccctcgcgagtagacagaggcagctccacgacgaagataagtcatgcggtatccaacccgcgcatatcagagtgatctaccgtcgtttattactgctgttctgtcagaagtgcacattctcaaaggaaggcatataagaggcaaggaagaaaatacactattgacaggtttaatacatatc

SEQ ID NO: 7727 - DNA, 1633 bp, unidentified
  source 1..1633: mol_type = unassigned DNA; note = element_bf88789
  misc_feature 1..3: note = core
  misc_feature 4..143: note = LE
  misc_feature 144..1460: note = CDS
  misc_feature 1461..1633: note = RE
cccttaccttgttcatgggcgccaggtaacacctggggcctgggagtccggtggtgctggtatggctctttgccccctgcagtagtcatggcctggggggtgttgccgccggcatcgctggtgcgtgaacctctgatggggacatgcggctgggatcgctggttcgtaaggtggatgacggcgagcgcaccgcttcggactctcccgcaggtcaacggggattcttcgacgcaggggaaggggcctgggtggcgacgcccgagcaggtgagcgtgtgggtcggcctcgacgtgggcaaggagtcccacttcgccgacgtgctggacaacgacggggaacggctgttcgcccgggctatcggcaacgaccagggggacatcgaggccctgctcgaccgggccgggaagcacggcgtcccgggcctggtgatcgaccagccggggtcgatcgcccagctggtcctggccgtggcggcccggcggggcaccccggtcgcctacgtgcccggcctggtgatgcggcgggccgccgatctttacccgggcgaggcgaagaccgaccggcgcgacgcctacatcctggccgacaccgcccgcacgaggcggaagcaggtccactggctcgacgcctccagcgacgagctgatggcgcagctgcgcgtgctgaacggcttcgacaccgacctcgcggccgaccagaccagggtcacgaaccggctgcgcgacgccctgaccagcatcagcccggtccttgagcgggcactggggaaccgactgcaccaggccggcgtccgcgacctcgtggccgttttcccgacgctgaccgcgctgcgcgccggcggcccggacgagatcagggagacggtcgcccgccgctcgccgcggctggcgtccaaggtgaccgaggccgtcgcgaaggcactggccgcgcaggacgtcaccgtcccggccgaggcggcggccggccgggtgatcgccgagctcgccggcgagctggaccgggtcttcacgcggcgggacgccctagggaaggagatcgaggaggcgttcctcgcccaccctttcggtgaaatcctcgcgtccttgcccggcatcggcccgcgcacgggcgcgaggatcctcgccgagatcggcgacggcaccggcttcgccagcggcgccaagctcgccgcatacgccggcctcgcccccgtgaccaggcagtccggcaccagcctcaacgccgagaccagaagcagaagaggcaaccaccggctcaagaacgccatgttcctcgccgcgttcgcctcgctgcgagatcccgcgtccaaagccttctacgaccgcaagagagccgagggcaaacggcacaacgccgccctgatctgcctcgccaggcgccgctgcgacgtcatcctcgccatgctccgcgaccgcaagccctaccagcccaaccgcgccagggccgccgaagcagcctgacctgacggcctgaccagcacgaacgacacccgcccccgccggaacgcccggcaggagcgggccgtcgtgctgcccgcaaaccgccacagcctcaaaccaccccaaaattcacaaccaaggaaagcgggcaaagcccgctaggccagaaccgcttgacaaggaacatggggaca

SEQ ID NO: 7728 - DNA, 1233 bp, unidentified
  source 1..1233: mol_type = unassigned DNA; note = element_bfaaa4f
  misc_feature 1..2: note = core
  misc_feature 3..247: note = LE
  misc_feature 248..1204: note = CDS
  misc_feature 1205..1233: note = RE
  misc_feature 52..216: note = bridgeRNA
ctggtatattgtgtcatccactcgttacccatcaaaacaatgggttgtggaagacgaagccaacgcggggacgagaccgtctaacgcaaggacctcttgtcaaagtccggcctgaagtttgggtccgctccgcgtcgatttttccttagttcgaatagtcacctgaacgcagtccgcattcaccagcttgaacaggaaaaatcgttggtttcgttgctcgttcgtcactttctccaaggtgtcttgtatgcaacgcatcatcatcggcgtcgatgtctcccaagatttcctcgatgtccacgttcgcccgacctcggcgcagcggcgcttcgccaacaccgccgacggcattgcccagctcgtggcttgggtcaagccgctggccgccgaacgcattctcttcgagtcgaccggcccttaccagatcgcggcggtcggggccttgctcgccgaaggtcttccggccgtcgtcgtcaacgcccgccaggtgcgcgactttgccaaggcgatgaactacttggccaagacggacaaaatcgatgccggcgtcatcgctcacttcggcgaggtcgctgacaccaaggtccgacccctggataccgaggaaagccgcattctccgcgaattgtacgaccgccgcggacaactcgtgcacatgctcgccatggaaaaaaaccagcgacactccgcggccgtcgcccgcgcttcggccaaagttctgcaaagcatcgacaaacacatcgactacctcaacaagcggatccgcgatctggaacaacgcctggatcggctcatcgaaagctcggaagccttccgagcccgtaacgaaatcctgcaaaccatcacgggcatcgggccgcaggtgtcgcgcacactgctcatccatctgcccgaactgggtcaatacagccgtcaaacgatcgcggccttggtgggcttagctccgtttaacgacgacagcggcaaccacagcggccagcggcacatccggggcggtcgtcacaaggtgcgcatcggcatgtatcaggcagcgatcgcggcgatccggcattgcccgcacatgaaggctttctacgctgcactgaaggcccgcggcaaagcctcacgcgtcgccatcatcgccatcgcccgcaagcttctcgtgcttgccaacgccatgatccgcgacatgaaaccctaccgagaaacaccaaactccgtttgatcaaaatcacttgacttcccatatagtca

SEQ ID NO: 7729 - DNA, 1365 bp, unidentified
  source 1..1365: mol_type = unassigned DNA; note = element_bfb53a9
  misc_feature 1..2: note = core
  misc_feature 3..73: note = LE
  misc_feature 74..1099: note = CDS
  misc_feature 1100..1365: note = RE
  misc_feature 1073..1352: note = bridgeRNA
cgatggggtggacgccccccgacggtctcgaatgtgacagtatgtggagggtgttccttcaaggagaatggttatgaacgagatcggcatcatcggtttagacctggcaaagcaagtattccagatccatggcgcgagccccgatgggagggtagtcctccgaaagaagctggggcgcggcagaatgctcgagttttttgccaagctcccatgctgtatcgtcgcgatggaagcatgcgccagcgcgcattactggggacgagagatcggcaaattgggacatgaggttcggctgatcaacccgtcctatgtgaagcctttcgtcaagcgccagaagaacgatgccgccgatgcggaagccatcgcggaagctgcctcccgtccgaccatgcgcttcgtcccgatcaagagcgctgaaaagcaggcctcctcgatgacgttcaaggttcgcgaccttttggtccgacagcgaacgcaaacgatcaacgcgttgcgggggcatctgatggaatacggcttagtcgccgcgcaagggatgcaaaacgttccccgtctgcggcaattgatcgaaacgcatccggacatgccagagatcgccagaagcctcagcttcggacttttgcagcacatcgaatctctcacggacaagatcaacgtcgtggagcaagacttgcggaccagagctcgacaggacgaggttgcctcgcgcttgaccactatcccagggattggtgcgatctgcgccacagcaatggaagccttagcaccatcggcggcggccttttccaagggccgtgattttgcggcgtggatcgggctcacgcctaaacagaactcgtccggaggcaaggagcgtctgggaaagacatcgaaaatggggcagcgggatttgcggcggctgctcatcattggagccacgaccgtcgtccggtgggcgaggcgacgcggcgctccggctggtacctggctggcaagaatgcttctgacgaaaccgccaaagctgattgcagtcgctctggccaacaaattggcgcgtatcgcctgggctctcatggcccgcgggggcgtctacgaagctccggcccctggctctgcctgacgcagcagccagaagtcgcgagacgtcgggaatgtggtgaggtctaacggaggattatgggcaatcggtcagagaacgggatcggataaaccagcagtgggatgagtgctgagaagcacgcgtagccgattgggatccgatccacgaactccataaaggcccgcggcgtctcgatctcgccacatgaggccggacacacgtcagcgcctgaccacatgcctgtaccgaagtaagattccgcttgcatcttccggggcgtccacaca

SEQ ID NO: 7730 - DNA, 1623 bp, unidentified
  source 1..1623: mol_type = unassigned DNA; note = element_bfb8d61
  misc_feature 1..3: note = core
  misc_feature 4..255: note = LE
  misc_feature 256..1491: note = CDS
  misc_feature 1492..1623: note = RE
  misc_feature 8..231: note = bridgeRNA
gttcgtattataaggtcagccagataagaaaatatttctggttgaccttttttaatatggtcttattataacggtagccggggtaaaacgtaactgcccgtgggacttgatcccgtcagctaaacagtttgccccctacttgtagaaacatgattgaggctggttgggacgtagatctcgtataacaagcgaagctgtgatactgcaagaaggattaggggtaccggttaatatatcttttggaggggatatcgaatgaatccagtcattggtctggatgtatcaaaaggagaaagtcagattcaggctttcttagacaagggaaaaccataccgtaagagctttaaagtatctcatactcttgaaggactagattatcttgtccgatttattgaagaagtgaaagctgagactgggaagaaacctccggttattctagaagcaacaggacattatcaaagtcctatcgttcactatcttgaggagcgtggatacctattaattattattaatccattaatttcttataaggccaaaagttctagcttacgaaaggtaaagactgacgcagttgatgcctatctattgtgcgaacttttctataaagaggaactagaaccctataaaaaacgaggcgtccaactattaaacttacgtaatcttacaagacaacatgagaacattactggtactgtcattcaaacaaagttacagtttcaagccattctcgatcaggttttccctgagtatagaggtgtgtttggagatttatactctattgtatctctattaactctaaggacctttccttcgtctgaggatatattaaatgcggatgatgaaaccctaacaagcaccattcatgagttctgtaagagtcgttcaagggtttgggcaagtgagaaaacagaacagctcagagctgcagctatgcgtaatccatttgagaaaactgtttatcagagtcatattttgagtctggggatgtttattaatattcttctccaatacaaagagcacctatcaacgttagagtcagagatagatgcccttgcgaaagaagttgaagaatataccattatcaaatcaattcctggaatcggagaaaagatcgcggcaacgattatatccgagattggggaaatcgatcgatttgatcatcctaagaagctagtcgcattcgctggagtagatccaagcgtttttgaatctggtaaattcacagctactaagaatcggattacaaaacgtggttccagtaggcttcggcacgcattatatatgggtgtaaggtgtgcaattcgagactgtcgcaagaagaaaacgagtgatgaaattatccctcgtaataagaaattacgtgagttctacgacaagaaacgtgatgaaggaaagcctttcaaagtggctgtcattgcttgtgtaaataagctcttacattggatttttgccctgttaaaaagcaacacattattccaagatgtagtataatcactacgtctagctaaatagtccaaaaccttccaagtgctgagaaatggtaggttatttagtgtactcatttttagtatatcatttgcatttaaacttttttattgaaaaatattgacaaactattagctg

SEQ ID NO: 7731 - DNA, 1352 bp, unidentified
  source 1..1352: mol_type = unassigned DNA; note = element_bfbf5df
  misc_feature 1..5: note = core
  misc_feature 6..449: note = LE
  misc_feature 450..1304: note = CDS
  misc_feature 1305..1352: note = RE
  misc_feature 29..224: note = bridgeRNA
cttttatatttactgagaattacaaaaaggtcattatattgttgttatgcaaaatgtattggcttttcgtgtgagacgagatgtggccaggtaaacatatagttataccgtaaaaaaggaattgtccacacgattatattctcaggagtctgaacagtacttaaggccgctattttgagcctggataaaacaaaaggatagacgaaggagaattaagtcgatacgattaaattcttcactatggctattagcaaacaatgcattgggatagatatctcaaaagcgacatttacagcatgtctgtgtcagcgttcagatgatggagtattaacgttctccaagacattggatttcagtaatgataccaaaggattcaaccagtttctgcgttgggtgaaaggagttattgcgccaggtgcagcgcttgttttttcatggaggctaccggagtgtattatgagaaccttgcccaccatttgcacaagattaagaaaagggtacatgttgttctccccaatacgtcaaagcactatttttcgagcctcaatatcaaaaccaagacggatgccattgatgccaggatcctgagtcaattcggtgtagaaagggctcataaagcatggagtccgcctccagcggtcttattacagctgagaaatctgaccagataccatgttcagctgcaagagcagaaaactgcattggggaacatcaaacatagtaaggactgttcgcacgatatccagaactttatattaaaaagtaataaaaaacttatttctgatatagataaggagattgccagatgtatcaaggaaattaacagattggtaaagtcagatgtggatctccatagaaaaactgagaagcttgcaacgataaaggggatcggaatgatcaccatggttaccattcttgccgaaacaatgggttttgaacagttccgtagcgccaaacaacttgtcagctatgctggatacgatgttgttcagcgggaatctgggacatctgtaaaaggaaaaaccaggatctcgaaaaaggggaacaggtatatcaggaatgcgctgtattttccggctatggtagcttgtaggcacaattctgtgctaaaggaagcttacacgagaatcatccagaaaaagccgtcaaaaatggtcggacaggttgccgtacagagaaaattattaatcttaatgtatacactttggaaaaatgataccgtgtttatagaaaattataaagtaagtagtcccgatccgaaaaccgagactacactagatagttcagaagctgaacttctttagaatacaaaaatacttttttgtctaaatatttggaatttaaaacagtac

SEQ ID NO: 7732 - DNA, 1362 bp, unidentified
  source 1..1362: mol_type = unassigned DNA; note = element_bfc508d
  misc_feature 1..2: note = core
  misc_feature 3..75: note = LE
  misc_feature 76..1098: note = CDS
  misc_feature 1099..1362: note = RE
  misc_feature 1077..1349: note = bridgeRNA
cgttggggtggacgccccctgacggcatcgatgtgccaaagtggaggtgttgaagcaccactgcaggaggcgtccatgggtgaggttagcacagttggggttgatctggccaagtcggttttccaggtccacggcgcggatgcgagcggcacggtcgtgttccgcaagaagctgcggcgggaccaagtgctgccgttcttctcgaccttgccgcgctgcgcggtagcgatggaggcgtgtgcgagtgcgcactattgggcgcgcgagctcgccgcagtcgggcacgacacgaagctgatcccgccggcgtacgtgaagccgttcgtgaagcggcagaagaacgacatggccgacgcggaggcgatctgtgaagcggcgcagcgcccgacgatgcggttcgtgcagggcaagagcgctcaggcgcaggcctcggcggttgtgttccgaacgcgcgacctgctggtgcgccagcgaacgcagctgatcaacgccctgcgtgggcacctgaccgagttcggccacatcgtccgccagggtgtcgggcacgtcggcaagcttatcgagatcgtcggcgaccctgcgtccgatgtgccggccgaggcgcgaccggtgctggtcgtcatcgcgcaaagcctgctggcactacaggcacaaatcgccgtgcttgaccgtgagatcgcgagccgagcgaaggcggatccggtggcgaagcggctgatgacgatccccggcgtcggccccgtgaccgcgaccgcgctggtggcgctggcgccggccgccagcaccttccggcgcgggcgcgacttcgccgcctggctcgggcttgtgccccggcagcactcgagcggtggcaaggagcggctcgggcgcacgacaaagatgggcgaacgcagcctgcgacgactgctgatcctgggcgccagctcggcaaccaaggtcgccgcgcgcgagccagacaaggccggcgcgtgcctggcgagcatgctcgcgcgcaagccacgcatgctggtcacagttgcgttcgcgaacaagatggcgaggatcgtctgggcgctgatggcgcatggcggatcctacagagctccggccacggcgtaaccgccaaggcttgaggcgtcagggacgcaagggaaggtcagcagagaggaatggcgcaacggtcagaagacggggtcgggaaaaccagtcaaagtgtccaagcgccatgagcgcgcaatagcggtctgaacccgatccgcgatctccattcaggccagcagctgtgatgaaagctgcatcaagaggccggacacacggcagcacctgaacccgcgcgcaagattctcgacaacaaccccttgtatccggaggggcgtccacaca

SEQ ID NO: 7733 - DNA, 1317 bp, unidentified
  source 1..1317: mol_type = unassigned DNA; note = element_bfc86d0
  misc_feature 1: note = core
  misc_feature 2..258: note = LE
  misc_feature 259..1302: note = CDS
  misc_feature 1303..1317: note = RE
  misc_feature 20..252: note = bridgeRNA
ctgtgaggatggcgttcgcagcctgacggtgctgggctgtggtcggtggcttcgagcgtgacccttggcctgactggcttcgtgcctttcgcgcgacttgtccgctcggggtcgccggccccggcccgagtggagtgactggcctgatcaggagcttgaccgtcgagcgttggcgcgctcttcgtgtcccgtcacagtcctgccgattctccaacccggaccgggatccacgtcccgtcctggcaaggagaagaacgcatgaacagtctgaccgatctgctcgacgtcgtcatcggcgtcgatacgcacgtcctcacccacaccgccgcgatcgtcgatgccggcacgggcggggtgatcgcccagctcaccgtcgacgcgaccgcgaccggatacgcagagctggtcgatttcgccgacgagcacagcacgctgcgggcctgggcgatcgaagggaccggtgggcacggcgccggtctcgcccgtcacctcgagcggtcaagagaggtggtcgtcgagctggatcgacccgaacgcgcgcagcgccgccacggggcgaaatccgaccctttggacgcgatccgcgccgcgcgcgaggcgctgtcccggccccggctcggaacaccacgttccccaggcgaccgccaggcactgtcggtactgctcgcggcccgccgctccgcggtcgcgtcatctaccgatgcgcagcgacaggtcttcagtctcgtcatcgccgcacccgagccgatccgggtcaagttccggggcatgaagctgcccgcgatgcttcgcaccgccgcgaagctgcggctgagcccgtcctgggacctggagacccgcaccacggtcaccgtgctgcgatctctggcgcgccgcgcactcgagctcactgccgaggccgcagcacacgagaaggagatcctccgcatcgtccgaacgatgcgccccgacctgctcgaccagcccgggatcggaccgatcgtcgccgcaacagtcctctgcgcatggtcacatcccggccgcatccactccgaagccgcattcgcgatgctcggcggcgtcgccccgatcccggcgaccagcggtcaagtcacccatcgacaccgactcaaccgccacggcgacaggcaactcaaccgggccctgcacgtgatcgcgctatcgaggctgcgctacgacgagcgcactcgcgcctacgccgaccgccgcaccagccaaggacgatcacgccgcgagatcatccgctgcctcaagcgctacatcgcccgggacctctaccgactcctcgaacaccccgcttgacatccataggagcgt

SEQ ID NO: 7734 - DNA, 1786 bp, unidentified
  source 1..1786: mol_type = unassigned DNA; note = element_bfd203b
  misc_feature 1..2: note = core
  misc_feature 3..71: note = LE
  misc_feature 72..1106: note = CDS
  misc_feature 1107..1786: note = RE
  misc_feature 1563..1773: note = bridgeRNA
tgttggggtggacgaccccgcggcatcgaatgccagagttgggttgtcagcaaccaacactggagccgtccatgtcccacattagccgcattggcatcgacacgtccaagtccgtcttcaccctgcactgcgtcgacgagaccggcagacaggtgctgcaaaccaatctccgtcgcgcgcaggtggccaccttcttcaagaagcttctccctaccgaggttgctctggaagcatgcggcagctcgcatcactgggcgcgggaactggtggcccttggccacgacgtccgtctgatcccgccccagtacgtcaaacctttcgtgaaacgcgccaagaacgatcgcaacgacgccgaggcgatctgcgaggccgccggccgtccgggcatgcgtttcgtgcctgtgaagtcggccgaccaacaggctcagggaatggtcctgaaggtgcgcgagacgttggtccaccagcgcacgcaactggtcaacgcactgcgtggtcatgccgctgaattcggcgtgatcgccgcgaaggggattagtcagatcacagcattacttgaaaccatcaaggccacagccaccattccacccgaggccagggccatgctggcgcttctcggggaggagatcaaacacctcgataccagactggaggagatggcgacgaagctggcagcggcacacaaggccaatccggtcagccaactgttggccactatccccggcgtcggtccgatcatcgcactgaccctcgccgtcgagattgatccgagcgccttccagtccggtcgtcatctggcggcctggattggtctgacgccgaaagaacattcaaccggcggcaagcaacgcatgggcggcatcagccgcgcgggcaatgaacggttgcgccggttgcttgtgaccggagcgacctcggtgatccgctttgccaccaggcccggccacaaggtcgcctcggcctggctgctgaacttgcttcagcgtaagccacgcaaacttgtcgcggtggcgctggccaacaagatcgcgcgtacggcctgggccatgatggtgagcggcgaggtatggcggcgtccgtcgcccgcggcccaggcggcggcatgaccgtcgtgatccgcgtcgcggttcaaacgtcacgttacgattgggagtggatccatgccccgtcaatccattggtgaaatagccatgaccggcgccgaacgtcaggcgcggtatcgtgccgcccgtgcggatggcgcaccggtcattcgcgtccgtcgtccaaccaaccggcgtagccggatccggcgctggaacgacacgatcgccgcgctcatggacctccaggcggagtacgccggctggcttgaagtcctgccggacaatcagcgagatggcgccacggctgacgcgttgcaggcgattgtcgatctcgatctctctgagcttcaggcgatcgaaccgccacgcggtttcggccgtgattgatcaaccggatggcccgaccggcacgggtcacgatgacgcgcgcgaaggtgaccggtatcaaccggtcaccacctgaaacgcgcgtcgatgccagggtgcgagagctgacagagatgacgtatcggcgaaccgacgatccggagaacccgttgaaaccagtggctctcgaagccgctcgattgtttggggccggatcgcggattccatctgggccagcggtcatgatgccgcgtcaaaggccggacacatgatcgcagtcgacctcccgtcagaaatctcttcgacgctcttgaacccgaggggtcgtccacaca

SEQ ID NO: 7735 - DNA, 1416 bp, unidentified
  source 1..1416: mol_type = unassigned DNA; note = element_bfd3b3f
  misc_feature 1: note = core
  misc_feature 2..92: note = LE
  misc_feature 93..1133: note = CDS
  misc_feature 1134..1416: note = RE
  misc_feature 1182..1411: note = bridgeRNA
taatggaatggacgcccacttcctaatacggcatcgaagtgccaaagtagtggggcattactaccactaaccatagaaaggggcatccaaaaatggagattacgacaattggcattgatctggcaaaaaatgtttttcagattcacggcgtggatgagcgcggcaagatggtggtgcgcaagcaattgaagcgcgcggagatgtcgaagtacttcgccaagctggagcagtgtttgattggcatggaggcttgtggcagcgcccattactgggcgaggaagcttgaaggatatgggcacacggtcaagttgatggcgccacaattcgtgaagccctatgtcaaaacgaacaagaatgacatggccgatgcggaagcgatctgtgaagcggttggcaggccgaacatgcggttcgtggcaaggaagacggtcgagcaacaagcgattatttcggtgcatcgcgcacgtcagggatttgtgaaagccagaacggcgcagggcaaccagatacggggcttgctctccgaattcgggatcgcgataccgcagggcatcggccagatcatgaagcaggtgccggagattttggaagacggcgagaacgggttgcctggcacgatgcgcaatctgatcgaacgactgacggagaatctgaaagaaatggatcgtcaggccaaagaactggaagcgcaaatacaactgtggcaccgcgagaatgaggcgagccgcaaactggcagagataccggggctggggccgatcacggcgagcgcgattgtggcgacaattggcgatgcgcgggaattcaagaatggccgtcagttggctgcgtggctcgggctagtgccccggcagaattccagcggcggcaagcagaccttgctgggcatcagcaaacgtggggacacatatctgcgcaccttgatgattcatggggcgcgagcggtgatccgttttgccgagcacaaagcggagccagaaagctggatgagaaagctgatggccaggcggaacaagaacgtggcggcggttgcgctggcgaacaagaatgcgcggatcgtgtgggcgctcttggcccatgatcgaacattccgccccgattacacaccggcagccgtagttgccggcatgtaatcggggcggttgagtaaaaccggttattaacgagtttgaggagcactaccaccgattgcacaggcaatcatgaaatgatggcgagacaggtcagaccgtgagtgagaaagtccgattagctccacgggcgaaaagcccgctaacgtgatggggacctcattcagcgaattccatcagggatagaggcgagagcctcactaaaaatccggatgtatggctgcaatctttacctactctcaaaatcatggattgaaaatgcttggcaaaagtgggcgtccatgta

SEQ ID NO: 7736 - DNA, 1266 bp, unidentified
  source 1..1266: mol_type = unassigned DNA; note = element_bfd4991
  misc_feature 1..3: note = core
  misc_feature 4..209: note = LE
  misc_feature 210..1205: note = CDS
  misc_feature 1206..1266: note = RE
  misc_feature 2..193: note = bridgeRNA
tacctttagattagcatctaagtttattattctatttttatgagaaagaatggggtgaactagatggtctactaggccttaagtcctaatggtcgtatcagaccccattctttcatagttgcaagaaccagttagaattataggctttgaggcctaataaaggttttagttccgcaactaatagtaataacaatcttaacgtcaaagttatgaaatttgaagaagttattggaatcgatgtgagtaaattgactctggatgcgttcattcacagccatcagatcttcacccaggtacccaatacgaagaaggggtacagcaagctattgacatgggccacaaagagtacaggctgttccatggataatgtgttattctgttttgagcatactgggatgtattcttatgcccttgcctgccatatgactgaaaagcagatgaactatattatggttccggggcttgagatcaagcgatcactggggatacagcgaggcaagaatgacagggttgatgccatgagaatagcacagtacgcctatcgcaggagagaggaagtgacaacataccagcttcctgagaaggctattaataagatccggcagttactgtcgctgagggagaagctggtaaaacaatgtgccggttatgaggcttcattaaaggacctgcctgactttattgaaagctcagagagcaaagtattggttggtgtccagcgtaacatgattaaagcacttgccagagagatagaaaaagtggagaaagagatagacagtgtgcttgaatccagtcctgatattatgaacaattacaggctgattaccagcattacaggagtaggcaggcagactgccctgtacctgattattgttactaataacttcctgtcgtttgatgatcacaggaagctggccagttatgccggtgtagcccccttcgctaatacctcagggacaagcattaaggggagaacaaaagtaagtcccctggcgaataggaagttaaaatccctgctaagtgcatgtgctgtatccgcaataaggcatgacccggagatgaagctatattttaaccgtcgcacggagatgggcaaacacaaaatgaatagcatcaatgcagtgagaaacaagcttttggccagggtgtttgccgttgtcaggagaggatcgccatatgttcctttgtgccagtacgcagcttgaaagttttttgagtcataaaaaactcgaaaaatctttcaagctgcttgtttttatcttagaa

SEQ ID NO: 7737 - DNA, 1626 bp, unidentified
  source 1..1626: mol_type = unassigned DNA; note = element_bfd8fcd
  misc_feature 1: note = core
  misc_feature 2: note = LE
  misc_feature 3..1142: note = CDS
  misc_feature 1143..1626: note = RE
  misc_feature 1388..1624: note = bridgeRNA
taatggaatggtccgcctcactttaccgaccggccagagaaggcgaagatggtcattttgaacccagggtagaagaagtgaagcaatctatgacaaataacgatacaagccaaaaatcagcaagccacgagatcaaagtattgggggtcgatttagccaagcaaagcttccatgtatacggtgtcgacgaggcgggtcgtaaaatcgtcagcaagaagctgagccgcaatcaactgacatcgttcgttgccaagctagcgccgtgcctgattggtctggaagcctgcggcggggcgcatcactgggtcagagtattcacccggttcggccatcgcgtgcggatgatcgcaccgcagttcgtcaaaccgtatgtgaaatccaacaaaaacgatgcggtcgatgcggaagcgatctgtgaggcggttcagcggcccaacatgcgatttgtgccggccaagagcctcgaacagcaagacatccaaagcctgcatcgggtacgcagccagtgggtggcgagacgcacggcgcaagccaatcagattcgagggctattgctggaatacggtttgatcgtcccgcaaggcatcggtcatgtccgtaaagccattccggacatgctcgaagacggcgacaatgccttaacaccggtattccgggaactgctcaacgaactctacgaggcgttggtgtatttagatcagcgcattaaggcgattgaacacaagctgacgacgatcagtgttcagcatgaagattgccaacgtttgctaacgatccccggtgtgggtctgttaaccgccaccgcgttgctggccgctatcggcgatgtgacggtgtttaaaaatggccgggaactggcggcatggctaggcctcgtgcccaagcaacattctaccggcggtaagccgacgctattaggcatcagcaagcgcggcgatacctatttgcgtacgctgctgattcacggagggcgttcggtctcccgtgtggcgcaccagcatcaggatgcacgcaaccgttggattgacagtatcaaacaacggcgtggcgaaaacatctcgaatgtcgccgtcgccaacaagaatgcgcggatcgcttgggcgttgttgaccaagaaagaatgctatcgggcggccgcatgaaggcgatagccaaacccttatttgaagcactcaaacggggcgctgccccgtgccgtgcggcttaccccgccctcgccgggaggcagggtgcgaaagccttcgcccctgcccaaagggtagcgccggtttcgagtgactcaaggactactcggcgcaagcgcctgcgttcctccttgacccactcgaaaccggcgagaatagcaagccacctgtaacgggtatttaaaccgagcaaaataagcaaccgtttcaacgaattgcggagataaagttcaagtgatggcataaaaggtaacacctgcattccagtgaacctgacggggtcttgggctctttagaagccgcagacctgatgaggtcggaatgcgcggattccatcagggccagaggccgtttaatcctcaaccaaaggccggatatatgggcgcaatattctctttatgtcaccagcgaatttttcttgcaatacggggcggaccatata

SEQ ID NO: 7738 - DNA, 1352 bp, unidentified
  source 1..1352: mol_type = unassigned DNA; note = element_bfde68a
  misc_feature 1: note = core
  misc_feature 2..77: note = LE
  misc_feature 78..1103: note = CDS
  misc_feature 1104..1352: note = RE
  misc_feature 1119..1349: note = bridgeRNA
taatgaaatggctccccccgccgccccctgtgatcacccactaagctttcacagggggctcatcggagaccgttgccatgaacaaagtagctattgtcgccatcgatctgggaaaacacacctttcatctgcatgcacaagatgaccgtggtcatgagctttaccgcaaaaagtttaatcgggcggcgctcatccagcatctggccaatctcgaaccctgcaccgttgcgatggaagcttgcggcggagcccacttcatggcgcaggaagtctcaagactggggcatatacccaaactcattgctccgcatctcgtgcgtccgtatgtgaaaagcaacaagaacgacttcgctgatgccgaagcgatctgcgaggctgcaactcgtccaacaatgcgctttgtgccgcctaagaatcaggctcagcaggcgctggccatgctcaactcgacacgtgattcgttcatcaaagaacgtactgctaccgtcaatcggattcacgcagccctcctggaagtcggaatcagcttggccccaggcttcaagtccatcaaagatcttccagcgctgcttgaagcgcatccacttcccgattccatcaaaaaactactgaccaggctgcgtgagcacttcaattacttgcacgagcaggtcaaggctttggataaggaagtggagtgccaagccgctgaagatgatctggctgttcgcttgatgacgatgccgtgtgtcggcccgatcacctccagcgtcctggctgccgagttgggcgatggcaaacagttcaagtgcggccgaggctattcggcctcgatcgggctagtgcccaaacaacactccacgggcggaaaaaccgtacttttaggcatcagcaagcggggtgaccgaaaccagagacgcctgctgatccagtgtgcccgcgtctatctgatgcagttggatcgacagaaaggagcgctggcggactgggtccgacggctatgggacaaccatcactccaatcatgtggtctgcgcactggccaacaaactggcgagaatcgcctgggcgattgcagcacaccacaccgaattcgatgcggggccaggcgcgatgaacgcctgaccccgcagtcacccgagcaccacccacctggtttgcgatgctggataacagatgacgtgaacggccaaccggcctgacgaaaaccctgagctcccacacggctgaaaggccgtccaagtaattaggatcgccgggcatcgattctcatcaaggcgcgaatggaccaacctccactcagacgccggatagatgaaagcaagccaaacacatcatcaaaaacagtattgcagaaaaggggggaaccataga

SEQ ID NO: 7739 - DNA, 1498 bp, unidentified
  source 1..1498: mol_type = unassigned DNA; note = element_bfe42c7
  misc_feature 1..2: note = core
  misc_feature 3..227: note = LE
  misc_feature 228..1376: note = CDS
  misc_feature 1377..1498: note = RE
ctcgtataataagttcggtaaaaattaaaattggtctttgaaaattgaatgcatattttttaacacctctggtaaaatagtttcaggttgcccctccttgagactttgttctcttaaataagattgcctaactagagtacagctttttacttgccggaaaatgttttgcctcgttttcttatgtaccgcgaggttgtaaggctgtactcaatccggaggtgattcctttggctattttagctattgatgtctcaaagaactatctttctttcttttctgatttcatcggtagtgggactgttgagaactctcctcaaggtattgttgaactttttaacaaagcttttgcttcttcttccgatttttctcttgtccttgaatcaactggtgttttttcttttaatgtcgctaacttcttctttcaaaacaacgtacctgtcttttgggttaaaactgataacattaagctctatcgcaaaattctcaatcgtcctaaaactgacaaaatcgatgctgaacttattttctctatcgcttctaaatttcctgagtctttagtcccttttgtcaataactcatatatcatctctgagcttcgtaatctcaccagactttatttaaagttcaacgaagatatcgctcgattgaaacttaggctctattcgtatgtttctctttatttccctaaacttgactttaaactaaataagactttcgaatgcctgcttaaagattatacaatcgaagaaatcgcaaacatgccaattgaagagttatttgaatatattgcgaaaatttccagacacaatgtctcttcacaagtcttagcagaaaaactccaaactcttgctaaagatgccttgaggttgtctgttaatccttcaaacactctgagaatatctattgtttccactatcgatttgatacagcactatgaaaaacaaatcgaactagtaaagaaagaaataagtaaattacttaaagtaatttcgaacacactaacaacagtcaaagggataggagaaataactgcagctggaattatagccgaaataggagacatcaatcgtttcgaaaaagcctcagcgttagcatcatacgcagggcttgtatggacaatcaatcaaagtggaaattacaaatcagaaaacaaccaactaacgaaaaaagggaacaagtatctaagaacatacctagtaatggcagcgaacggagtaaagacatacgatcctgtatacaaagaatattatcgcaaaaagtacgcagaagcaacaacacacaaacacatgagagcgctaatattaactgcaaggaaattagtaaatttagtgtattatttactaaagaacaacgtaccgtatgtaccgatgaaataggtaaaaagaacgaaatcaagtatgtgaagaatgaaagtgaaatattaagttattgaaagtcaaagtgttgactaggttttttatttttctattttttctcctcttgacttattaccggaaat

SEQ ID NO: 7740 - DNA, 1404 bp, unidentified
  source 1..1404: mol_type = unassigned DNA; note = element_bfe7514
  misc_feature 1..4: note = core
  misc_feature 5..92: note = LE
  misc_feature 93..1127: note = CDS
  misc_feature 1128..1404: note = RE
  misc_feature 1173..1397: note = bridgeRNA
atcatgacatggactccccctgctcctacggcatcaatgtgccagattgagtgctgttgaaggcgttcaatcacagagagggggagcccatcatgaagtgtacgcgcgtcggattggatatcgcgaaacaggtgttccaggtgcatggggtgaatgagcgtggggtggcgaagggacgcaagaccttgccgcgcgggaaggtgctggagtacttcgcgcagctgccgccgtgcttgatcgggatcgaggcgtgtgggagtgcgcattactgggcacgggagctcagcaagttcgggcacaccgtgaagcttatggcgacgcagtacgtgaaggcctaccgcaagcgggggaagaacgatgcgaacgacgccgaggcgatctgcgaggcggtggggcgtccgaacatgcgctttgtggcggtcaagagcgaagagcagcaggcggtgctcatggtgcatcgggcccgagcactcacggtggccaaccgcacctcacaggtgaaccagatccgcgggctattgggcgagttcgggctcgtggtgccacggggcatagggcggctgcggcgcgagttgccgggcatcctcgagaatgccgagaacggcctgccggtgctggcgcgcgaagtgctctcaggcttgctcgagcagctgcgcgaggcggacagccaagtcggcgcgtacgaccagaagatccgtgatctcgccgaggcaagtgagccggcccggcgactgatgagggtggaatcgatcggaccgcagaccgcgacggccctggtggccacggtgggagatccgcacgtcttcaagaatgggcgaggctttgccgcttggctcgggatcacgccgcgacagcactcgagcggcggcacggagcggctcgggccgattactcgccagggtgatcgctatctgcgaacgctcctggtgcacggggcccgctcatatctgcgtgtcgtggacaagaagactgacgccaaaagtgattgggcgcggcgcctcaagcagcgacgacacatgaatgtcgccgccgtggcgctcgccgccaagcatgcacgtatcgcctgggcgatgctcgcccacgggacggactatcgacccgcaggtccgcagaccgccgcggcctgacgtaggccagcactcggatccgcagtcgacatcgaggaggtacgacccgcccggaattgccagagcgtacaagctgatggaaacaggtcagaccgacgcaggatgaacctgactagttgaccggtggctcagacaccgcgccaatcatgaggctcctgcgagcgaatcgtcatcagggcccgcctcgacggaggcaaccgaaggccggatatatcgtccgcaatccgatcctgaatccagaagcgagacgccctggcaacgcagggggagtccatat

SEQ ID NO: 7741 - DNA, 1419 bp, unidentified
  source 1..1419: mol_type = unassigned DNA; note = element_c007889
  misc_feature 1: note = core
  misc_feature 2..127: note = LE
  misc_feature 128..1147: note = CDS
  misc_feature 1148..1419: note = RE
  misc_feature 1183..1419: note = bridgeRNA
atggaatgaacgcccccacccaatagatgcgagacgccgaacgagtggaccctcgcgggccgacggcatcgatgtgcctaatttggacgatcatggagatcttcacaggctaaccggagagtccgaaatgaagtatacgacggtcggtgtagatatcgcgaagaacgtcttccaactccactgggttgatggcgaatcgggggagatcgtaagcaaacaactcaagcgcgctgtcttccttgaacattttgcgaatcgcgaagcttgcgtcattggcatggaggcctgtggaggcgcccatcattgggcacgccgattgatcgaaatgggacacgaggtcagattgatgccggcgaagttcgtcaaggccttcgtcaccggaaacaagaacgatgcagcggacgcgcgtgcaatctggatggctacgcaaatgcccagcaaggtcgtcgcagtaaagaccgaagcccagcaggcagtgctcgcgctccatcggatgcggcaacagaagatcaaatatcgaacggcgcaaatgaattgcttacgcggattgctggccgaatacggcgaggtgatggccaagagtcgcgctgcgctggataaagcgattcccggggtgctggcaaagctggccgagcgtctaccggcgatgctgatcgactcgttacgcgaactttggagtgagcttgatcgactggacaaacagatagctgacatcgagcgacgtttgcaaacgtggatgaaagaggacaaggcatgcaaggcaatcgccgcgatccccggcgttggcctactgacggcgacggcgactgttgccacgatgggtgacgcgaaagcattcaggtcgggacgggagtttgccgcgtggctcggtctcgtaccaaagcagatcggcaccggtgggaagatccagctgctcggtataagccggcgcggcgatacgtatgtgcggacattgctcatccacggtgcgcgcagcgtactcttccatggcaagcatgtcgggtcttgggccgaacagttgcagaagcgacgtccatcaaatgtggttaccgttgcacttgccaacaagatggcccgaacaatctgggcagttctcgcgaatggcacgccgtacaaccaagcgcacttcgttgcacaaccggcttgatgactaaagcaacgtagaagattggagcttgcagaatgacgtcgaaaggttgcgctggcaattgagcatgatgacaagacaggtcggacctgaactcgcaaagcctgaaagataatttgagcgcgaagctcgtgcgacaaatgaggagcgagtcagcggatttcatcggggcccgcagcgtatgaggctgcaacgaggccgcatataaagctgcaacccatcctgtcgaagcaacgtgcaagaaaacctggcgcatcgggggcgttcatata

SEQ ID NO: 7742 - DNA, 1685 bp, unidentified
  source 1..1685: mol_type = unassigned DNA; note = element_c01c7d0
  misc_feature 1..3: note = core
  misc_feature 4..126: note = LE
  misc_feature 127..1296: note = CDS
  misc_feature 1297..1685: note = RE
agtaattatgtaagaaaagcatagtgcagtatatgtggtcagcctaattttttaggcgccaaaattttaatttagtgtgcgataacaccgatgtttcgccaattattaacattaaaaaactgcactatgccaagtacaaaattgcaaaattctactgactttgatggtcagattttttacgttggacttgatgtccacaagcactcatgggctgtaactgttcgtagcctaggtattcaggttgctaattttagccagcctccttcagcgaaagcattacatacaaccttaaccaggatgtttccgggaggggtatattattcggcctatgaagcggggttttgtggaaccggtactcatgaacaacttcgtaaattgggaataaccaacatcattgttcatgctgcagatattcctttaacagacaagcaaaagaagaacaaaactgacattcacgatagcagatctattgcagaacaactggagagaaaaaatcttcatgggattcatattctgacccacgagcagcaggaattacgaagtttattccggctgcgggaaaacaagataaaggacattacaagagccaataaccggctgaagagtttcatggcctattatggaatagaaataccggaatcaatttctaaaaaagagtacatatcgaaaagagtattggagtggttagataatcttgaattaagcagtgattctggcacaattacaaaacaagagttgatagaagaattaaaataccaacgaaaacaagggagtaaaattacaaaactgctgcgtcagcaaatacagattagtcatactgatgcatataaacgcctgcttactgtgcctggtcttggtccagtaacttcaatgggattactagcagaaatagccgatttttcgaggtttgaagacccagttgactatattggctatttaggattgaccccatggaatgacagtacaggagatactgtaaaaaccaaaggagttcaaccccggtgcaacaaacatttacgtcccttactcatagaagcatcgtgggtggcaatcagaaatgcgccgcatctttttgcttattacagcaaacatgcagtcaaaaacaataaacatgcgattattaaggttgcccacagattagccctgatcgcaaggggcgttgtactcaaaaaacaggattatcaagctgattacttacaaaataaacaacaagaaaaagtaattaaaaagggactaaaacgcactaaaaatcagggcattcaaaatggaaaggttttattggcatcaacagaatagcatattgaaaacacccgataaaacaactgttgttgaactaccgggtgctatgcttatctggctgtaatatccctggcgggttgcacctctgcagagcccgttgcgtttcttacagcagtataaatttacgagtaaaaattattaatgtttgatataaataagcataaatctcaagaatttttaaaagaggaaaacgcaatttaaggactgtcgtctaacaacaattaaaagtaggcgtacctcttttacctcatacaattactggcggcttttaaataattaaaatgaccgcatatagcagtctgagattattttgttttatcaaacgaaaaacctaattttatgtgatacagaacccacatatactgcactacgcttttctacatagc

SEQ ID NO: 7743 - DNA, 1463 bp, unidentified
  source 1..1463: mol_type = unassigned DNA; note = element_c027a85
  misc_feature 1: note = core
  misc_feature 2..251: note = LE
  misc_feature 252..1448: note = CDS
  misc_feature 1449..1463: note = RE
  misc_feature 42..221: note = bridgeRNA
ccgttatgttgttgacagcccctaaaagaggatcatagggactgtcggccgaccaatctcggcatggtgtcttgcccctgcttagccaatagtccggggggtgctgccaccgagattgggatggcagcagggtgattgctgattaggggcgcggcgccaaaactggacgcctgtcataacgtggatgtaagactttgctacctgcggttggtcgactttgaacaaaaaactagttcaagggagcactagtcatgatcacctcagacgtggacattttcctcgggctcgacgtcgggaaaacagaccattgggcgtgcgccgtcaccaaagacggcaccaaaatctggaacaagaccctgcccaatgacgaagccaaactggtctcggtctatctaaaactcatgactcaaggcaccgtgctggtggtcgtggatcagccagccaccatcggcgccctggccgttgccgtcgcccagcacctcggcattccggtggcctacctacctgggctgaccatgcgacgcatcgcagacatgtatcccggcacggcgaaaacagacgaaaaggacgccttcatcatcgctgacgcggcccgcaccatgccccacacgctacgcagcatccaagtctctgacgaagacgaagccaccctgggcatgctcaccggattcgacttggatctagcacggcagatcacccaaaccagcaacagaatccgcgggttgttcacccaaatccacccgccactagaacggatcctcggtccctggctggaacacgacgcggtgctcgaagtcctcgcctcctggccgacaccggcgcaactgaagcatgccggcaaagcgcggatcgacgcgaagctgaaaaagcagggagcccgccggcacactgcctgggccggagccatcatggacgcgctctatgagcaaacagtggtcgtggtcggcaccgacgccgcaggactagtcatcccgcacctggcccggcaactaatctcgttgcacgcccagcgtgtagatgtagccacgcacttggaaaccatggtggaggcccaccctctttaccaggtcctgacatccatgccaggggtcgccgtcaggaccgcagcgatcatcatcgccgagacctccggcaagaccttccccagcgccgcagcgttgtcctcctacgccggcctggcaccaaccacgcgccagtcgggcacttcgatcaagtccgagcgcgtcagccattcaggcaacaaacggctgaagcgagccctcttcctctcggcgttcgcatcgatcagattcgatccaacctgccgggcctattatgaccggaaacgagcccagggcaagcgtcataaccaagctctgatcgcactggcccaccgacgactcacggtcctgttcgccatgatccgggacggctcactctatgatgttccggaactaaaaattgcttgacacagaacatagggg

SEQ ID NO: 7744 - DNA, 1307 bp, unidentified
  source 1..1307: mol_type = unassigned DNA; note = element_c02a9f6
  misc_feature 1: note = core
  misc_feature 2..264: note = LE
  misc_feature 265..1260: note = CDS
  misc_feature 1261..1307: note = RE
  misc_feature 73..255: note = bridgeRNA
cctttagatttgtattataaatataatctataatgatgatgttgaaaagagggggtctgggggagactcataacttttaaaatgttcataactttaatttataatttaaaaaggaacggggtgaactttgtgtcgttctaggtttacggcctatcgcctgtattagtccccgttccccttaccggtcgcccaggaccaaataggattctagccttggcttgtaaaggtcttagtctaagcgaccattttaaacaatgtaaaattatggaaataaaagaagttatcggaatcgatgcgagcaaattaacgttggattgttgcatccacaacagtggttcgcaggaagtatttggcaacacccttgaggatatcccggcaatggcagagtggtcacttgacattagtggcgtagggaaacaagaacttttgttcgtttttgagcatacggggctatatacttatgagctgatccagtatcttggaggggaaggttatcttttccatgtagtcccagggttggagatcaagcgatcattggggattgcccgggggaaagacgatagggccgatgctaaacggatcgcccagtacggctatcgcatacgcgatgaagtaaagccttatcggatgcccagcgaggctttggccagcttaaagcgactcatgtccatgcgcgggaagctagtagcccaacgggcagggcatatgacgactttaggggagcagcaaagggtattggacgggaaaatcaataaggtgctgttccatgttcagaaagaggtcataaatacacttgatctgcaaataagagttgttgaaaaagaaatggataagattatgtacggagaccccgaactgaagaagctgttccgtctcttgaccagcataaagggcatcggggcggtcactgcccggttcctgatcgtttacaccgttgggttcacggcttttaggaactggcgaaagtttgcctcctattgtggcatagctccctttcctaaccgatccggaacaagtgtaaggggaagaacaaaaataagtcacctagcaaacaaggagggcaaggtactgttccacctctgtgccatgacggccatacagtgcgttccggagatgcgggtcttttaccaaaggcggctgaaagagggaaagaacgagatgagtacactgaacatcgtaaggaacaaactcttggcaagggcgtttgctgtggtgaaaagaggcactccctatgttgacactatgggatatgcagcttagcatatagaaaaaaattatggagtaatagttgttttaaccataggata

SEQ ID NO: 7745 - DNA, 1469 bp, unidentified
  source 1..1469: mol_type = unassigned DNA; note = element_c02c3cc
  misc_feature 1..2: note = core
  misc_feature 3..234: note = LE
  misc_feature 235..1452: note = CDS
  misc_feature 1453..1469: note = RE
  misc_feature 9..228: note = bridgeRNA
ccgttaccttgctggtgaccccgtagggcggggttacggtcgccgggcccggcatgacttactgcccctgtctttgatgatccggggggtgttgtcaccgggcctggtggcgccagccgaccgctgatagggacacggcccagcattgaggtctcttcgtaacgtgggtgccggcagctgacgcatcaccaacccgacgaccgtcgaacgcgggatggaaggatggtggtcgtcatgaatcaggacagcggcttcgacatctggtgcgggctcgacgtgggcaaacaagcccaccacgcctgcgccctcgatgctgccggcaaacgtgtcttcgacaagcccctgccccaggaccagaagcgactcgaggaactgttcgacaagctccaatcccatgggcgggtgctggttgtcgttgaccagccgaacacgatcggcgcgctaccgatcgctgtcgcccggtcgatgggcatccaagtggcttacctgcccggcctggcgatgcgccgcgcggctgacctctacccgggcaacgcgaagaccgacgcccgcgacgcatacgtcatcgcggacactgcgaggaccatgcttcacacgctgcgccgggtcgatgccggcgaggaaaccctcgctgaactcaaggtgttggtgggcttcgatgaggacctcgcagccgaggcgacccggttgtcgaaccgcatccgcggcctgctcacccagatccatcccgcgctggaacgcgttgtcggacccagattgggcaccaagcaaggcctggccgttgtcgagcaactcggcggcccccagggcatggcagcagcgtcgaaatcgaagctgctcagggtgatcacgaaggcctatccgcgcaacgcgcaggacttcgccgacgccatcacccaagctcttacggagcagaccgtcaccgttgcgggcacggcagcggccgagcaggtcctgcccaagctggccgcgtcgctgcgcgccaccttggatcagcgcgccgagctggctgtccaggtcgagaaggtcgttgatgctcaccctcttgccgaggtcctgacctcgatgccaggcgtcggggtcaggaccgcagcacggatcctgctcgacgtcggcgatgcctcacagttcccgaccgccgggcacttggcggcctacgccggcctggccccagtgactcgccgttccggcaccagcatccgcggggagttccccgcccgctccgggaacaagcacctcaaacgagccctgttcctgtccgccttcgccgcgctcaaggacccgaccagccgcgactactacgaccgcaagcgagcgcagggcaagaaacacaacgccgccctcatctgcctgtcccgccgacgctgtgatgtcctgttcgcgatgatcaagaaccgggagccctaccgggcccccgccccgacaccctcacccatgcccctcgtcgcttgacgaggaacatagggaca

SEQ ID NO: 7746 - DNA, 1388 bp, unidentified
  source 1..1388: mol_type = unassigned DNA; note = element_c036047
  misc_feature 1..3: note = core
  misc_feature 4..88: note = LE
  misc_feature 89..1117: note = CDS
  misc_feature 1118..1388: note = RE
  misc_feature 1088..1374: note = bridgeRNA
agatggggtggttgccgtcctcccctcacggcattgcaatatgccaagatgatgtggttgtagcccacaggacggagaagacggcaaaatgaaagacacgatgatcggggtggatctggcaaagaatgttttcgtactgcacgcagcaacgatggcgggcgaagtacggtatcgaaagaaactgtcacgaggacagtttcttcgcttcctatcggaacagccgccagcgattgtgattatggaagcctgcggtagcgcccattactgggcccgtgagttggtcaaagtggggcacgaggtcaggctgatcgctccgcaatatatccgccctttcgtgaagcgccagaagaacgacgccgccgatgctgaagcaatcgtcatcgcggcccgtcagcccgagatgcgtttcgtcccacccaaaactgcggatcagcaagctcgggcggttctgttccgggcgcgcgagcggattgtccgccagcgaacggaattggtgaacgctttgcgtgctgttctctatgaatatggccaagccattccacagggcattgctcacatccagcgcattgaagcgatcgttgagagggctgagatcgacctgcctgaactcgtgcgggaggagtgccgtgatcttctggctcagatagacgagaagacagctcggattaaggagaaggccaagaagctcgtggacctgtctcggcagagcggaatcgcgcatcgacttcaaacgatgcctggcgtgggtccgctggtggcactggcggtagaagccttcgcgccagcgatggagaatttccgctgcggccgagatttcgcagcctggcttggtctcgttccccgacaattttcatcgggcggaaaggaacgactcggccgggtatcgaaggccggacaggccgacattcgcagacttctgatcatcggtgcgatgacctgcgtaagttgggcgggtcgcaaaccgccagtgcatggatcgtggctttcacggatgctcgcgaagaagccgaagatgctggtggctatcgcactggcgaacaaaatggcgcggaatatatgggctatgctgacgaagcaggaagattatagagacccggctctggcaattatggcgtgacacggaaccgctacggataaccaggaccggctaggaggtgtgagaagtcgatgacccgaatgggcgcatgatcgaaacgatctggatcgggaaaaccagtactgctcttggagccacgagctcgggaacaagatttgggccggatccgcagatcaccataccggccagcggcctctgaaagtgccgcaaagaaaggcctgacagaagaccgcactcgatcacacctcaaaaaaggtcagaaactacttgcgcaacggacggcaaccacaga

SEQ ID NO: 7747 - DNA, 1563 bp, unidentified
  source 1..1563: mol_type = unassigned DNA; note = element_c03c6ab
  misc_feature 1..2: note = core
  misc_feature 3..210: note = LE
  misc_feature 211..1278: note = CDS
  misc_feature 1279..1563: note = RE
  misc_feature 3..244: note = bridgeRNA
cttgtatgattttttagaagctaaatatcatactttcctttcatttttctatatctgtggttcaatacaattcagatactatggacttttgattttttcctgtagcttgactactcaactggagtgtattgccgctacctttatctgaattgtttatatgctggatgtaccggggctttacacaaagtacttatttcaatcaagtctacgatgataatcgatggtggacatcatggtatcagactttatgaaagggaggtacaacctcatgatttacgtagcattgacattgccaaactcaaccatttcgccgctgccatttctgtggagggcgaagtactcattgagccgttcaaatttacaaatgactttgatagcttccaactgctgatctctaagctcgattccttcgagaaagacagcatcatcattggtcttgaatcgacggtacactacggtgacaaccttgttagataccttgttactgagtcttaccaagtgtgtgtgttgacccccatcaagacatctcagatgcgaaagaatagcattcgcaagactaagacagataaggtcgacacagttgtaattgccaaaactcttatgatgcaggattcactcaggttcgtcagtttttatgatcttgatcttatggacttaaaagcccttggcaggttccgccataagacgataaaacagcgaacacgccttaagattcagctgaccacatatgttgatcaagtgtttccggaaatacagtatttctttaaatccggcctgcaccagaaagccatctatgctctccttaaagaagcgccatcaccgaaagaagttgcttccatgcatatgactcatcttgcaaacctgctaaaagtgaactcacacggacactttaccaaagaacaggccaaagaattaagagttctcgcacagaagtctgtcggtgcaaacaacagctctatatctattcagataacccagaccattcaacaaatcgagttaccggatagccaattagtaaagattgaatcagagatggctgacatcatgaaattcaatgattctgtcatcatgaccattccgggtatcggatatatcaacggcggaatgatacttggtgaaataggaaatattcaccgtttctctaatccaaacaagctgcttgccttttcgggactggatccttctgtatatcagtccggtaattaccaggccaagaaaactcgcatatccaaacgtggctcacatacccttaggtacgctcttgttaatgcagcttgaaacgttgttagaaacaacgccactttcgaggctttttacaataccaagaaaactgaaggtcggactcactacaatgctttagggcttagcgccggcaagcatgtcaggatcatctggaagatgctcactaacgaagtagcatttaatctcgaatagagatttgataaccaatatcgatagattttgaaaaggcacctttagggagctttattaaagttaccctttttcaatcgatatagaaaacgaaatttctgcctaatctagggttgacttttcatagctggt

SEQ ID NO: 7748 - DNA, 1375 bp, unidentified
  source 1..1375: mol_type = unassigned DNA; note = element_c03dd05
  misc_feature 1..2: note = core
  misc_feature 3..81: note = LE
  misc_feature 82..1011: note = CDS
  misc_feature 1012..1375: note = RE
  misc_feature 1151..1370: note = bridgeRNA
ataatgaaatggacgctccaacttttacggcatcagagtgcctaaatgtgagtgttaaaactcagaagaaggagcgtccacatgaaagtatctactcttggtatcgacttggcaaaaaatgttttccagcttcatggtgtcggctgcaacggtcaaactgttcttaagaagaaactcacccgcgataaattccttccttttctcatgcaacttgaaccttgcttgattggcatggaggcctgtgcttccagtcatcattttgcgcgtgttttacggcagtatgggcatgaggttaaactcattccccctcagtatgtgaaaccttatgtcaaaacgaataagacagatgccgctgatgcagaagccatttgtgaagctgttgcacggcctaatatgcgttttgttcagattaaaacggcagagcaacaagctattctggtgctgcataccgagcgaaatatccttatccgcgaacgcactgcttgtgctaatagtatgcgggccattttggctgaatttggcattatcatgcctcgcacattaagtcagctgtataagaaagtccctgaaatactggaagaatatgataacgagttatcaccttttgtccgttgtagtgtcgcacgtcaacttgaacaccttcagggtgtggaagatcaaatcacgttgatcgaacaagaacttagcagttgggcaaaaacacaacccgcctgccagcgggtcttgaaagtccctggtgtgggattgatgacggcgacctaccttgtggcgtcagtggggaatgggcaacaatttcattcagcgaaacagtttgccgcctggttgggattggtgccgagagaattctccagtggcggtaagcagagattgggccgaatcagcaaaagaggtgaccgctatttccgttatcttctggtccatggtgcgcgggcagttgcagctgttattgagagacacaaagacaatatgccgtggctttacaggctgttgagtaaaaggcctataacgtagccgttgtggcacaggccaataaaacggcacgtattttgtggtcgatgctggttcatcatacggaatatcgaaccttatccgtggtttgagataatctcaaacacggataaggctcaagaacaaaagtgaatacgtttcaggtaattgcaagtgtaattattgagatggcaaaacaggtaagaccgcaagtgagaaactccgtgagccgccggggcatttggcccgtaaggatgataggaactcacttggcggatttcatcatggttcgggcgcaatcgcgcccataaagaaaccggatatatggctgcaatacctgagcgctattttcaagaaaaaacacttggtttattgggagcgtccatat

SEQ ID NO: 7749 - DNA, 1422 bp, unidentified
  source 1..1422: mol_type = unassigned DNA; note = element_c03e1e3
  misc_feature 1..2: note = core
  misc_feature 3..122: note = LE
  misc_feature 123..1145: note = CDS
  misc_feature 1146..1422: note = RE
  misc_feature 1185..1421: note = bridgeRNA
gaatgaaatgaacgcgtcccacccgtgaacgtaagcgcagaggaaggtggatcctcacgggccaacggcatcgatgtgcccacgtggaagaatagagtttttccaggcaaccggaggatccagtggccaattgtacggcagtgggcgtagatatcgcgaagtcggtgttccaggtgcattacattgacccggagagcggcgaaatcgtgaataaggcgatcaagcggccaaagtttctagagttctttgcgaaccgcactcccagtctcatcgggatggaggcgtgcggcggtgcgcaccactgggcccggcaactgatgaagatgggccatcaggtcaagctgatgcctgcgaagttcgtcaaggcgttcaacatcggcaacaaaaatgacgcagcagatgctcgggccatctggctggcagtgcagcaacctagcaagccggtcgcagtgaaatcggagatgcagcaggcgatgctgggactccaccggatgcgcgcacagttggtgaagttccgcacgatgcagggcaatgcgctgcgcgggctgttggccgaatatggcgaagtgatgagcaagggccgcgcaaagctcgacaaggagatcccggcgttgctggaacggattgcggagcggttgcctgcggtgctgattgatacgctgcgtgaccagtggaacgggttggcgaagctggacgggcagattgccgaaatcgagcgtcgaatgcgcgaatggaagaaggaagatccggccgtgaatgcgatcagcgagattcctggcgtgggactgctcacggcaacggcggcagtggcgatgatgggtgatccgaaagcattcagttctgggcgggagtttgctgcgtgggcgggtctcgtacccagacagacaggctcgggtggcaaggtgaacctgcatggcatcagtaaaaggggcgacacgtatctgcgtacgctgctcattcacggcgcgcgcagcgtactgactcgtgcgaaggagccgggccagtgggccgagcagatcggcgggcgtcgcccgcgcaatgtggtggtcgtggcgctggccaacaagatggcgcggacgatctgggcggtgctggcccatgaccggccgtatcagagggactacgtaagcgtgaaaccggcctgaacggccggcgcgataaagaagatcaacgtttaacacagggtgaacatcgaaaggttgcgcagcaatcgggtgtgatgacaaaccaggtaggaccggggcccgccaagcctgaatcatttcgagagcttccagctcgtttgaggaatgaggcgcgggccagcggatttcatagagggccgcggcatgtcgagctgcaacaagcccggatatagagcagcagcccctcctgttagtcacaacacacgaaaaacttgcgcaaaagggacgcgttcatata

SEQ ID NO: 7750 - DNA, 1561 bp, unidentified
  source 1..1561: mol_type = unassigned DNA; note = element_c04393e
  misc_feature 1: note = core
  misc_feature 2..380: note = LE
  misc_feature 381..1454: note = CDS
  misc_feature 1455..1561: note = RE
  misc_feature 11..223: note = bridgeRNA
aaaacatactaagattagctatgaagaaatctatgacgatagattttttcatagctattttttatagttatagagagaagtagactgtccagactcttggattttaaatccgtataaaaaactagtcagctttactctcgccttttgaaattcgtttgtagtatgttgggttcttgaaaccgtgtataggaaaatgaaatgagaaaggttaagtaaagtttttagcttctcaattattcaaaggaggtttttttatcgattacttaggtgttgatattagtaaaagaagtagtgtagttgcacattataaaaatggaaaattccaaaaagagtttttcatccaaaataataaaaatggttacaattatttactcaagtatttgaatgacttacaccacccacaactcatttttgaatctacaggtatctattcaagaggtatggaacgattttgttgtgtaaatcaaattaactatattcaaatgaatccgttagaagccaaatttaaaacgagcgctctaagatcatggaaaactgatcaggcagatgctcataagcttgcttgtttaggaccgacgcttaaacaaacagacaacttacctatacatgagttaatattctttgaattaagagaacgcgtccgttttcatctagaaatcgagaatgaacaaaatcgacttaaatttcagatccttgaattactccatcaaacattccctggtttagaaagattatttagtagtcgatattcaatcattgcactcaacatcgcagaaatctttactcatccagacatggttcttgatatcgacaaggatgtactgattacacatatattcaattctacagataagggaatgtcaatggataaagctacaaaatatgcacttcaattaagagtgattgctcaagaaagctatcctaatgtcgatagacattcctttctagtcgaaaaattacgcttacttattcaacaattaaaacaatctattcatcatctcaaacaattagatgatgccatgattcaattagcacaacaactcgattattttgaaaatattcattcgatacctggtattggtaagctaagcacagctatgattattggggagattggtgatattaagcgatttaaatcaaataaacaactcaatgcttttgttggcattgatatcaaacgatatcaatcaggtcatacacactgtagagataccatcaacaggcgtggtaataaaaaagcgagaaaacttttattttgggtgattatgaatataataagagggcagcatcattatgacaatcatgtcgtcgattattactacaaactaagaaagcagcctaatgagaaacctcataagactgccatcattgcttgtataaatcgattattaaaaacaattcattatcttgtaatgaatcataaattgtacgattatcaaatgtcaccacattagccaaacgtacaatcaaatatagtttaacaccttattcaaaaaaattaaaatgaacggtttagttaagtaatgcttattttaattataagtacttgactaatcgtagg

SEQ ID NO: 7751 - DNA, 1173 bp, unidentified
  source 1..1173: mol_type = unassigned DNA; note = element_c0442e8
  misc_feature 1..2: note = core
  misc_feature 3..177: note = LE
  misc_feature 178..1152: note = CDS
  misc_feature 1153..1173: note = RE
  misc_feature 34..198: note = bridgeRNA
cttgtatcttgagatttggttactatggcaatgaacggatttggcacagtgcatgtagcccggtggcccctggggttctaagcccgtctaatagcgaatggcgcatgcactgagccactcatctgaaacccgaacagttgtccgtactccataacgcatttgcaaggatgggtaataatgagtcagccaaatccactctgtgtgggcattgatgtttcgaaagcaactctggatatagccgccaatggtgatggtgacattgcacagtttacggtcagtaatgactctgatggttttgatgccattatcgacgaactgagaaagcattctttggcgctaattctgatggaagccactggtgggcttgagtctgcagtagcctgccagcttcaggcagaaggatttgatgttactgtgatcaatcccagacaggccagagactttgcccgtgcgatgggctatctggcaaaaactgatcgtattgatgccagagtccttgcccaaatggctgaggtcattaatcggcatccggaacgggagcgttttatccggactctgccggatacagaacgtcaggttcttgctgctatggtggtccgcagacgccagctgattacaatgcaggtggcagagcgtaaccggctgtacaccgcacatccacagagcaggaaaagcattaatatcatcatcaaagccctggaagatgagcttgccagaatcgatgaggatatgaaaaaccacataaggaatcactttaaggatctggctgcccgactgagcagtattaaaggcgttggcaccatgacggttgctgcgttgctggcggaagttcccgaacttggtaatctctcaagacgggcaattagcgcgcttgtaggcgtcgcccccataaaccgggattcgggaaccatgaggggccgacgaaccatttttggtggaagagatggcgttcgaacgtcgctatatatggccgcgcttgtcgcaacccgctttaatccggtgataaaaactttctacattcgtctacttgctgcgggaaaacccaaaaaagtggcactggttgcctgtatgcgcaaactgctaaccatcctgaacgcgatgctcagaaagaacgaagagtggaacgagtcgtaccactacgttgctccataatttttaccttcaagacagttg

SEQ ID NO: 7752 - DNA, 1349 bp, unidentified
  source 1..1349: mol_type = unassigned DNA; note = element_c044d92
  misc_feature 1..2: note = core
  misc_feature 3..8: note = LE
  misc_feature 9..1166: note = CDS
  misc_feature 1167..1349: note = RE
  misc_feature 1133..1342: note = bridgeRNA
ttaatgagatggtcatccccaccctccgagggcacactttcgcagggtgttttatttcggaggccatcatcacgagcgcagttgcactggtagggattgatccgggcaagcaaagctttcatctatacggaaaagacggttctggccggaagatctttcgcacgaaagcgacacgccagcaaatgatgcgattgcttggcatcctgccggcttgcacggtggtgatggaagcctgcgccggagcgcactttatggcgcgccaactgacggcgctcgggcatcaagtgaaattgatctcgccgcagttcgtgcgtcctttcgtcaagggcaacaagaacgacttcattgatgccgaagcgatctgcgaagccgcctcgcggcccagcatgcgcttcgtctcgcccaagatcgaggcccggcaaacgctctcggtattgcaccggatgcgtgattcgctggtgcgtgatcgtaccaagacggccaaccaggcccacggtttcctgctggagttcggcatcagcctgcccaagggactatcgctggtcagacgactgccgagcacgttggatgagcatgagctgccgcctcggctggtcgtactcctaacgcgcctgcatcagcattcacgctgtctggacggacagatcaaggcaccggacaaggaaatgaccacccagcttgaggaagatgacctggggagccgcttgctgacgattccctgtgtcggcccgatcacagccagcctgttatcggccgaaatgggcgatggcaagcagtatggcggcagccgtgatttcgcggcatcggtggggctggtaccccgccagcacagcaccggcggtcgagccaatttgctgggtatcagcaaacgagggagacaagtatctgcggcggcttttagtgcagtgcgcccgggtctacctgcagcgcctggagcatcagcagggtgccttggcccactgggtccgctcgctacggcagcgacgccatgcgaacatggtggtgcgcgccctggccaacaagttctcccgagtcgcctgggcgttcgccgccaaccactcggaattcgaagcagggccagtcgtctacgccgcctgacccggccattcagctgtaccacggaacacccttccaggttttgcgatgctgaacaaccgatgacgtgaacggccaccgacctggtgaacaacctgacataaaaatcggctttcgaagccgccggcttttcaggatcaccaggcgcgactctcatcgtggcgcggggcatgccccaacgagacgctggatagatttaggcaagccatacaatcatcgctggtcagtattgcagaaacgggatgaccataaat

SEQ ID NO: 7753 - DNA, 1609 bp, unidentified
  source 1..1609: mol_type = unassigned DNA; note = element_c053750
  misc_feature 1..3: note = core
  misc_feature 4..290: note = LE
  misc_feature 291..1466: note = CDS
  misc_feature 1467..1609: note = RE
  misc_feature 46..270: note = bridgeRNA
actcgtattatatagtagtagtttttatagtccctctccaaggactctataattacttcatcatagctttctttatcttttctacagataaggctatgatatataagatgctgtggattggtttttcctcgctaccacttgatggtttcagaaagtgtccaaccacagtctctttgtttgattgttaatcagttagataccgcatgacggtttatttggaacgagttcacaactgcgaagagcatctgtggtccaaaaacagtatcaaatactttcaaaggagaatttttatgatttacgtaggaattgatgtcgcaaaagataaacatgattgcttcatcacaaattcagatggcgaagcactttttaatgtctttaccattgctaacaacttagaaggctttaataatctgttcaataagattatttctgtcgaaacgaatcctgataatgtaaaaataggactggaagctaccggtcattataattacaatcttttgggatttctcattgataaaggtctgcccacctttgttatcaatcctcttcatacaaacttgtttagaaaaagtctcagcttacgtctcactaaaactgacaaggttgatgcacgtacaattgctcttatgatgatgtctggagtaaacttacagtcctactcagataaatcttatcataacgaggaactaaagtcattaacgcgttatcgttttgataaagtgcaagaacgtgcaaagcttaaaacttctgttgctcgtttaatggttattttgttccctgaattagaaaaactggttcctacgcttcatatggcatctgtttatgctcttatgacagaattcccatctgcaaaagcaatcgcagaagctcatttaacacgtcttagtaacctgttgcagaaaacttccagaggtcactacactaaaaatgatgcccttctaattcgtgaagccgccagaacttctataggaacatcaatgcccgctaaatctcttgaattaaagcatacaattaagcttattcaagaaatctcttctgagattgatgaaattgaacaacagattgagctcataatgaatacgttaaattcacctatcaccacaatccctggtatcaatcttcgaatgggggcgatgattcttgctgaaataggagacttttcacgttttgattcgcctgataaaattcttgcttatgctggcttatctccaactacttatcaatctgggcaattggactcttcgtattcgcatatggaaaaacgtggttctcgctatttgagatattctctctttaatgctgccaaattcgtttgcatatgggattctacattttccgcctatttagcaaagaaacgagcggaaggtaaacattacaatgtcgcagtttctcatgctgctaaaaaacttgtgcgagtcatttaccagctggaaaaaacaggacaaccttacataaaagcttcctaaacgcaaatccatatctcactttttcagagcacctatacgatgctctatttgtcatgcaatttttaaggttctaatttatctgaaatgcttttcagcaattcattcaaaaattctttattttatccttgacttttaatagttag

SEQ ID NO: 7754 - DNA, 1156 bp, unidentified
  source 1..1156: mol_type = unassigned DNA; note = element_c062c2a
  misc_feature 1..2: note = core
  misc_feature 3..208: note = LE
  misc_feature 209..1144: note = CDS
  misc_feature 1145..1156: note = RE
  misc_feature 13..210: note = bridgeRNA
cttgtcttatgacttccctcggcttccttgcaataagggagccgctgcccggcaccccaaatatgccgggcagcggcgggggacggatcgagaatgggtcggccgttgcgggccgtgcggtagtgtgatcgcccccgtcttttctcatgacctgaacggatagcagggcttcgggcctgcatgacaagcagaggtaaggaaaagacggatgcaggatatcatcggcatcgacatctcgaaagaccggctggacgcgttccggctctcggatcagcagcactactctttcggaaacgacaaggccgggttcaaaaccttgctgaaatggatcggcaacaccgaaggactgcggatcgtctacgagccgaccggcccctatcatcgtggaatggaggaagcgctcgcaaaggcgggacatgcgctggtcaaggtcaatcctcgccaggcgcggtgcttcgcggaggccactggcacgcaggccaagacagatcgggtggatgcgatgctgctggcgcggatggggcttgcactcgacttggccccgcggccggtgcgtggcgaactcatgaacgaactgagggagttgcacgtcgcgcggctggcgctgatcaaggatcggacggcggcagggaaccgtgctgaaacagcagcgatcagcctgatccgccgccaggcgaaggcacggctggccatcatcgagaagcagcttgccgaagttgacgaaaccatctccagcctgatcgcagcggaccccaccctggccgagcgtctcgacatcctgacctctattcccggcatcggcgccgtgaccgcgtgcatgctgttgatcgagatgccagagctcggcaccctcgagccgaaacaggccgcgagcctcgccgggctggcacccttcacgcgccgttcgggcaagtggaagggaaaggagatgatccgcggcggacgcgccagcctgcgcgccgcgatcttcatgcccgccctcgtcgccatccgcttcaacacagacctcaagcgaaaataccggcagttgcttgaaagcggcaaagcaccaaagctcgcgatcaccgccgtcatgcgcaagctcgtcctcctcgccaatgcgctgctgcgcgacggccggaaatggaccgacagacccgcttgaccaagacggata

SEQ ID NO: 7755 - DNA, 1409 bp, unidentified
  source 1..1409: mol_type = unassigned DNA; note = element_c06ae45
  misc_feature 1..2: note = core
  misc_feature 3..120: note = LE
  misc_feature 121..1158: note = CDS
  misc_feature 1159..1409: note = RE
  misc_feature 1174..1404: note = bridgeRNA
agatacagtaatgggcctcccttcagctggactggaggggtggctgtcccccgatcatgatggagtgacggggtcaacaggtatggcgcctcggccccgcgaacctgatggacgacagccgtggagcattatgccggactggatgtgtcgttggaactgaccagcgtgtgcctggtcgatgcgagcggccaggtggtgcgcgaggcgaaggtggacagcacgcctgacgcgctgatccactttcttcgctcccaggatgtgccgatcgtgcgcgtcgcccttgaggcgggtcccttgtcgcagtggctgcacgccgggctgatggctgctcgcttcgaggcggtgctgctggaaacccgtcacgtcaaagcggcgctgtctgccatgacggtgaaaaccgaccggcgtcatgcgcgcggcatcgcccagctcctgcgcctgggctggttccggcccgttcacgccaagtcggcgagcgcgcaagaggtgcgggcgctgctcacggcccgcaagctcgtccagggcaaatgcctcgacatcgagagcggcatccgcggcgtgctccgaggcttcgggctgaaggtcggccctgtgagcaaagggcgcttcgaagcccgtgtcgtcgagctcatcgggggtcacgccatgctcgaggcggtgatcggcgcgatgctcaaagccagatccgcgcttcaagccgagtttgcccgcctccatcgcacgatgctgggcctggtgcgcgctgaccctgtctgccgccagctgatgagcgtgcccggcgttggcgcggtcgtcgccatcgccttcaagagcggtgtcgatgacccggctcgcttgaagcgatcgcgcgacgtaggggcgcacttcggcctcacgccaaggaagtaccagtcaggcgagatcgacgtgaccggctcgatcagcaaggtcggcgataagatggtgaggaccgcgctctatgaggccgccggcacgatgctgacgcgcactgtgcgcctctcgggcctgaagagctgggcgttaggtgtcgctaagcggcgcgggggcaagaaagcgcgtgtggcgctggcgcgcaagctcggcgtcatcctccaccgcatgtgggtggatcgcacgaccttccgctggcgcaacgcgcccgctgcaatgacggcatgagagggaaagcttagaagatcgggccggccagccaaggcctgcctgcccgaggtcccaccgctgggacggcgaagtcggtgaagccgtaatggcagcagtgacagccgagctatcggatgatcacgctggaaagattggctcaccgcttcctctgaccgtatcgtgtggcggcaccaagccgaccacggacagaagcaagtcaccagcggcaggacaaaccggggcagcttgacacaacggcccattacaga

SEQ ID NO: 7756 - DNA, 1354 bp, unidentified
  source 1..1354: mol_type = unassigned DNA; note = element_c06de9f
  misc_feature 1..2: note = core
  misc_feature 3..226: note = LE
  misc_feature 227..1204: note = CDS
  misc_feature 1205..1354: note = RE
  misc_feature 49..214: note = bridgeRNA
gtcgtacatttgtacggttaaaagtttttgtataattttatctttagagatcaggacacacaagcatggaaaaaggcagattgagggatggcaaaccccgtgtttaacgttcagtccccatgcttttgcatctaaagactggatagttcgttggggcagatagactgaccccgtgtttgcgacgggagtgtaaaagatgtagctcctgactaataaaatctgagatatgacatacattggaatcgacatcagcaaagcggtctttgtagctgcattcccatcgggaagcggctaccgtaccgagaccttcaccaacgacaccaagggtatacgcaagttcattggaaagctttcggcagatacgcaccattgtgttatggaggctacgggcaactattgcttcctgctcctttacctgttggatcacgccggcatcaaggcaagtcttgtcaatccgaagaaaatcaagaattactcacgggtgatgatgtcggtgacaaaaaccgatgacatggatgcccgcctgattgccgatttcggcgagaagatgaaacctgcgccttacaagcttccttcggaaagtctgatgctactgaaacagaagaaaacagttatccgtcaacttcaaaagcaactcatcgccacaaaaaaccttcagtcatcacttgaaccactgcctgttaaagataagaggtgtcttgcttcgttgaaacagactgtcgcgtttcttgacaagcaaatcaagcatctcgaagctgaacttgtacagaccgccgagagtgtttttgacaagcagcttaaagcactcacctccataaagggcatcggtgtcacccttgcaacggccttgattatagcgacaggaggctttacctattttgacaatgccaagcaactttcacgttacatcggcatctgtcccaccattgagcaatccggttcaagcatcaacatcagggggcatatcaaccgcaatggagacgaaaatctccgatccatgctgtatgtcgcggcatggtcggcaagccaacataacaaggcttgcaaggagtgttaccaacgattgcggcaacgtggcaaatccggaaaactcgccatggtcgcggttgcgaacaaactcgtcagacaggctttcgctgttgcgacttccaatacgtcatacatcgacggcttcgtctctacgaaacctgctgccaccgtatgaaacattcctctctccttctggcgaggggatgcccgagcggcgggggcggcctaaaccgcccccaagagcggacagcggcaagaccattcttcaaataatctaaggtggatgcaatttttgcctcattttatttggattttaatatagttc

SEQ ID NO: 7757 - DNA, 1662 bp, unidentified
  source 1..1662: mol_type = unassigned DNA; note = element_c074544
  misc_feature 1..3: note = core
  misc_feature 4..269: note = LE
  misc_feature 270..1211: note = CDS
  misc_feature 1212..1662: note = RE
  misc_feature 81..266: note = bridgeRNA
taaccatccatgcttagcaaagcacaaccatagatgaaaatagattttcaagttgcaaaaaattcgatttttgttaaactaagattaacaggggaaaggttgatttaattttgatggattaatacctcgtgcattaacctaacctgattacctttgagcacagccaattgtcgccccatattaactaatatgggaacagcacgggtgctaaacttcttaattttctcaggtaatcaacccctgtaataaacttaataggggtaaaaagaatgcaagatttacttgaagtttgttgtggattggatgttcataaagaaactattgtagcgtgtttacttaaaggttctgtcaatgacgagaaaccacaaaaaataataaggacattttctactttactggaagggcttgaagaattaaaagcatggcttgaatcagagaactgccataatgttgctatggaaagtacgggaatatattggcagccaatttacaacgtacttgaaagcgcctttgatggtaccatgtcaattatagtagctaatgcgagacatatgaagaatgtacctggcaaaaagactgatatgaaagatgcagaatggattgccactttattaagagcaggacttttaaatggaagctttattccccctcaagaaattcgagaattgagagatctgacaagatatcgcaaaagcataattgaagagatatcatctcaaaaaaatcgtattgaaaaacaccttcaaagctgcggttttaagctttcaaattttttgacagatatatttggtgtatcaggtagggcaatactaaaccatatagcagagcatggaagtataacagctaaagaagtcgaaaattacgttagaggaaaagcgcgtgctaaactaaatgatataaaactatcaatcagtggtaggatgaataagcaccagagagagtttttgaaacttttacttaaacatttggacgaaatgtatgaacacctccgcgagatagaagaaaacatcaattctgaacttgacaaatacaaaaggcagattgaacaattagatagtatacctggtatagatgtaacggcggctgctgcaataattgctgaaataggtacagatatgagtaaatttaagacacaagagcatatatgttcttgggcaggattaagtcccgggaataatgaaagcgcaggaaaaaaaagtccactcgagtaacaaaaggcaatacttatatcaaaaggatactttgtgaagtcgcatggagtataactcgtataaggggctcatatcttgccacttggtattggaaaataaagcagcgccgtggaggaaagaaagcaatagttgcacttgcgaggaaattgttagttattatttacaatatgcttaaaaataatactgattatgatgagagagtttttgaagaagtcagaaaaaagcaagaaataattcgtgttaaacggattatcaatgaagctcgaaagttgggtttggaagtaatagttcctaaatcagtttaactctagcataagttaatattgtaaaattttccagctgatgctttctgcattggttagtttattattgccatttttctgactaaatggttaaacatattttgttgtcaaagttcaacatcacctttttagttagtatattttcgtgc

SEQ ID NO: 7758 - DNA, 1387 bp, unidentified
  source 1..1387: mol_type = unassigned DNA; note = element_c080805
  misc_feature 1..2: note = core
  misc_feature 3..77: note = LE
  misc_feature 78..1118: note = CDS
  misc_feature 1119..1387: note = RE
  misc_feature 1125..1374: note = bridgeRNA
tgatggggtggacggccccctacggcatcagttgtgccagaatgaggttgtcagaaactcattcgtgggagccgtccgtggagcagattatccgcattggaatggatacgtcgaagtatatttttcagctgcatggggttgatgcggccgaacagccggtgttgcgcaagcggctagggcgcaaggcgatgctggcatttttggccaagctgccgtcaacggttgtcgcgatcgaggcgtgcggggccgctcatcacctggcacgggagcttggcaagctggggcacacggtaaagctgatcgcgccgcagctggtgaagccctatgtgccgcgtaacaagaacgacgggcgcgatgcggaggggctgtgtgaggcggcgagccggccgcggatgcgatttgtgccagtgaagacagttgagcagcaggcggcgctgatgctgctaggcgtccgcgaccagctggttgcacggcgtacgcagctgagcaacacgatccgcggttatgcagcggagttcgggttgatcgaagccaaaggtctggacaagatcgcagcgctcctggccacgattgcgcacgacgaaagcgtaccggtgttggcgcgcgagctgtttgcaacgctcgctcgcgactatgcgcaggtgcaggtcgaactgaaggcgatcgaggcaaagctcgtggcctggcaccgtaccaatgccctgagccggcggctggcgcagatcccgggcgttggcccagttaccgccgcagcgctggtgatgaaggcgccggacccgcacgccttccgctccggccggctgtttgcagcctggctcggcttgacgccgaaggaccattccaccgccggaaagaccaggctcggcaagattacccgcgccggcgatgagagcttgcgccgactgctggtggtcggggcgacctcggtggtcaagcaggccaaggggaaacacaagcgcggatcaggttggctcctcgagcttctggagcgcaagacaccgaagcttgctgcggtggcgcttgccaacaagatggcccgcatcgcctggaagctgatgacgaccggcgagagctacgacagcgcgcgaaccgatacgcgagtcgcatccgccgcttaagctgagaagatttggccgaccggcgggcttgctcaccggtcgaaccggagctgcaagagcagagtagatggtaggatcgatcgatccggatgcgagcaaatccgtgggacccattggccgaacacaggtcgcttggttgattggaactcgcatcgcggaaaccatcttggccagcggtcaaacccaccgcatcaacaggccggacatatggacgcaagcgatccgatcacccatcaaaaagctcttgtgccacgggggccgtccacata

SEQ ID NO: 7759 - DNA, 1537 bp, unidentified
  source 1..1537: mol_type = unassigned DNA; note = element_c0865ec
  misc_feature 1: note = core
  misc_feature 2..245: note = LE
  misc_feature 246..1409: note = CDS
  misc_feature 1410..1537: note = RE
  misc_feature 1..225: note = bridgeRNA
tgtatgatgtatttagcctaaatacatcaatactctcctttcttttttaactttgatataattaacattaacactgtggactttttataaatccatatagcttagactatttgatggagagtattgccacagttttatctgaattatttatagttggataagcctttgagttttaatctcacgcaagtttataatgataaaactaggtgggctaacaaagtgaatttaacaaaggagttgatcaaatgatctacatcggcattgatattgctaaacttaatcattttgcctttgctatgaattcagatggtgaaatactattagaaccttttgcttttactaatgaccatatcggttttcaaaaactgcttactaaattatctaagtttcctaaggaagatttacttatcggtatggaatccactgcacattacgcagaaaatcttacttactttttattctccatggattttaaactttgcataatcaatcctattcagacctctggtattagaaaaggtggtattcgtaaaactaaaactgattctatagatacattcataatcatcaaatctatgattatgaacaaccaccgtatcttttctcagcgtgatatgtatactttgcaattaaaaagcctctgtcgttttcgtcgtaaattaatgaagtctaggacaaaggtcaaaattcagctcgttacttatgtggatttgcttttccctgaactccaatatttctttaaatccggcattcatggcaaagcttgttatgctcttcttaaagaagaaccaaatcccgacaagattgctaaaatgcatctcacgcggttatcaaacctactgaacaagacctctaacggtcactttggtaagcaaactgcaattgctttgaaagagcttgcatcgcaatctgtcggtacgaagaatgataccttatccttgcaaatttttcaatccataattcaaatcgaattatttacttctcaacttaaagaagttgacaaagacattagtgtgattatggacagcatagattcggtaatcaaaactattcccggtattggtaatttaaacggtgctatgatattaggcgaaatcggcgatattaatcgctttgataagccctgccagctccttgcatatgcaggtcttgatccttctgtctatcagtcaggaaactttaatgcttccgggacgagaatgtccaagcgcggatctaaacttctgcgttatgcattaattaacgctgcttggcagttaacacttaacaacgatacctttaagacttattacaatcttaaatgttcacaagggcatcgacattactgtgcattaggatctacgtcgcataaattagtacgagttattcataaaatgcttactgatgaattagaatttaatttgaactaattcttaccttactcattatttatataagattttgaaagcaccttgtagatgctttatttgtaatacgctttatacgtaaaaaacttcttaaactttttcttgttttgctattgacaattcatagttgg

SEQ ID NO: 7760 - DNA, 1514 bp, unidentified
  source 1..1514: mol_type = unassigned DNA; note = element_c092f02
  misc_feature 1..3: note = core
  misc_feature 4..246: note = LE
  misc_feature 247..1188: note = CDS
  misc_feature 1189..1514: note = RE
  misc_feature 3..220: note = bridgeRNA
cttatattatatttagcgcagttagctactgccaaagcccaagtggtatacttggaataagccactgtggattagtttattccctccaatcgcttgacgatttccgaaaggctctaaccacagttttttgtttcaattggtaatgagtttgataacgcatagacgttttatctcgtctaaggtaacaaggcaaaaaattcgtggataaccaagtagacttgaaatactatatctggaggtactcccatgctttatgtgggcattgatgtcgctaaaaataaacacgatgttacagccttgaatgttcaaggaaaaactgttcttaaaccactcactttttcaaataataaagctggttttgaactcttagatctgtctcttcgacagctcaaccaagactgtctcatcgctcttgaagatactggacattatgcctttaatctactgaacttcctgcatgaacaaggatatgaagtttacacctacactcctttgctcatcaaggaatttgccaaatcattatcacttcgcaagactaaaacggataagaaagacgctcatggcatcgctcttaaacttctttctgaccccaatcgtgaacaatttcaacacaataatcggcaagtagaactaaaaatactgactagacatattcatcgtctcaagaaaaaacagtctgattggaaagtacaatacactcgttgtcttgatatcatctttcctgagttggataaaatcgttggaaagcattcagaatatacctaccaactcttgacacgctaccctaatcctcagaaaaggattgaggcaggatttgataagctgatagaaattaagcgattgaccgcttctaattcaagggctttttgccgtgctctaaaacgttctatcggaacaacatctcctgctcgtgaattcgaaatcatcaaacattacaagaggctcattgacaaggtggaaaaatgtgtcaatgacttgatggctgagttcaactcggtcatcacgacggtcactgggattgataatcgtttaggggcggtcattttagccgagattcgaaatattcatgcctttgataatcctgctcaattacaagctttcgctggactggattcttctatttatcagtcaggtcagattgatttagctggaagaatggtcaaacggggttcccctcatctgcggtaggtactcatacaagctgccaaagcatgccctcgcttttcacctgcttttaagacctatcttaagactaagttagaacaaggaaaacattacaatgtagccatcatccaccttgcaaaaaaacttatccgaaccctgttttatatcctaaaaaagagctgccatttgacgaacaaaaagtgatgtaatttctgaaattaacacaggattacctttgaaaaaatggactttttcaagggctttttgccgtgctctaaaatcatcgccaaatcatcaaattgaaataagaaatagtttagataaaactattgacttttcttatagtttgt

SEQ ID NO: 7761 - DNA, 1510 bp, unidentified
  source 1..1510: mol_type = unassigned DNA; note = element_c0955b3
  misc_feature 1: note = core
  misc_feature 2..277: note = LE
  misc_feature 278..1495: note = CDS
  misc_feature 1496..1510: note = RE
  misc_feature 35..268: note = bridgeRNA
cactgataatgggaatcgcgctgtcggcgaggaccatcggcgaaaatgcgcatgagccgacgcgatggcccattaaaggattgccgtcgattccagcgactggcctcaactcgaagagcctcgcgtcggccccgaccaaggccggccaatgacctaataggagcatgggcctgggcacgtggacctggcaatccgcatggtaccgcccccatcagtgttctgtctagccagccttcggttcggagcatcgtataggaattgacctgaaaggctgcacatggccgagctggagaacaacctcgtctttgccggcgtcgacacgcacaaggacacccacactctctgcctcctcgactgcatggggagggcgatcggaaccttcaaattcgacgcagatgcaaagggctacgacgcccttgccggaaagataggcgatccggccacgtgcgccggcattggcgtcgaggggacgggctcgtacggggcggggctgactcgcaggctggtcgagctgggatactgcgtgtacgaggtgatggtgccgggaagggcgaggcgaaatccggggcgtccgaagagcgatcctgcggacgccgaagtcgcggcgcggcaggttatcgcgaggaccaacctgtcgaagcccaaagaccaattcggctggacggaggacctccggcagctcatgatagcccgcgatcgcctcgtgcgagccacatcggcgatgataaacgcggcgaaatccctgatcgtaacagcgcccgaggatctgagaaggtccctggcgaagctctccagaaaggacctgaggagcgctctctcggcgcttgaccccggcgccgacggcgttgttctggctctgggggccttggggagggcttgggatctccaggatcgagaggcagatgccgtagagggcaagatgaaggagatcctggaagcgaacgcccctgcgctgcttgcaatcttcggatgcggcaccgtttccgccgcggctctcgccgtcgcgggcgggggaaacctggaaaggctgaacagcgaggccgagttcgcctccttatgcggcgtcgccccgcttctggcgagctccggaaaaacggagcgccaccgcctgaacagaggaggcgacaggaaggccaacagggcgctttaccagatcgcggtgaccaggatgtcgtacgaccagagaaccaaggactacgtcgagaagcgcaagggcgacggaaagtccaagaaggagaccataaggtgcctcaagcgctacatagcacgcgaggtgttcagggccctgcgccatccgttcgaggtcaagggtccttcatggaaggacctgcgccctgccaggcaggctttgggcattactctggtcgaggttggcagcgccctcaacgtcggcttccagaaggtgagctatgcggaaacgggacggctaatgaacgttcagttcttggaaaagtacgatacctggctgaagtctcagacgaaagaagcgagttgacatacataggagctt

SEQ ID NO: 7762 - DNA, 1502 bp, unidentified
  source 1..1502: mol_type = unassigned DNA; note = element_c0965b9
  misc_feature 1: note = core
  misc_feature 2..177: note = LE
  misc_feature 178..1482: note = CDS
  misc_feature 1483..1502: note = RE
  misc_feature 2..196: note = bridgeRNA
ctaattgaacctgacgggcgctgcgatctgccgtagcgttcgggaggcccggcgggctggctcccgaaccgcctgccggtcacggttgtgacctggctttagaacgaggtgccagcccgccgggccgcgccgtggcgtggcccggaagaggcgtgagcgccagcactggaattaggcatgcccgccgcggacctcggttcggtgacaacggtctggagtgcgctgatggcggaagtgatgatcgggatcgacccgcacaagagctcgcacactgcagtggcgatcggctcaggtgaagagccgctgggcgagttgcaggtgcatgcctgcccgtcccaggcgggaacgctgctggcgtgggcggcggcctggccggagcggacctgggcggtggagggcgccgccgggctggggcatctgctcgcgcagcagctggtcgccgccggtgagcaggtgctggacgtgccgcccaagctggcggcccgggtgcggctgttgcaggccggggacaccaacaagaatgacccgaatgacgccttctcggtggcggtcgccgcgctgcggtccccggccaagcgcccggtgctcgccgaggatcatgccgccgtgctgaaggtgtgggccaagcggcatcgtgaccttgcccgggcccgcaaccaggccgcctgccggctgcatgcggtgctctgcgacctggtccctggcggtcacggcagggagatctccgcgggccaggctgcccgcatcctcgagcgggtcacccccgcgggcgctgtagccagagcccgctgcgagctggccgccgagttcctcaccgacatccgccgcctcgatgcccagctgcgcgacaccaacaagaaactggccgcggcggtcaaagcctccggcaccagcctgaccggcatcttcggcgtcggcccggtcatcgccggcacggtgatcggggacgtgcgccaggtgttccggttccccagccgggaccacttcgccgcctgcaacggcaccgcgccggtcgaggtgtcctccggcggccggaaggcctgccggctgtcgctgcgcggcaaccggcggctcaaccacgcgatccacatggccgcggtcacccagatccggcacaagcacagccagggccgcgcctactacgagcggaaactggccgggggcaagacgcacaaggaggcgctgcgggcgctcaaacgccggatcagcgacgcgatctacgcggccctggcagccggcgcccggcaagccgcagccacctgctccaagggcccgggagggcaaccggggaaccactctgtctccagggcggccagctcacaccccgtgcgccggctcttcggacaagccactcccgggcctgccaccaccatacggcccgtcaccaccgcaggtcccgccccgatccagccgaaccgagccccccagcgccgggctgcgtactccgcggccgcttcgaagaaaccccggccagccacttgacaccgacagcaaagaggact

SEQ ID NO: 7763 - DNA, 1556 bp, unidentified
  source 1..1556: mol_type = unassigned DNA; note = element_c096b19
  misc_feature 1..2: note = core
  misc_feature 3..245: note = LE
  misc_feature 246..1466: note = CDS
  misc_feature 1467..1556: note = RE
ctcatctattaacaatggacgagccgggatggtctcggcgttcacctgcaccaccacgggcaggacctgtgcaaacgcgtcaccttcgaggtccacatgcagacccgtccgcccgtggtggctgcggggcatggaccggccagcgagagcagcaccaccggtatcagcggtgagtgccgagatgaggttccgggcacgccccgtcattgcagcgtgaactttcggatcgaagggatctgactgcagtgattcaggatagtccggacggtgggaaacgtttctggtgcggcatcgattggggcggacgctcccatcacctctgcgtcctcgacgacgacggccaacagctcctcagccgcaaaatcgcgcacaccgtcgacggtctgatggccctggtcgaggtgatcgcttcgttggccggctcagtgctcatcgctatcgaacgcgccgagggcttgcttgtcgaacatctccaacagcaatgcgaagctgaaatctattgcgtatcaccgaagatctcggctcgggcccgtgaacggtatcggatggcggcagcaaaatccgacgagttcgacgcctacgtgctggccgacacgttgcgtcaccagcatgcccagtggcggccgttagccaccccgtcgccggtccttgccgagctgaccgcgatcagtcgcgaccgtcaacgcatcctcgacatgcaggtcgacaccgaaaaccggctgcgttcgatcttggaggcctaccatcccgcgccattgcacctgttctcctcactggaccgtgacatcaccctggccttcatccagacctatcccacgcccgcgcaagcgggcaggatcaccgcgacgcggatgggtggattcaccggccgtcacggctatagcggccgccagaagcccgaagcgctcatcgagcgcatgcagccgcaccttttgtccgctagcgaaggcactgtggccggtaaagcggtggcggcgaaagcattcaccgaacaactcgccttgctcaacacccacttacgaggccacgacaagcgtctacgtgaactactcgacgctcaccccgacacccacatcttcaccagcttccccggtatcggacccgtcaccgccgcagtgctgatctcggagatgggtgaagagcgcacccggtttccctcgccgtcgtcgctgctggccgacaccggtttggcgccagttaccaaggcctccgggcgcacacggcaggttcggttccgttacgccgctaaccgccgcatgcggcacgccattgactggtggatgttcgtcgccacccgtgaagatccgtggtcggccgagatttaccagcaggcccgtgctgccggccatgcccaccatcgagcgttacgcggtctcggtgctcgttgggtgcggatcctgtggcgctgctggcaagaccacaccgcttacgacccggcagttcatcaccgcccgaccgcggcctaactggtttacagaagcgtcccgctgcaggcagcaaacaatcgctgcagcgcgaacgaacgcgtccggaatcagaaggttgacagcgggagt

SEQ ID NO: 7764 - DNA, 1361 bp, unidentified
  source 1..1361: mol_type = unassigned DNA; note = element_c0a5950
  misc_feature 1: note = core
  misc_feature 2..7: note = LE
  misc_feature 8..1096: note = CDS
  misc_feature 1097..1361: note = RE
  misc_feature 1126..1357: note = bridgeRNA
taatgagatggtcacccccaccctacgagcgggtaacgctggtagggtgttcttctttgcggaggccatcatgcagaacgtcacgctggttggagtcgacctgggcaagcacgtttttcaccttcacgggcaggaccgacaaggcaaagccgtgtttcgcaagaaggtgagccgcaagcagctagtcgagtttttcgccacgtttcacagctgcacggtggtcatggaggcttgtgccggcgcgcaccacatggcccgcaagctggccagctttgggcatcaggtcaagcttgtctcgccgcagttcgtgcgccccttcgtcaagggcaacaagaacgatttcgtcgatgcagaagcgatctgcgaagcggcctcgcgcccatctatgcggttcgtcacgcctaagacggagtcgcagcaggcgctttcggcgctgcaccgggtgcgcgaatctttgatccgcgatcgaacgaagacgatcaaccagatccacgggttcctgctcgaattcggcatcagcctgccggtcggccaggccgtcatcaagcgcttgccggccgtgctggccgagcacccgctgccgccgcgcctgatcggcatcctcgagcgactgcacgcccacaacaagtacctcagcgagcagatcgccgagatcgaccgcgagatgggccggcaactcgccgaggacgatctcggccagcgcctgctgtcgatcccgggcgtggggccggtcaccgcgagcgtgctggctgccgagatgggcgacggtaagcagtacggcagcagtcgggacttcgccgcctcgctcggactggtgccgcgccagtacagcactggcgggcgggcgaacctgctgggcatcagcaaacgcggggacaagaacctccggcgcctgctggtgcagtgcgcgcgcgcctacatgcaacggctggagcgccagagcggctgccttgccgactgggtgcgcaacatgctgatgcggcggcactcaaacgtggtggcctgcgccttggcgaacaagctggcgcgcattgcgtgggcgctggcgacgcgcaacgccacattcaagacggacgcaagcgctgcgtcggcctgagcgctagctgttcgtctcctgttttaccgaagtccacccatctggttttgcgaccgctgaaattctgatgacgtgaacggcacaccggcctgacggacaacctggcaaagcaatcggctcttgaagccgagggtcttttaaggaccatcaggcgcgactctcatcgtggcgcggggagtcttccccacaacgacgccggatagatttaggcaagccaaccacgctatcaaaactcagagttgcaaaagtgggggtgaccatagat

SEQ ID NO: 7765 - DNA, 1572 bp, unidentified
  source 1..1572: mol_type = unassigned DNA; note = element_c0aa432
  misc_feature 1..3: note = core
  misc_feature 4..471: note = LE
  misc_feature 472..1353: note = CDS
  misc_feature 1354..1572: note = RE
  misc_feature 1338..1553: note = bridgeRNA
agatgtatggactctctcccttcggggatctacattgaagtttcataacagcagtgacagtcaggggccatattatggaaaaagacaacattattgcgattgacctagccaaaagtgttttccaagtttgtaaggttagccctagaggtaaaatcatttataatcgggaagtatcaataaaacgattaaaagagcttttagtaaaggaaacgaagtctttggttgcgatggaagcctgcgctactgcacattattgggctcgttatgctgaacgtgctggccatcaagtaaaggtcatcaatgctagaattgttaagggatttcaaacaaaacagaaaaccgataaaaatgatgccattgcgatagcaacagccgcgcccctagaacacatccaaagtatacgtattcattcggtggaagagcaggcaatgcaatcaacagaacgagcaagaaattttagcgcttactcatgtgattgctcagagtaaccagatacgtggtttgttattagagtttggaattgttattccacaaggcattaattctttacgtcgaaacctccgatttcaaacaaaacagaaaaccgataaaaatgatgccattgcgatagcaacagccgcgcccctagaacacatccaaagtatacgtattcattcggtggaagagcaggcaatgcaatcaacagaacgagcaagaaatttagcgcttactcatgtgattgctcagagtaaccagatacgtggtttgttattagagtttggaattgttattccacaaggcattaattctttacgtcgaaacctccctatgattttagaagacgctgaaaatgatttgccagatagttttagacaaattgttatgagtctatgggagcatttagaagtccagatagaacatgccgacgcaataacttcttctttgaaagggactattgaatcaaatcaagtgtgccaaaagttaatgaaacttgaaggtgtaggccctattggtgctttaggtttgtctttgaaattaggcaagggcgagcactactctaatgggcgcaatgcagcggctagtataggattaacaccaaagcagcatagttctggtggaaaagaacacattgggcatatttctaaacaatgtgcagataagcgactccgagccacgttatatcaaggggcgctttctgttgttagtttggtcattaatcgtccacctaaaacaaataaagagcaatggcttaaggctttgatagctagaagaggaaagaaagtagcagcaatagccctagcaaacaaaactgttcgaaccgcttatgctatcttgaagtctgattcagaatacgagccacaagtcatagtttaaaaggtgtccagtcaacaaagatcgacagtaaaacaggtaagaccaaccaatagaagtcagctcggttctagggtaataaaataccgtctctaagattttgacctattggtgcgattacattttagggcgaggtagctcctcatagtagcccgtatataagaacgcatctaacatgttttactagagatatttgattgacgacagccgagagtccatata

SEQ ID NO: 7766 - DNA, 1428 bp, unidentified
  source 1..1428: mol_type = unassigned DNA; note = element_c0acc25
  misc_feature 1: note = core
  misc_feature 2..219: note = LE
  misc_feature 220..1239: note = CDS
  misc_feature 1240..1428: note = RE
  misc_feature 15..231: note = bridgeRNA
ctgattgatacttgtgtcgggtgttgcgtcgtttcgtagcatctagaggtaccggctggccgtctctctatgtgcctgtcaccttcgggttgactttctaacgagctgttggccggccggtgtccttagctgggatgtggctcgaaagaggcgagaacactatcgacccgaatcaggagtgcccatctcggtttcaccgtcaacgagaaaggcattgttatgacgatgattggaatcgacccgcataaggcaacccacacggcggttgctattgatgacgacgagaatgtgattgacgagttcacactcgaagcatcgaaggatcaggttgagcgtctctgtggctgggctgaccggttcacgaagcgtgagtgggctgtcgagtccgcgaacggccttgggtatctgattgcccgccagcttgttgcttgtggtgagaccgtgtttgatgtgccacccgtgttggcgtcaagggtccggctgatgggttcggggaagtcgcagaagaacgatccgaatgatgcccggtcgattgcgatcgctgcgctgagatcagaccgcctggcaacagtccgccccgatgatcatgttgtggtgttgcgtctgttggtgaaacggcatcgtgacatggcaaggcttcgtaacaaacactgttcacgtctccacgccctgctcggcgaactcgaggcgggcggtatcggggtgaagatcagtgttggcaatgcttccgggcttctcgaccgtatcgatgttggtgatgaggcggccaggtatcgggtcttggttgcccgagaagtagtcggggacattgcccgactcgatgagatactcagggcttccaagaaacggatcgctgttgcagtgcaagcatcagggacatcgttgaccggcattgttgggatcggaccgatcggtgcagcaaccatcattggatacaccaaagacatcacccggttccccaccaaaggccactatgcgacctataacgcaacggcacctatcgaagtgtcctcagcaggcaacaccaggcaccggctgaatctgcgagggaaccgcatcttgaatcatgccatccacatcgcagctgtcacccagctgcgtcacgacacaaacggccgtatctacttcgataagaagatcgctgagggcaaaaccccgaaagaagcgatcagggcgttgaagcgacggatctcagacgccgtctaccagcggctcatcgccgacgccaacaaccagtagaagaagggggtccgggaggacagccaggaacgcctcgcgagaagccacgtggccagcccaaatctgtacagctggctctttggatcggtcactcccgaaccctgaccacaacgctacgaccgatcgcggcccgacgccagcgattccaaccaacgcgcccaaaaacatccacttgacacaaagaggctt

SEQ ID NO: 7767 - DNA, 1591 bp, unidentified
  source 1..1591: mol_type = unassigned DNA; note = element_c0ad4a4
  misc_feature 1..2: note = core
  misc_feature 3..270: note = LE
  misc_feature 271..1470: note = CDS
  misc_feature 1471..1591: note = RE
  misc_feature 33..290: note = bridgeRNA
ctgatacaatataattgaccgaaaaagtgcggtatttgaattggcacttttcaagttccgttacctaagctataatggaagggtaataaaggtctgacgtaaatctccttgtgcttatacgcacgacacaaaagactatcagccgtccttccgttatagcattcggtttatgcaggttgggcttcgcgtccgtgtaacaaatcagattgaatcggtaatggataaggtcggtcgccttgtttactaattcttttcttggaggttacacttatgaacgctgtcggtattgatgtctcgaaaggcaaatctaccgttgccgtcctgcgcccgttcggagaaagcatcgtttccccgttcgacgtatcgcacaatccaaaggaactttcggagcttgtcacactccttaaaactttggacggcgatacgaaggttgttatggaatacacaggcaactactatctcccaatagccttgtttctccgtaacaacggcttatttgtttccgtagtcaatcccattttggtgaaagactacagtacaaaatcgttaactgtccgcaaggttaaaacggataaaaaagattccgttaaacttgcttcttttgctatcgatcgttggaaagagctttcgcctttctccgttcaatccgaagcaagacttctactcaaatcctacaaccgacaatacaaccaatacatcaaactcaaagtttcgttgaagaataatcttatctcgctcatagatcaaacatttcccggagctaacactttattctctacgcctacgagaaaatccgacggtcacgagaaatgggtcgacttcattctcaaataccatcatgcggcgtgcatttcaaagaagtctttttcctcattcgctaaaagttatcttgcttatttctctgaaagtaaggctaaatccgtttacgatttcgcttgtaactgttcgccgtctttatcctttacggaaagtacagccttactcgtttcaaacgcgacctctcaactcaactgcattaacgaaacgcttgcgtcactcgcttccgagatgaataagctcgcttctacgctgcccgaatacgataccgttatgtccatgtttggcgttggctccgtcctcggttctcagctcatcgcggaaatcggcgacgtctctcgcttctcgaacaaaaaagctcttgtgggtttcgccggattagacgcttcgccgtttcagtccggaaactttaacccacaatcccgctctatctcaaaacgaggttcttccgctttgcgaaaaacgctgtttcagatcatgtcagttatcttgcaacaagccccattagagaactctgtatttcaatttatggacaagaaacgttccgaaggcaaacatttctacgtttacatgatcgctgccgccaacaagtttttgagaatttattatgctcgcgtgacagagcatttgaactctctcaagcataccgcttaatcgttatcctgctcgtttcaagtctgcgcctttgacggagacttttttttgctactcttttccctgttcgaaacatttctctaaaatctctcattccaacccttgacttttatttgcaggt

SEQ ID NO: 7768 - DNA, 1483 bp, unidentified
  source 1..1483: mol_type = unassigned DNA; note = element_c0b377f
  misc_feature 1: note = core
  misc_feature 2..177: note = LE
  misc_feature 178..1224: note = CDS
  misc_feature 1225..1483: note = RE
  misc_feature 1251..1481: note = bridgeRNA
gaatgaaatggacgcctcccgcctctgccattcaagcgacgtgcgccatgggagtgatggctagaagagagaatgtttgaagggagcggaagggtggaccctcgcgggccaacggcgtcagaagcgcctaaagtgaaagtctcaagagctttcaaggctaaccggaggatccacatcatgaatgctactcccaaatcggtggtcggtgtcgacacggccaagaacgtgttccaggtatacacggtggacaaggagacgggcgaagtgatcaaccaacagctcaagcgtgcgcagttcctgcaatggtttgtcaaccgcacatcttgcctggtcgggatggaggcgtgcggcggatcgcagcactgggcacgcgagctccagaagttggggcacgaagtgaagctgatgagcgggaagatggtcaaggcgttcgtctgcggaaacaagaacgatgcagccgatgcgcgtgcgatctacatggcggcccagcaaccggaagtgaaagccgtggcgatcaagagcgaggctcaacaggccgtgctggcgatgcaccggatccgccagcaattggtgaagatgcggacggcgcaaatcaacgccttgcgcggcctgctggcggaatacggcgaggtgttcggtcagggtcgaaaagcgttcgacgttggcatcaaggcggcgcttgagcgactgggcgagcggttgccggggccgttgatcgacgcattgcgcggccagtggaatgaactgggccggctcgatgagcgtatcgcgtacatcgaaaaatctctgctggcatggctgcgtcaggacagagccgccaaaaccatttccgcgattcccggggtcggcctgctgactgccaccgcggcggtagccacgatgggacaagcgaaggcgttccgatctggccgagagttcgctgcatgggtcgggctcgtccccggccagaccggtagtggcggcaaggtgcggctgctgggtatgagcaagcgtggtgacacctacttgcgcacgttactgattcatggcgctcgcgccgtgctatgccacaccaagacgcctagcccgtggctgcaacagatcagtcagcgccgaccgcccaacgtggtgatcgtcgcgttggccaacaagatcgcccgcgcgatctgggcagtattggcccatgaacgtgagtatgacaaggaccacgtcagtttgcggccgctcgcggcagcttccacgtgaagaataattttcaacctatgaaaggatggctcgccaccagttgcgtcaggtattgaaagtgatgacagacaggtcagaccgggatccactaaacctgaatggtttccagggctaccaagcccgtgaaaggaatgaggtgtggatcagcggatttcatcggggccggcggcgttgccgcgcacaaggccggatatagaactgcgactttcctcgtctgaacaaagctgaaaataccttgcaaaagggaggcgtccatata

SEQ ID NO: 7769 - DNA, 1185 bp, unidentified
  source 1..1185: mol_type = unassigned DNA; note = element_c0b4bff
  misc_feature 1..2: note = core
  misc_feature 3..207: note = LE
  misc_feature 208..1170: note = CDS
  misc_feature 1171..1185: note = RE
  misc_feature 6..212: note = bridgeRNA
cttgtatcttccatccgaccctcgcggtaaagtttgattgcccttttgggggtagccagaccggtccgtgcagtttggtagcgactggggtgttcgagcccgtccctgagtacataacgcacggctgccgcgctggtcttcatgaagcccgaacggttacgcgcgccgccttcgagcgcgcatgtacaagcatgggagctgaagatcatgtctgctttttcactgacggtaggcatcgacgtggccaaggcccacgtggatgtctgtgtgctgggcgccgacagcggtgcgcagcggttttccaatgaccccgatggacactcggcactggcggccagtttgttgcccttgggggttgacctggtggtcatggaggctaccggtggctatgaggctgccctggcctgtgcgttgcaagcctcgggcctgcctgtggccgtgctgaacccgcgccaggcgcgtgactttgccaggagcatgggccgtctggcaaaaaccgatgccgtggatgcgcgcatgctggccgagatggcagcggtgttggtgcgccgcgaggatttggcgcgctttctgcgccctgtggccgatgagtgtcagcagtggctggcggctttggtcacgcgccgccgtcagttgctggccatgctgggcagcgaacgccagcgtctgcagatcacgcccacaaaactgcaccccagcatcgaggccatcattgccgccatcaaggcccaactccatgatctggaggcacagatggtgggccatgtgcgcgagcacttcagcgaactcgacgggttgctgcaatcgaccaacggcataggtcctgtggccagcgcaacgctgattgcccagttgcctgaactgggtcggctcaatcgccgcgagatagcggctttggtgggcgtggcccctatgtccaacgactcgggcaaccgtaaaggcaggcgcagggtgcagggcgggcgttttgaaattcggcgtgtgctgtacatggcgaccctgaccgccacgcgctacaaccccgtcatccgggcgttctacgagcgcctcaaagccgcaggcaaactgcccaaggtagccttggtcgcttgcatgcgcaagctgctgaccatgctcaacgccatggtcagaaccgggaaaccttgggatgcttcgcttcatcgcgcttgactttgaagacggtta

SEQ ID NO: 7770 - DNA, 1382 bp, unidentified
  source 1..1382: mol_type = unassigned DNA; note = element_c0cdc68
  misc_feature 1..3: note = core
  misc_feature 4..84: note = LE
  misc_feature 85..1110: note = CDS
  misc_feature 1111..1382: note = RE
  misc_feature 1087..1370: note = bridgeRNA
atgatggtgtggatgccgccgcccggcgtcatcgcaacatatcgtcatgctgatggcagcgtggcaaaggaatgaggcacccacatgactacagcaaccatcatcggccttgatctggcaaagaacgttttccacgcgcatggtgcctccgaagccggtgccgtcgtgtttcgcaaaaagctttctcgaagccaggttctgccgtttctctcggagcaacccaaatgcatcgtcgccatggaagcctgtgcgaccgcccacggttgggcgcgggagattgaacgcctcggccacagtccacgcttgatcccaccgcaatatgtgaagccatatgtcaaacgccagaaaaatgatatggcagacgcggaagccattgccgaggcgggctcacgtccgaccatgaggtttgtcgagcccaaacccgaggatcagcagatcagcgcgatggcctatcggacgcggcagatgttcattggccaacgcacccaaacgatcaacgccttgcgttcgcatctggcggaacacggtgtgattgccgcgaccaatatgtgtggcctgaagaaactgtctgcgatgattgaagacgaaacggtgtccatgccatgcaaagtccgcgaattggcgcatgtctatgtcgaccatatcgcgcagctgacagcgcagatcgcagagatgacgggtgagatgcgggaaatggccaagaaatccgcggtggtgaagcgcttgcagactgtccccggggttggactgcaaaccgcaatggcagtcgaaacattcgcgccggatccgggatgtttttcccgcgggcgggatttctcggcttggctgggactggtgcccagacagaattccacaggcgggaaaagccgcttggggaaggtctcgaagatggggcaggtagacattcgcagccatctcatcagaggcgccatgtcggttatttcagcagcgacccgttttggcatcaagaagggctcgtggcttgaacggcttctggctcggaaaccaaaactcgtggcggcggtcaccctggcaaatagaatggcccgtgcgatctgggcgatgctgacgaagaacgaggattacaagaaccccgaggcggtcgcgtaacagcgagacgcgccaatctctgcctcggtcgatgtgtgaggaggtcaccgaagcttttatgggaaactgatcggccagatccggaccgggaaaaccatctatgtggcattgggcgtccaagccctcggatatgatttggacccggtacgcgcatcaccatatcggcccgcggccatgaacagtgccgcaacgacaaggcctaatacatgaccgcacccgatcgcacccaaagaggttcaaaataccccttgcaccaaaggcggcatccatac

SEQ ID NO: 7771 - DNA, 1439 bp, unidentified
  source 1..1439: mol_type = unassigned DNA; note = element_c0de85f
  misc_feature 1..5: note = core
  misc_feature 6..214: note = LE
  misc_feature 215..1423: note = CDS
  misc_feature 1424..1439: note = RE
ctcactggactaccttggtggaagtcggggagagcctcggccgctcgccgctcgacggccagcgtgagacccgctcctccgacacaaacgaggagaggcccagaccggccacaggatgaagcgccaggtggcgtgcatgcccagagcgcctctcagtgagcgaccggatggacctctcgctgcgcagtgtctcgtggtccccaggggagatgcaatgcgtttcttcgtcggtctcgattgggcgagtgcggctcatgcggtctgcttgatcgacctgcgcggccgtatccgctggcaggcctcggtcccccactccgcggatggcctggccgccttggtgcggcggctgcggcgctggcgccagcgcggcccgttcgcgatcgccctcgaacgcccctccgggctgttggtcgatacgctcgtccaggccggcttcgacgtcgtcccgatccatcccaacgtcgtgaaggccacccgcccccgctactccgccgccgggggaaagagcgatcccggcgatgccttcctcctggccgatctgctccgcaccgacggccatcgcttccggcccctgcagccgccatccgatgacacccgagccttgcgcaccctcgtccgcgggcgcgacgatctcgtcgcccagcgcgtggccctggccaatcagctccgcgccctcctcgagcgcgtctggcccggcgccgcccgcctctttgccgacgtcgactccccgatcgccctcgcgttcctcgcccgctaccccaccgcccacagcgcggcgcggctgggcgaaaagcggctcgcccacttcctcctccagcacgcctactgcggccgccgctccccgcgcgacctcctcgcccgcctgcacgcggcgcctcccagccagctcggcgacacggaggcggaggccgccggcgatctcgtccgcagcctcgtcgcgatcctcacccccctcgtcgcccagatccagcagctcgccgccgccatcgccgccgccctccagcaccatcccgacgcccccgtggtgcaaacgctcccgcgcagcggcaccattaacgccgctcagatcctcgccgagctcggcgacgaccgtcgccgctttgtgagcgccgaccacctcgccgccgaagccggcgtcgtccccgtcactcatgcctccggcaagcatcacggcgtcacgttccgctgggcctgcaacaagcgcctgcgcgcggcactcaccacctttgccaacaactcccgccacgcctctgcctgggccgccgccgtctaccagcgcgcgctcgggcgcggctgcgaccatccccacgctattcgcatcctcgctcgagcctgggtgcgcgtgctctggcggtgttggcagaaccgcaccgcgtacgacctcagccgccacggcgccgctgccgccctcgcagcggcgtaggcttgacacaggatgt

SEQ ID NO: 7772 - DNA, 1403 bp, unidentified
  source 1..1403: mol_type = unassigned DNA; note = element_c0e7f23
  misc_feature 1..3: note = core
  misc_feature 4..80: note = LE
  misc_feature 81..1124: note = CDS
  misc_feature 1125..1403: note = RE
  misc_feature 1164..1350: note = bridgeRNA
agcatcggtgagcgggcgggttgattgacccgcagagttctcttcctagactcgtagaccccctacgaaggagagcttgaatgacctacttcaccggaatcgatgtgtccctgagatccgtctcgatctgcgtcgttgacgaccgcggcgaggtctgtcgggaggccaaggtcgacgcgcatgtcgatgtcattgtcgactggctgcacgccttcagtcccgagttgaagtccgttggcttcgaagccggggcactgagccagtacctcacctacggcctgcaggccgcgggcttcgaggtcatctgcctggaagcccggcaggtcaagaacaccctggacgccatgcgcaacaagaccgaccgcaacgacgcccgcggcatcgcgcagatcctgcgcaccggctggtacagccgcgtgcacatcaagagcctgcacagtcaccgcgtgcgcgcgctgctcgccagccgcaaggcgatcctgacgaagtgcgtcgatctcgagaacgagctgcgcggtctcctgcgcgtgttcggcatccgcctggccccgcgcgtgggccacggatccttcgacgcccaggtgcgccagaccttcgccgatgacgagatgctgtcctgcgcgctcgtgccgctgctggacgcgaggaccgtactctacaagacctacctgaagctggacaacgcggtcaaggcgctgaccaaggcggatccgctgtgcgtgcggctcatgtccatcccgggtgtggggcccgtggcggcactcaccttcaagtctgcggtggacgacccggcccgcttcaagtcgtcgcgcaatgtcgcggcccacttcggcctgacacccgaacgctaccagtccggcgagatggacaatcctggtcacatctcgcgagctggcgatgctgacgtgcgctccgccctctacgtcgcggcgcactcgctgctcacgcgcaacgcccagtggtcgtcgttgaaagcctggggcatgcggctggccaagacgagaggccatcgacgtgcggtgattgcggtggcacgcaagctggccgtcatcctgcaccgcatgtgggtggatggctccgagttccgatggggttcacaggaacctattgccgtgaaggcgtgagcggtgccggctggagcgatgtgccgatagatcgaatcgaaagggatcaagaattgggcgttcaggtgtaggcgatggtccggatgaagccgtaaatgtctgctgcgctgtaaagcgcgtccacaagcgcggctctccgctccgtctgaccagtgcgtgcagcgccgaccctcgggtcgggacgactgcgtagagaagcgtgacctgcaccgagacgttctgttcgacaaagccaaataccgagatactctgcgcttgacaaactggcccgatcagaga

SEQ ID NO: 7773 - DNA, 1359 bp, unidentified
  source 1..1359: mol_type = unassigned DNA; note = element_c0eb0c0
  misc_feature 1..2: note = core
  misc_feature 3..74: note = LE
  misc_feature 75..1103: note = CDS
  misc_feature 1104..1359: note = RE
  misc_feature 1079..1347: note = bridgeRNA
tgatgctgtaaccgccccccgacgtcactcttgtgtcaaggtgggtcatgtttgatccaattaggaggacggttatgtcaacgcttgttattgttggtctcgatctcgcaaagaatgtgttccaggctcacggtgccgatgcatctggcaaagtattgtttcgcaaaaagctgcgacgcggtcaggttttggagttcttcaatgagttaccagcttgtgtgattgcaatggaggcttgtgggggtgcccacttctggggccgcgaagtcggcaagttggggcacgaggtgcggctgatcccgccctcctacgttaagccgttcctgaagaggcaaaagaacgatgctgctgatgccgaggcgatttgtgaggctgcggtgcgcccgacaatgcggtttgtctccgtgaagagcgaagaaacgcaaggcgcggcaatggttttccgcgtccgggaacttctcatccggcagcggacccaaaccatcaatgccttgcgagggcacttgaatgaatttgggcaaatcgtaccccaaggcgtagcaaatgcctcgaggctcgtggcactcgttgagtgttcagagtgtaaactgccaatggaagccattgcaacgtttcaagccctcattgcaacactcgggcattttgaaacagaaattgccaagcttgatgccgagatcacccgccgggccaaagaagacgaacttgcgcggcgcctgatgacagtaccaggtatcggcccgctgattgccacagcaattgctactcttgctccgccaccaaaaaacttccggagggcgcgtgattttgcggcctggcttgggctggtgccgcgtcaacattcgacgggcggcaagcaaaggctgggggcaacgacgaagatgggagagcgatctctgagacgattgctaattattggtgcgaacagtgtcataatcaaacggcacacccatcaagaggctcagccaggaacgtggttgggtaatctgctgctacgcaagccaccgatgttagttcgggtggcactcgcaaacaaaatggcgcgcatcgtctgggccttgatggcccgtggtggtgtctaccagtctccggtagcggcagcataaggctgccgtggctgcgagaacgtcggagcgtaagagggcaaggagtagtttggcgcaatagtcgtgagacaggttcaacaagtcagtacgcaacatgtgccaatgagcacgcgggactgatctgaccttgaacttcgaacaccatacgggcccgcagcatgtagtgcgctgcatcagaggccggatacatgtcagcacccgataacgcgttactatcagctccgaaattacctcttgcgcaaggggcggttataca

SEQ ID NO: 7774 - DNA, 1419 bp, unidentified
  source 1..1419: mol_type = unassigned DNA; note = element_c0eec76
  misc_feature 1..2: note = core
  misc_feature 3..121: note = LE
  misc_feature 122..1165: note = CDS
  misc_feature 1166..1419: note = RE
  misc_feature 1185..1414: note = bridgeRNA
agatggcgtaacgggccggcgccggcggctctagcgcggcgtggtggtcatccctcagaatgatggtgtgaaagccacggagtcaggtttcggcctgctccaagcattgagagggacgaccatggactactatgccggaatcgacgtttcgttggaaacctccagtgtttgcgtcgtggatgcaagcggcaagataatgcgggaggcgaaagtcctgagcgagccggagaacctgattggctggttccgggagcttgggcttacgttgacgcgtattgggttggaggctggccctttgtcccaatggctatttgcggcgctgaagaaagaaggcttggcggtggaattgttggagactcggcacgtgcgcgacgccttcaaggcgatgccggtcaagagcgaccgcaacgacgcgcgcggaattgcgcaattgatgcggcttggctggttccgccccgttcattgcaagtcgatgccggcgcaggaagtgcgcgcgctgctgacggcgcgcaaactggttcagtcgaagctgttcgacatcgagatgagcttgcgcggaattttacgtggtttcggcttgaaaataggaaggacgactccgaacggcttcggtccccgggtcgaggaactggtcgccggccatccgacgctggacatcatcgggaaggccttgctggcagcgcatcaagtcttgctgcgcgagttgaatgggttcgaaaagcgagtgcgacaacaagcgcgccaggacaagcgggtacgcctgatcatgacggcgccgggggtcggcccgatcgtgggcttgacctttgtcgcggcgatcgacgatccggcaaggttcaagtcatccaagcaggtggggccacatttcgggctgacgccaaagaaataccaatccggggagacggattacaacgggcggatcagcaagatcggcgatgcctcggtgcgcacggcgctctatgaggccgccaatgtgatcctgactagaccgctcaagggcgcgacatcgctgaagagctgggcaatgaaactggccaagcgtgcgggcatgtccaaggccaaggtggcgctcgcgcgcaagctgggcatcattctgcatcgcatgtgggtcgacggaaaacaatacgccgaccgagccggctctcccaagcctgcggcggcataacagaggacggaaacacaggctttcgggagggtcgcgacaccagccttcccgaagcgaagtcccctcgccgggacgatggaagaggtcagaccgtataccccgacgtgaaggcgacgatcacgcacaatgagattggtcggcctcctcctcatctaataccatcaggtggcggtcgtgtgccgaccacggacagaagagtgacccggcgaagaggtgacgcaaaaagggattgacagctcaaggcccgttacaga

SEQ ID NO: 7775 - DNA, 1345 bp, unidentified
  source 1..1345: mol_type = unassigned DNA; note = element_c0f9ecc
  misc_feature 1: note = core
  misc_feature 2..69: note = LE
  misc_feature 70..1092: note = CDS
  misc_feature 1093..1345: note = RE
  misc_feature 1113..1339: note = bridgeRNA
gaatgacatggattccccctcacgaggatttgccacacttaggtgtcgcactacataccggaggtaaccatgtcttctcatttcttttgtggcgttgacctcgccaaacaccacttttctctgcacgctgtcgatgaccgcggaaaggtcattctccataagtccgtttcacgcgctaaattactgactacattagcaaatatgccacctatgcgtataggcattgaagcgtgcagtggggcacattattgggcgagagagttcatcaagttagggcatgatgcccgtgtcatggccgccaaatatgtcggcccttaccgcaccaaaggcaaaaatgaccttaacgatgccatcgccatttgtgaagccgttcaacgacccaacacccgttttgtacccgtcaaatcacctgagcggcaagccattctttccattcaccgtatgcgcgagcattgggtgcaggagcgcaccgcgctcattaatcgcattcgtgccctgctcgctgagtttgggattgttatccctaccggacgccacgcaattcagcgtgatgttccgcttattctcgaagcggcggattacggactgcctgatattgctcgcgctgtgctcggcgatagttttgagcatctacaagtactcaaccaacgtatcgacgacaccgaactgtgctttgacatagtcaccaaggccagccccaatgcacagcgtattcttaaggtacgaggcattggtcctcagacggcaaccgccattattgccaccataggcaaaggcgaacagttcgactccggcagagactttgctgcctggctcggactcgttcccaaacaatattcaaccgggggcaagcctcggcttgggcgaataagtaaacgcggtgataaatacctgcgaactctgttagtgcatggcgctagagcggctatcactaaccttggggaaaaacaggacaggctcagtgtctgggcacgagatatcctcgaacgacggggaatgaaccgcgctattgttgctctagcagccaagaacgcccgtatcatctgggcgctgttacataaccaaaccgactatcaagactacgccgcctaagcgaaaggcggcgcagggaaacacaccaaccgggtcattgcagacgcgagctgatgaggaaaggtgaagaccatttgcagagagcctgttaatgcggcgggtaccattgataccttctaacgaatgaggcactgcaaccgcgtaatgtcatcagggccatggcgtgagccagtaaaaggccgaatgtagagcggcagtccaaacccaactcaaaaagtgtagcggatgtttgacgaacgggggaatccatgta

SEQ ID NO: 7776 - DNA, 1577 bp, unidentified
  source 1..1577: mol_type = unassigned DNA; note = element_c0fe11c
  misc_feature 1..4: note = core
  misc_feature 5..300: note = LE
  misc_feature 301..1476: note = CDS
  misc_feature 1477..1577: note = RE
tcacgtatactcaatttaaggttagaattgagtatttttcctttctagccgaattaagaatgatatcatctacggccattgatgatataatttataagcactgtggatttgtatctatattcttacagacaatatttgtactgtttcgaggtgaatcctgccacagttctttttttaaatggtgattagtaaattaacacatacctgatgtatgaaagtttgatgaattgcgtgattacacaaagaagaaactcgtgggcttaccaagcagtgctaaatcattttaaggaggtcatcttcatgacgtatttcgttggcatagacattgccaagtttaagcacgactgcttcatccaggatcataatggagtggtcatcaggcattctttttcctttaggaacaatcaggacggattcaacatactgctggatgcattgaacgggctggatcattctcaggaaataaaaataggacttgaggctacaggtcattacggaagcaatatcaagcagtttctgaattccaatgattactcattcatggaattcaatcccttactcatcaagaggttctcacaagctaccaccctcaggaaaaccaaaaccgataagattgatgctgcattaatttcctcttttttaatgactgtagactacaagcctattacgcatacatcttatcatacatcagctttaaaatcacttactagattaagggaatctctggtaaaggaacgctctttgacgcttgtaaggattaccaacgttctggacatcatattccctgaattcaagccattgtttgataattccctgaaatcaagcacctgcatgtatatcttagagaactattcctctccggacaggatttcaagaatgaatgttgaatcatacaacaaaatgaaatccaagctgagaaaaaccatatcctatgacaagtttctaaagatcagggatgcagccaagtcaaccgtaggcacaacagatgaaatatatgtctacgagcttcagatcctactgggcatttataaggaactagattccagaatatcagacctggaaaacaaaatcattcagtactacagacaattcaattcacacatccacactatcaagggcgtatcagagctatctgccgctgcaatctatgccgagctaaacggggtaactggattcaggaatcctgaccagatactggcttttgcggggctggactgttcccgaatacagtctggagaatcggataagaacggccgtatggttaagcatggttcttctgcacttagatgtgtactgatgcgctgcgcagattcctttgcgttgcataatcctgtagtatatgaatataaactgaagaaaatgaacgaagggaaattctttcgtgtagcactttcacatgtcgcgaaaaaactagtcagaacgatatatactcttgaaaaaaatgacctggattttgatcagagcaaattgagataaactgtttttcgtcaccataaatttttttgaggttcctcgaacctctttttgtgcttctaagataaacaaatcaaaatatacccttgactactgatagtaaa

SEQ ID NO: 7777 - DNA, 1367 bp, unidentified
  source 1..1367: mol_type = unassigned DNA; note = element_c101ad9
  misc_feature 1..2: note = core
  misc_feature 3..118: note = LE
  misc_feature 119..1084: note = CDS
  misc_feature 1085..1367: note = RE
  misc_feature 1121..1321: note = bridgeRNA
agatggggtattcggctgtccgagcccctcgtttccccgttgaggtgctgcgcttcgagctgatggtaaacgtggtctgttttggagcagccacaagcatcagatggagaagcgcagcatgtcatattatgttggcctggacgtctcggtcaaagagacctcggtttgtatcgtgaacgacgccggcaagatttgccgtgagaccaagatcccgagctatcccgacgatttggtgaggttgctcaatgatcctgcgatgccagcgactcgcatcggtcttgaagccgggccgctgtcacagtggctgttcagcgggatggcggaagccgggctaccggtggtttgcatcgagacccggcacacgaaggcctacctgaaggcgcaggtaaacaagagcgatcgcaacgacgcccgtggcattgcccagatgatgcgggtcaacttgttccgacccgtgcatgtgaagacgctcaccagtcaaaagcgccgggctttgctgactgcgcgcaaactgttgcaggaaaaggctgtggcaatcgagaatgatatccgggggctgctgcgcaacttcgggcttaaggttggcattgtgagtgtaatcaagttcggcgagcgtatccgtgagcttgtcgatggcatctcgcagggaaaatattcgattgtgaagggtgaccctgtttgcagacgattgatgaccgtgcccggggtgggtcccgttgttgcgctggctttcaaagccacgatcgacattccggcacgcttcagaaattcgaaggctgtgggtccttctctcggtttgacgccgcggctgcatcaatcaggggaagaccatcgcgtcggacgtgtctcactgtgcggcgacgctatgatgcggacgctgctttatgaagccgcgcaagtcttgttgaccgtcgtgaagaagtggtcgtggttgaaagcgtgggcgatgaatgttgccaaacgccgtggtcgacaaagggctacagtcgctcttgcacgcagattggcggtcatcatgcacaggatatggattgacggcagcgagttccgctgggctcgagaagatacgccagcggtgatgtagctgattcatcgaagaacagaacgcaacgaccaataacggaatccgccttggggtggatagatgtccttcgcgggacggaggatgaggaagagcgtgccgggactcgtgtcggccatggcaacatggtgagaacgctgtttagattgctcccttcattccaactgatcccatcctgggagggccaaagcgccgatcccgaagagaagcgaggccccgcgaaggcaccaaaaccccttggatgagggagctcgaaagcgcttgacttcaacacgccgaatagaga

SEQ ID NO: 7778 - DNA, 1796 bp, unidentified
  source 1..1796: mol_type = unassigned DNA; note = element_c102438
  misc_feature 1..2: note = core
  misc_feature 3..273: note = LE
  misc_feature 274..1491: note = CDS
  misc_feature 1492..1796: note = RE
  misc_feature 14..299: note = bridgeRNA
ctgttacaatataattgtcgggtaaatcccttacaaccagcaagggtttacacgcacttgttacctaagctataatgaaagcagtaattggactgacgttcacctccgtgggacaaagcgcccgtaattaagacagtcatccatgctttcattacagcgttcggtttatgcaggttgagccacagggaactgtgcgttcgtgtcacccaacagattgcatcggtaatgagtaaaagcgtggtctatccgattacaaaaaacatatcaggagcgatgaaaatgaacgcagttggtatcgatgtttccaagggaaagagcactgttgcaatactccgtccgcaaggtttggttgtggcatctccctacaatgtgccccacaccggcagcgacctgaaagagcttacgagggctatcaagaagctgcgcggtgagacacgggtcgtcatggaggcgacgggaaattactatgaacccattgcccgctttctccatgagcaaggtatatttgtttccgtagtcaacccgatgctcgtcagtgacttcggcggaaacactttgagaagaccaaagacagacaaaaaggatgctgtcaaattggcattgtatgcgcttacctactggctcgacttgaagcagtacgagccgcaggaagatctgcgcaaatctttgaaaatgctgaaccggcaataccagtttgcagtcaagcagcagaccatgctgaacaacaacctgatctcccagcttgacctgacctttcccggcatcaacaagctgtttacatcgcccgcaaaagagcaggatgggcatctgaaatgggtggatttcgtgtcggaattcccgcattgtgactgtgtcgcaaagctcacacccagcgttttcaagaagaagtactgccgctggtgcgagaaaagcggctatcattatcgcggttccaaagcagatgagatccatgcatttgcgagagaagcagttagtgcggttccggcttcagatgcgatcgctctgatcatcaaacaagctgcctccatactgaatgcggctctggaaaacgctgctgctctgcatcatgaaatgaagcacattgcagaaatgctcccggagtacgaaactgtcatgagcatgtatggcgttggtgacaagaccgggccgcagctcatggctgagatcggtgacacccgccgctttcatagccgccgtgcgatcacagcatattttggctatgacagtgaaaatgacgattccggtcaacatatatccaagtcaaatcccatcacaaagaaaggcaattcagcactgcggcgaacgctgttcatgatcatgatagctttgattcagaaccaacctgaagacaatcctgtgtatcagtttctcgacaagaaacgttccgaaggaaagcattactactgctacatgactgctgctgccaacaagtttttgcggatttattatgccaaggtcaatgaagttctgaatgcgcttccaacaggctgacatctattcatagattccgagccagaggcaaaacacaggcacggcgcagccgcttgaccttgacaggttatcataaaaatgctacaatggctgccgcgacggtgaccgacttcatctattcatgagttcctcaccgtcggcacgacaccagagcatttttatgatgttctgtcaaggttgccggtcggattgaactgcatttcgatttttcagaccgcttcggcggtcttattgtcgtacctgttttttcttttgtgaaagctatgtgaaactttcatattatcccttgacttttatttgcaggt

SEQ ID NO: 7779 - DNA, 1152 bp, unidentified
  source 1..1152: mol_type = unassigned DNA; note = element_c10804a
  misc_feature 1..2: note = core
  misc_feature 3..186: note = LE
  misc_feature 187..1137: note = CDS
  misc_feature 1138..1152: note = RE
  misc_feature 29..199: note = bridgeRNA
cttgtatgttttgtgttgctggacagtggttgtttgagtaggtttatgtctggcccggtgcggcagttcgaaactcccttgggacaccaagcccgtgggagagcgatgagcgtcgcaccggttttcatggataccccggacggttgcttgggcagataagcccgtatttttgcaaggttgggaatcatgaacgaaatgaatgcagaacagtttgttggtattgacgtgtcgaaagcgacgctggatggggcggtcgagcctcaaggtcaggtatggcaggtggcctacgatgccaaggggatcgatcagctggttttgcagttgcaagagatcgggccgaccttgatcgtcatcgaggccaccggcggtttggaaacccagattgcgtctgccttggcgggtaaggaattgccggtggcagtggtcaatccgcgccaggtgcgcgactttgccaaggccagtggccggctggccaagaccgatcgggtggatgccggggtgctggcggcgtttgcccgggccatccgtccccaggcgcgtccgctcaaggatgcggacacccgcgcgttggacgatctggtggaccggcggcggcagttgatcggcatccgggttcaagaggtcctccgattgaagggagccacgacgaaaccgctgcaaaccagtctgaaaaagcatatcgcctggctggacaagcagattgaccagaacgaccgggacctgacccggcggttgcgcgagtcggacgcctggcgggccaaggacgatctgctcaagagcattcccggcgtcggttcggtgaccattgtcacgttgctggcaaaatgcccggagctgggcaccctcaaccggcgcgagattgccgcgctggtcggcgtggcgccgatggccaacgacagtggccagtatcgcggcaagcgcttcatctggggcggtcgctccgaggttcgcgccgtgctatacatggccacgatctcggcgatacgctgtaatgcggtcatccgcgcctttgcagaacgcctcaaaaacgccggcaaaccgcccaaggtcgtcatcgtcgcctgcatgaggaagttgctcaccatcatgaatgccatgttgaaaaataataccccttggcagccacaaaacacttgactttaaacacggttg

SEQ ID NO: 7780 - DNA, 1594 bp, unidentified
  source 1..1594: mol_type = unassigned DNA; note = element_c10a174
  misc_feature 1..5: note = core
  misc_feature 6..512: note = LE
  misc_feature 513..1463: note = CDS
  misc_feature 1464..1594: note = RE
  misc_feature 35..279: note = bridgeRNA
tttttagtaccataaaagtgtagttgttagagagtaattacctctgacatctgcacttatttttttataataagggtggtaattggtatggcgaggggccttttggattattacatccgacaacgaaaactgtcagccaaccccttattataagtattcgcttaagcagttagggataagctcccgtgtaaccaactaaaatgaatggtaataagtgtgggtggtaaacaattactaattcaagtataggaggttatatatgatcagcgtaggtattgatgtttcaaagggaaagagtacagtgtgcatattgaaaccttatggggagattgtcgcaagcccatttgaggcaaggcacacagagagtgagcttaaggatctgattcaaatgattcaacggctggacggagaaaaacgtatagttatggaggcaaccggcatatatcatttgccgatgttgtcatcacttcaggatcagaaacttttttgtagctgtaattaatccgtttgaaatgaaggagtatgcatccagagggcttagaagggtaaagaccgataagcaggattcaatcactatcgcgaactatggaattgataactggtatcgcttggaaaaccatcaaggaagtgatgccgtgtacgccgagttaaaactcttgggaagacagtattgccattacatggagcttcacgtaaagacactgcttgaattaacgcatatgttggattatacaatgccagaagtaaagaagatgtttcgtagttggaatgaaagtagcggaaaggacaagttaagtgattttgtagaaagatactggcattttgataacataactgcgatgacaaaggatgagtttattgaggattatgtttcatgggcggcggaaaagaaataccaccagaaccgatcaaaagcagctgagctatatgaccttgcatctgatggtatctcgacattgcctgccaataccccatcgaccaaaatgctggtattggaagcggtaagggtacttcgagaaatcgacagtaccttactgaagataataacacgaatgaaagaactggcaaagacacttcctgaatatgaaactgtacgagcgatgggaggcgttggcgatgttttggctcctaaactgattgcggagataggcgatataagaagatttcatagtggtaaggcactgattgcatttgcaggtatagatgcaccgccatatgaatccggccaatttgtgggtaccaatcgaacgataagtaaacgtggctcaaaggtgctgcgtaagattggttatgagaccatgagagtcttaaaaacgcacaaagctccagaggatgatgcggtataccggtttattctgaagaaagaagccgaaggaaaatcgaaacgccaggctaagatagcaggactgaataagttcctgagaatttactatgctcgtgtaagcgaagtttacaaagcataaaaaagtagataatacagcttattattggctgatgaaagtcagcctttttagtgtgcacaaaaataataagaatagggctaaaagaaaaacctgcttggaaaagtaatttacgcttgacttttcttagcagg

SEQ ID NO: 7781 - DNA, 1650 bp, unidentified
  source 1..1650: mol_type = unassigned DNA; note = element_c115827
  misc_feature 1..2: note = core
  misc_feature 3..299: note = LE
  misc_feature 300..1487: note = CDS
  misc_feature 1488..1650: note = RE
  misc_feature 60..274: note = bridgeRNA
ctggtatattataaataacttatttagttagtcatccatagtacaccttctcctttctatcaaccttatttatccgtggttgattacggtttagatttactataaaattgaatatcgtgaatgtggatttgtattttttatcctgtggctttgactacttcgaggaggatcttaccacaccttattcctaaacaatgatgagttagatgagtcttgaattcctattttgaaccaggttttgtggtctaagtgttgtggataccatttcacatattcttaaacaagaaaggatgttttttatgaaattagttggtattgatattggtaagaataaacacttcttttgtgttatggataaagatactgctgaacttttagttaagcctgtttctttccctaataataaagaaggctttgagtttcttatcaataaacttaaaccttattctaaaaactcaattttaatcggtatggaagatactggtcattatcattttgctttattaaagtatctattggacaaacaatttactgtcgctttaatgaatcctaaaaccactgattttactcgtaaaatgcaaggtagtattaccaaaaatgataaacttgatactttaacgatttgtgatgtccttgatacccctgaacgcaagaaacaatatcgcatcactaaaataaatagctttgatctctatgaacaaaaacaattgaccagacatcatcacaacttaaaagaagagctaaatgtttatggtaatcgtcttcaaaaatgtattgatatcgttttccctgaattcaatagcttatttaaatctaaatatggcactgtttacatgaatcttcttagaacatttggtggttgcgctgaaacaatcgccaatactgacataagaacgattcgtaaatgcttcgaaatcaaagctagagggaagcgtatctctttaacacctgagcagttaaaagaatgtgctaaatcttctattggtatttcttctatggctgaagttattcaaatcaagcatttgattaatcaaatagaactcatcaataagcaaattactgagatagataaaaaaatagaagagttctccgtgaaaaacaactctcctatcttatccataccaggaatttctcatttctctggtacttctattttagccgaattaggagatataagcaactatgaaaaaccttctcaaatcataaaatttgcaggagtcgctccaatacattatgaatccagtcaatttactgcacaacatagtgctatcactaagaaaggatccaaatatctgagaaagaccttatatcagattatattgtctgtgattcatcataatcctatatttaaacaatattatgaattaaagatttcccagggcaagggtcatcgttgtgctcaaggtcattgtgtaagaaaattgcttagaatcatttatcatctattaagtactggtcaaaaatttgatccagcacttttaagataaccatacaattttttaaaattcctttttaaaggttgtttttgtcatgtccaaaatcacatataaatattcaattttcaaaattctatattggttaactcataaaatcaacaattttaatattttcaaactttttcataaaaactcttgatttttatatagttag

SEQ ID NO: 7782 - DNA, 1327 bp, unidentified
  source 1..1327: mol_type = unassigned DNA; note = element_c11e491
  misc_feature 1..3: note = core
  misc_feature 4..74: note = LE
  misc_feature 75..1109: note = CDS
  misc_feature 1110..1327: note = RE
  misc_feature 1094..1308: note = bridgeRNA
agatgtatggactctctcccttcggggatctacattgaagtttcataacagcagtgacagtcaggggccatattatggaaaaagacaacattattgcgattgacctagccaaaagtgttttccaagtttgtaaggttagccctagaggtaaaatcatttataaccgggaagtatcaagaaaacgattaaaagagcttttagtaaaggaaacgaagtctttggttgcgatggaagcctgcgctactgcacattattgggctcgttatgctgaacgtgctggccatcaagtaaaggtcatcaatgctagaattgttaagggatttcaaacaaaacagaaaaccgataaaaatgatgccattgcgatagcaacagctgcgcccctagaacacatccaaagtatacgtattcattcggtggaagagcaggcaatgcaatcaacagaacgagcaagaaatttagcgcttactcatgtgattgctcagagtaaccagatacgtggtttgttattagagtttggaattgttattccacaaggcattaattctttacgtcgaaacctccctatgattttagaagacgctgaaaatgatttgccagatagttttagacaaattgttatgagtttatgggagcatttagaagtccagatagaacatgccgacgcaataacttcttctttgaaagggactattgaatcaaatcaagtgtgccaaaagttaatgaaacttgaaggtgtaggccctattggtgctttaggtttgtctttgagattaggcaagggcgagcactactctaatgggcgtaatgcagcggctagtataggattaacaccaaagcagcatagttctggtggaaaagaaaacattgggcatatttctaaacaatgtgcagataagcgactccgagccacgttatatcaaggggcgctttctgttgttagtttggttattaatcgtccacctaaaacaaataaagagcaatggcttaaggctttgatagctagaagaggaaagaaagtagcagcaatagccctagcaaacaaaactgttcgaaccgcttatgctatcttgaagtctgattcagaatacgagccacaagtcatagtttaaaggtgtccagtcaacaaagatcgacagtaaaacaggtaagaccaaccaatagaagtcagctcggttctagggtaataaaataccgtccctaagattttgacctattggtgcgattacattttagggcgaggtagctcctcatagtagcccgtatataagaacgcatctaacatgttttactagagatatttgattgacgacagccgagagtccatata

SEQ ID NO: 7783 - DNA, 1618 bp, unidentified
  source 1..1618: mol_type = unassigned DNA; note = element_c1216b8
  misc_feature 1..3: note = core
  misc_feature 4..425: note = LE
  misc_feature 426..1454: note = CDS
  misc_feature 1455..1618: note = RE
  misc_feature 8..224: note = bridgeRNA
gttcgtaatataaggttagccagatatttctggttgaccttttaattttgggtcttattatataacggtagtcggggtagaacgtcgcacccgtgggttaaatcccgtcaactaaactgttcaccccctacttgtataaacatgtttcaggctggttgggacaaagatcccgtttaacaagcgaacctatgacattacaagaagccttaggggataccgacaaattgagttttaggaggagaaaagcatgaatccagttcattggcctggatgtatcaaaaggagagagtcaggttcaagcatttttagacaaaggcaaaccgtatcgtaagagctttagtatcaagcacaataccgatggtttaggtagtttattagagttccttcatgaagtagaaagttcagctggtggtcatcagccaacggtggttttagaatcaacaggacattaccattttcctgtcattcaatttcttgaggagcaaagttttgtttatattgttgtcaatcctcttatctcccatcgagccaaaagttcgagtttgcggaaggtaaaaacagatgcaattgatgcttaccacctttgcgagctgttttataaagaagagttagagccttataaaaaaagaggaattcaacttttaaatcttcgtaatctaacaagacaacaagaaagtattgccgaagtatcagcacagactaaaatacagctgcatacccttttggatcaggtatttcctgaatatagaggagtttttggaagtttatattccaaagtctcattgcttacattattagcatttcctacttcagaagtagtgttaagtgtgagtgaaagagaaataacagagaaaatagcttcgctatgtatgagtcgttcagatgcatgggcaaacgaaaaggctaaaaaattaagggaagcagcccttcgtaatccgtttcaaaacaaactctaccagagtaatatttttaatctagagttattagtcaagatcgttcttcaataccaagagcatctatctaaaattgcagttgaaatagatgccctcgctaaagaaattgaagaatattatatacatcaatctatccctggaattggagagaaaatcgccgccacgattatttccgaaattggtgagatagatcggttcaatgatgccaaaaagctcgttgcattcgctggagtggatcctagtgtttgctcttctggtaagtttaccgcatcagtaaatcgaatcaccaaacgatgttctagcaggcttcgtcatgccttgtatatggctgtacaaagtggtattcgtgatgctcgtaaaaagaaaacaactggtgaaatcatcgcacgcaataaaaaattaagggagttttacgataagaaacgtgaagaaggaaaaccctttagagtacagttattgcatgtgttaataagctcttacattggatttttgccttactaaaaagcagaactattttccaagatacaccttaaaaactatatctaactaaatacaacaaaaccttccaaataaaacatagaggaaggttatttggcatgaacatttttagtatatcatgacgttattaatcattttattgaaaaatgttgacaaactattagctg

SEQ ID NO: 7784 - DNA, 1686 bp, unidentified
  source 1..1686: mol_type = unassigned DNA; note = element_c12ac7b
  misc_feature 1: note = core
  misc_feature 2..340: note = LE
  misc_feature 341..1549: note = CDS
  misc_feature 1550..1686: note = RE
  misc_feature 66..304: note = bridgeRNA
cattacgttattagcagttccgcttaagggagcccaggattcgtaactctgcccctgtgcaggggacaggttatgtttgtctgcgttcctttttgcttttctttttcaggagcagtggaactagtcgctggcttcggtatggcttattttcgtccctgtctgataatgatccggggggtgatgccgccgaaggcagtgacatactccaaactgctaataggaacctgacccacatcaagtgtgtgaggtctcaaagtaatgtggatgccagcgtgaagtatgtccgaccaccagcgatgaaagaagtctcatactcattcaactcgctaggaggtctgacatggcctacgactatgtcatcggaatggatggtggaaaatacttccaccacgcttgcgtcttagatagccacggcgcccaggtcctgtccaaacgaatcaatcaaaacgagcagtccttacgcgcgctcttttcgaatttctgctctggtaacaacaaggtccttgtcgttgttgaccagccaaataacattggtcggcttactgtcgcggtagcccaagaccttggaattgatgtacgctatcttcctggcttggcaatgcgtcagctctcacgcatccatgcaggaaacgccaaaacggatatccgagatgcctatatcattgcccatgctggaaagaacctgccagagtcccttcgcagtgtcgaccgcgttgaaaaggctttctgtcagcttaaagtcctcaatggcatcgacgaagacctagcacgctcatacactaggctgatcaatcagattcgaagtgcacttgttggttgctacccgcaattcgagcaggccattcgcggccaaataatccaccgtaaatgggtccttcatctgcttgcccgctacggcgggccaacgaaaatcaaacgccttggtaaagcaaaaactatagctttcgcccgccgccataaagcgcgtaatcccgagccagttatcgatgcaatattcgctgccattgccgaacaaacagtatccattgccggtgcacactatgcagaaatgggcgtggcaatgtcagcaaaagacgcacttgccaagcttgatcaccgcaaggaaatcgaaaaggaagtcatcgacctcatcgacgacattccccacacacaaatcctgctatccatgccaggaatcggcccgaaaacagcagcacaaatcctcatgaccgtcggggatatgtccgactttccaacacctggacacttggcctcatatgctgagctatcgcctcggacaaaccagtcaggcacttcaataatgtcgaactcactaaaccgaacaggcaataaaaaattaaagaacgccctatggcaatcatcttttgcatccattagattccacgagcgttcacggcaattttatgaacgaaaacgtaaagaagccaagcgacacaacgccgcagtcgtagcacttgcccgcagacgaatcaacgtcctctacgccatgatgcgcaaccacgagtattaccgcgaccccgccccagcaaaggaagccgcaacagcctaacccctaacaacgaaacaagccggctggaaaaatcccagtcggctaccagtcgcgcaaaaacaacacacctaaaaatcccgagttagggatccgccccgtccaccccacccacgagattgacaaactatataggaaca

SEQ ID NO: 7785 - DNA, 1507 bp, unidentified
  source 1..1507: mol_type = unassigned DNA; note = element_c1382e0
  misc_feature 1..2: note = core
  misc_feature 3..275: note = LE
  misc_feature 276..1487: note = CDS
  misc_feature 1488..1507: note = RE
  misc_feature 7..222: note = bridgeRNA
ctaataggggcagagccgccaagatggtgcggttcgtccgagcctccggtgggtgagcactgacagatgcagagcgtcggagctctacgcctagacggtgcccccgtcggcaggtgaggagaggtggacgaccggtgggatgttgtgccttgagcactgctctattagctcgtcgctgctctccttcggctcggtatccgcgcgtgccaccgaggagatgccgatggtctttgtaggaatgctcggtatccgcgcgtgccaccgaggagatgccgatggtctttgtaggaatcgactgggccgaagcccaccacgacatatgcgtggtcgatgacgatgggcaagtactcgcaaagcgaagagttcccgaagggatcgagggagtgggcaagctgcacgccctcatcgccgaacacgctgaagatcctgcgggggtggtcgttggcatcgaaaccgaccgtgggttgctcgtcggctctttggtggccgccggctacaaggtctatgcgatcaatccgttggcatcgagccgctatcgagaccgccatgccacctcgggcgcgaagtccgacccaggggatgctcgggtcctggccgacctcgtccgcactgaccgtcacaaacaccgggtgctggccggagactccaaccttgctggggcggtccagatcctggccagagctcatcagggtctggtctggactcgacagcgccaggtcaaccagcttcgcaatgcgctccgtgagttctatcccggagccctgagcgcgttcgaggacctggacgcatccgatgcgcttgccatcttggagcgagccccgaccccgatccggggccgtgccctttcccaggcaaagatcatctctgctctccgcgagggaggccgggagcgaaatctggaggcgaaggcggctcagatccaagcccagctgcggttgcctcagctggaggcgccgacccttctcgccgaagcctatggtcacagcgtcgccgccaccgtggctgtcatcaaacagctcaacctgcagattgcagccctcgagcaggagctggcttcgagttttgagacgcacccggacgccgagatctacctcagtctgcctggactcggtgttgtcctcggcgcccgggctatggccgagttcggtgacgaccggacccgatttctgcatcctaaggctcgcaagagctatgcgggtaccgcgccgatcacgagggcctcgggcactcgcaaggtcgtactcgccagggttgcccggaaccgccggctcgccgacgcctgctatcagtgggcgttctccgcgctcactcgctccgaaggcgcacggcatcgatacgacgtcctgcgcgcccgcggccagacccaccatcaagctctgcgcgctttggccaatcgtctggtgggcatcctgcacggctgcctcgtcaaacgccagccctacagcgagcacatcgcatggtcggctcttgtggaggttgccgcttgacttttccagccgtgggatgt

SEQ ID NO: 7786 - DNA, 1373 bp, unidentified
  source 1..1373: mol_type = unassigned DNA; note = element_c154397
  misc_feature 1: note = core
  misc_feature 2..88: note = LE
  misc_feature 89..1003: note = CDS
  misc_feature 1004..1373: note = RE
  misc_feature 1142..1367: note = bridgeRNA
gaatgatatggactcctcactcggcatccatcgctagcgaatgtgccatagtgaagttgataagaagcttcaaatgaggagagtccatatgtccttaattaaagtcgttggcatcgatttagccaagttagtttttagtattcacggaattaacgagcatgacaagtgtaaattacgtaaaactgtcaaaagaaacaaactgttagctgaggttgctaagttgccgccttgcataataggaatagaagcgtgctctggagcacattactgggcaagagaatttactgaactcggtcatgaggtccgtatcatggcttctaaattcgttatcccgtatcgacaaaacgagaaaaatgatgccaacgatgcagaagccatttgtgaagcagccacaagaccaaagacacgttttgtcagtataaaaagtgaagagcaacaagccgtgttgtgttcacatcgcatcaggcaaggcgcaatcaaagataaaaccgcacgtatcaatccattacgaggcttattatctgaatttggtattatcatgcccaaaggccgttaccctgcacaaaaagctattagcggcattctcgaagatgcagaaaataacttacctttccttgcaagggaattactaaatgacctgtggcaaagcattagaggcttgaacgatgaaatcctaaaatacgacagaaaactctatgccttagccaatcaaatgaaagacgcaaaacgcttaatgagtattcctggcattggtgaaatcaccgcaattgctgttgtggctacagtaaatgatgctaagcactttgaaacgagtcgctcctttgctgcttggataggtttagtaccaaggcagtattcaacaggcggtgttgttcggttaggcaggattagtaaacgcggtgaaaaacatattcgcacctcacttattcatggcgcacgagccgttattgcaaactgtaaaaaaaacagaccggacaagtctatgggtaaaagaccttgttgagcgacgagggtttaaacgagcgactgttgccttagccgctaagaacgcccgattaatttgggcactgttacactcagaaaaagaatatcaggtagattatgtaaagtaagttgacgtacaaaggttaattaaacggttaaccccaccgggtcgcagtaatagcaattgacgataacacggtcagaccgagagtaagaaagcctgtttaatcgggaagtgttgataacactgtttaacgaatgaggcattgctcaagcgcaaatcatcagggcgatagcgtaacaaagctaattaaacgccgaatgtagagctgctgtcagatcttcttgttagagaaaatgctattgcttgacaacggggagtccatgta

SEQ ID NO: 7787 - DNA, 1363 bp, unidentified
  source 1..1363: mol_type = unassigned DNA; note = element_c157bf4
  misc_feature 1..2: note = core
  misc_feature 3..89: note = LE
  misc_feature 90..1088: note = CDS
  misc_feature 1089..1363: note = RE
  misc_feature 1117..1322: note = bridgeRNA
gaatgtaagggacttccccgtcccgaaatgacaccgaggtgtcaggattgagttgcgaaatcgatccaccttcgaaaaggggaagtcccatgaacctagtttctacgcttggaatcgacttggcaaagagcctgttttcggtgcacggagttaattcaaacggggaagtggtgctgcggcgcagcctgtcccgggcgaagctcagtgagctggtggcgcagttgccggcgtgcctgatcgggatggaggcctgctccggagcccacgagtgggcacggcgcttcttggcatccgggcatacggtaaagctgatggcaccgaagttcgtgacgccgtatcgcaagagcggtaagaacgatggcaacgatgcggaggcgatttgtgaggcggtggcacggcccaacatgcgcttcgtgccggtgaagtcgctcgagcaacagtcggacctgagcctgcaccgggtacgcgtgggctttgtcgaggagcgcaccgcgacgctgaaccggctgcgtgggttgcttgcagagttcgggcatgtgctgccgctgcgcgccgtggaggtgcaccggcgggtgccattgctgttggagaaactgccggcacgggttgccgcctgcgcgcgagacctcctggagcacgcggcacggcttgcagccaagacccagcagtacgaacacgagatcagagcgcacgtgcgctccaacgcgctcgcagcgcgcacgcagacccggacgggcatcggaccgatcaccgcttctgcgctggtagccaccgttggcaacggccgtgacttcaagaacggtcggcagttcgccgcctggcttggcctggttccccgccagtactccaccggcggcaagacgcgcctcggacacatcaccaagcgcggagatgcgtacttaagaacgctactggtcatgggagctcgcgccgtgctgcaacgcgccgccagcctcacagatccgttctcgctgtgggccatggcgctgcgcgagcgtcgcggctatcaccgcgcttgcgtcgctatagcggccaagaacgcccgcgtcgcgtgggcgctgctctccaaagagccaactgcgacctgagcagactcaacggcatcctctaacaggagatataacaagcactgcacttgcacagcaaacaggtcagaccggcgctcgcggaaccagatcaagctacgagcggaaaacgctgcctaacgatcgaggcgcgagcgcgcggcttacacgcgggcccgagtgcacagcactcatcagcggccgattagagttacgcagtctgtccttcctgctcgagcgaccagcagtcaaagaatcagaactacacccactgttgacacaacggggaagtccttaga

SEQ ID NO: 7788 - DNA, 1556 bp, unidentified
  source 1..1556: mol_type = unassigned DNA; note = element_c160a51
  misc_feature 1: note = core
  misc_feature 2..72: note = LE
  misc_feature 73..1137: note = CDS
  misc_feature 1138..1556: note = RE
  misc_feature 1320..1547: note = bridgeRNA
taatggaatggtccggtcgtgctcctacacttccagcgcgtgacgctggaggggttgcgaaggagcaccgccatgtccaacaaatccacttcgatcgttgccacgatgggcatcgacattggcaagaactcattccacgttgtcggcctcgatgagcacggcgcgattgtgctacggcagaaatggtcgcgcagccagatcgaggtacggctggccaacatgccgccctgcctggtcggcatggaggcctgcgtcggcgcgcatcacctgagccgcaagctgcaatcgcaaggtcacgacgcacgactgatgccggcgaagtacgtgcgcccgtattcgaagggacagaagaacgacttccgtgacgcggaggccatcgccgaggcggtgcagcgtccgacgatgaaattcgtcgccaccaagacggcggagcagctcgatttgcaggcgctgcaccgggtgcgcgaacggctggtcagccagcgcaccggcatcatcaaccagatccgcgccttcctgcttgagcgaggactagcggtacgccagggcttacgcttcctgcggacggaattgccgatcatccttgccaagcgcactgacgtgctgtcgccgcgcatgatgcgcatcatcgaggacctggccggcgactggcgtcggctcgacgagcggattgagggcctgtctgctgagatcaccgcattggctcgccaggatgcggcctgcgcgcggctgatgacggtacccggtattggaccgatcatctcgagcgccatggttgctgcgatcggcaatggtggggcgttctcgaaagggcgcgacttcggtgcctggctcggcttggtgcccaagcaaatctcgacgggagaccgcacgatccttgggaagacatcgaggcagggcaatcgctacctgcgcgtcctgttcgtgcaggcggcgtgggtggtgctggtcaagataacggactgggaccgctacggcctcaaaacctggatcgaagccgccaagaaacggatgcatcacaacgtgctggcgatcgcgctcgccaacaagctcgcgcgcatcgcctgggccgttctcaacaaggagcgcaacttcgaatgcgtgcggacagctgcaacgtcatcccgacctgcctgagcctggcaccgtgctcggggccgtcaaggccaaaccctgcgggtggccgcaagagcggccagccttgacagcccctgcgcgcggcgccctgcacgctgagcaggccgggatgaaggaacggctcacggcacaaacaaaggaactgctacggataaggagaaagcgatgacatagtcccgttttcctgccgaggtctgcgagaggataagacgagatggaggaccggtctttccggcgcatgcaaaccctggtgacccaaatggctcgttcgaggcctggccggtaatgagaccgcatgcgcgctgacatccatgatggcccggagcaaccgctccaatcagaggccggatacattgatgcaagaccgctatgccgacagatcgacgaaattctcttgcgacgcacggccggaccataca

SEQ ID NO: 7789 - DNA, 1369 bp, unidentified
  source 1..1369: mol_type = unassigned DNA; note = element_c16d787
  misc_feature 1..2: note = core
  misc_feature 3..83: note = LE
  misc_feature 84..842: note = CDS
  misc_feature 843..1369: note = RE
  misc_feature 1128..1364: note = bridgeRNA
cgatgtaatggacacctcccaccttacggcatcaatgtgccagactgaggtgttaacttcagttcccagggggaggtgtccacatgaatattaaacgtattggcctcgatctcgcaaaacaggtttttcagcttcatgcggttgatcaccaggaacgtgttgtgcttcgcaaaaccctgcatcgcgcccggatgctcacctttttcacccggctcgaaccctgtcttattggtatcgaagcatgcggctcctcgcattactgggcacgcgagctgacacgactcggtcacacggttcgcattattccgcctcagttcgttaagccttatctgaagggcaataaaaatgatgccaatgatgccgaagcgatctgcgaggccgtcagccggccggggatgcgctatgttgccattaagtctgaagcacagcagagcatgcaggctgaacaccgggttcgtgcccgcctgatccacgacagaacagcgctcagcaacgaaatacgcgggatgctgggtgaatttggctttgtacttcccgctgggttgtccgctctccgtaaagcactgccggaaatactttctcagcaggaaaaatgggataaccgctttatccgtctgctgagtgagttaacagaagaacttcaggcacttgatgagcgactgaatcgttatgaccgccggcttaaacagctggcgcaggaagatgagcgtatcagacgacttcaggagatcggcgggattggtccggtaaccgccagcgccctggtcgccgcagtgggtgatgcaaaacagtttaagagcgggcgggagatggcagcctggctggggctggtgccccggtaacattcgagcggcggaaaaacaaaaatgggtcacatcagcaaaaggggcgacagctacctgcgaacgctgctgatccacggtgcccgtgcggtgctgaatgcgtgtgatcacaaggaggaccggcgaagccggtggcttcagtcggtggcagaaagacgtaacaggaatatcgcaacggtcgccatggcgaacaaaaatgcacgtatagcctggtcggtactgagccggggggaagagtatcgtgtgatgtgatacagacctgactgaatgtcagagaagcgtcatcctgtcgtgagattgcggagtcattaagcagtgatgtgtaacaggtaagaccgacacctgaaaactccggtttacccgaaggctccctgcgaagcaaagccgttaggccgaatggaaccaggtgtgcagataacatcatggccgggtacgacggtaccgaaagagaggccggatatacgaaagcatcttactcccgttacacaaaatgcagaatggcttgcataacgggagatgtccatata

SEQ ID NO: 7790 - DNA, 1166 bp, unidentified
  source 1..1166: mol_type = unassigned DNA; note = element_c170742
  misc_feature 1..2: note = core
  misc_feature 3..200: note = LE
  misc_feature 201..1163: note = CDS
  misc_feature 1164..1166: note = RE
  misc_feature 3..176: note = bridgeRNA
cttgtatgtttagacttgtaggggtggtgggactaaaagccagcatctgactctagccagtacagaccgtgggagacttcgccccaccccttcaccaaagcgccgataaggaatgcatcggccatgaccgacgatagaagcaagccagcgcaatggtgaagccccgacaagcctttaaaccctaacccggagctttctttgtggcaatgagtgtctcgcgttctgtagtcggagtggatgtcgccaaggtagaagtggtggtctatcagagcgacacggatcggctgttgcccgtgtcaaacgataaaccgtctcttacaaagtggctgaaaacgttacctgcaaacagcgccatcgctattgaagccaccaatatctatcacctggatacggttgagctggctcatgcaatgggacatatcgtctatgtcatcgacggtttccgtttgagtaactaccgcaaaggagtgggtggccgcgccaaaacagatgccagcgacgcccgtttactggcgcgttacttgaagaacgaagaggaagagctacgtccctggagcccgccgccgaaggtctataccaagcttcaaagcctgcttcgaagacgagcgacattggtccaagcgcgagtcagcctgactcaaagctggaacgacgaaccgctgctgaaagcggcattcaaacaacagatcgctgccatgggccgattggatttactcatccagaagaagctgttggacgtcgtaaaagaggcaggtctgctggagcaagtcaaacgctgccaggccgtagagggggtcggttttcttaccgccaccgcactgacgatggcatttcaacgcggcgacttcgccagtggtgacgcctatatcgcgtttcttggaatggatttgagagtctctgattcggggcagatgaacggacgtcgaaagctgaccaagaaaggtgactcagaaatacggcgtctgctgcataacgccgcgatggctgccagtcgctcgaagacctggaagccgttttacgaacgctatctggagcgaggattaaagacgactcaagtgctggtcatcctggctcgcaagctggcacgcgtggcattcgccctgatgaagaaccagagcaaatatcagccaaatccagtttttggggcttccccccaaacatagaat

SEQ ID NO: 7791 - DNA, 1433 bp, unidentified
  source 1..1433: mol_type = unassigned DNA; note = element_c171558
  misc_feature 1..2: note = core
  misc_feature 3..143: note = LE
  misc_feature 144..1163: note = CDS
  misc_feature 1164..1433: note = RE
  misc_feature 1202..1433: note = bridgeRNA
aaatgtaatgaacacatcccccattaagcgaggagaactgtgatggatgaaggtaaatggaggtgtggagcctcgcagatttccggcatcattgtgcccaatacgggatgcataaagctccctcagactggagactccacagcatgaaatatataccggttggcgtagatatcgcaaagcatctgattcaggttcacttcatcaatgagcactccggggaagtggttgataagcagcttcgtagaaaggattttctgacgttcttcagcaaccgggaacccagcctgattggcatggaggcctgtggaggctcacagcactgggcacgtgaactggaaaagctggggcacaaagtccggctgatgcagggacggttcgtcaaggccttcgtcatgggcaacaaaaatgacgtgatggacgcccgcgctatctggatggcggtacagcaacccggtaaagaaatcgctgtcaagacagaagaacagcagtcggtactggttctgcatcgttctcgccggcaactggtgaagttccggacggcgcagattaatgccctgcatggcacgctactcgagtttggcgaaaccctccataaaggccgggcaacactggacagagagttaccggctgttctggaacggatgaagacgagactaccgccgtatctcattactgtgctggaagaccagcacaacaggctgagtgagctggactcgttgatagatggatttgagaaacagcttcacagcgtggcgcggcagaatgaaacctgtaagcggctgatggaaatccccggcgtggggccgttaatcgccacagcagcaattgccaccatgggcgaagctctggcgtttaaatccgggcgagagttcgcggcttatgtcggtctggtgccaaagcagaccggatcaggaggaaaagtccgcctgctggggataagtaaacggggtgatacgtacctgcgaaccctgtttatccatggagccagggcatcagccttactggctaaagaaccaggcccatggataacagagctgaaaaaacgacgtccggccagcgtagccatcgtggcgatggccaacaagctggcgcgaacggtgtgggcaatcgccgcccataaccgtcagtacgacaaaaatcatgtcagtatcaggcccttttaatctttgatactgataaatattaactcttaacaaaagggtgaatgctgaaaggttgctatggcggccagcgtgatgacaacgacaggtaagaccgggactcacgaaacctgaatggggtattgggcttaaagcccgcggaggaaatgaggtgtgagtcggcgaattacatagaggctcgcagcatcaggctgcaagaaagccggatataaagctgcaacctaccgtcaatgtcaaaacaatggatgccttgcaaacgggatgtgttcatat

SEQ ID NO: 7792 - DNA, 1372 bp, unidentified
  source 1..1372: mol_type = unassigned DNA; note = element_c17253d
  misc_feature 1: note = core
  misc_feature 2..69: note = LE
  misc_feature 70..1095: note = CDS
  misc_feature 1096..1372: note = RE
  misc_feature 1134..1369: note = bridgeRNA
tactgagatggacccgacgccaccttcgagggacacttatgcactcaccctgaggtgtggaggctcatcatggaaatcgacgttctcggcattgatctcgcgaagcaaatcttccagctccacggcgctgatcggcgtggtcatgttgtgcatcgggcgaaggtttcgcggagttcattcttcgaatccgtgcgcgcgttaaatcccaaggtggtcgtcatggaagcgtgcggcaccgcgcaccactgggcgaggcgtttccagtcgcttggtatcgaagtccggttgatcagcccgcaatatgtcgcaccgttcgtcaagacgaacaagaacgaccgcaacgacgcggaagcgatcgtcgaggctgccagccgacccacgatgcgcttcgtgacgatcaagtcagtcgaacaacaagacatccaggctgcacaccgcatgcgcgctgtcatgctgcgtcatcgtactgcgctgatcaaccagatgcgtggcttactcggcgaacgtgggttggcgatttcgcgctcaccggaagctttcaagcgggcgatgccggaaattctgcacacgagcgcagatgaactgacttcgttttgccagaccctgctcaccgaacttctgcagcacctgagcgccattgaagaacgtgttcgcctcatcgaggcatccattcaatcgttcatgaagaaatccacgctctgcaagaagatcgccgagatccccggcattggtccgattaccgccacggccgttgttgccgcggtcggcgacgctaggcagtttcgcaacggccggcatctgtccgcctggctaggactcgtgcctcgacagtattcgtctggcggcaagccacgcttgcatggcattagccgccgcggcgacacatacttgcggaccttgctgattcatggcgcgcgggctgtgctgcgctatgctccaactaaaactgatccccagagcgtctggcttcaacacctcatggctcgacgcgggcataactgcgcggcggtcgcactggccaacaagaacgcgcgaatcattcaggcattgctcagcagcgatgcgacctacataacccgaaccgcgaccgcataatcccaaaacccgcttacaaggaggccaacacccgcacactggtttgcgaagcttctcaaagtgatgacgagataggttgaaccagcatcccgaagcctgtttttcgtgccggctgccactcgtggcgagccgcgattttgctaaggacgggatgcgcggatctcatcgaggctgcgggcgtgcttcggcatctgcccatctggcaagccgtatacatgcatgcagaccgttttgacatcacgaacaagaagcttgcaaaaggcgtcgggtccataca

SEQ ID NO: 7793 - DNA, 1379 bp, unidentified
  source 1..1379: mol_type = unassigned DNA; note = element_c174885
  misc_feature 1..2: note = core
  misc_feature 3..86: note = LE
  misc_feature 87..1118: note = CDS
  misc_feature 1119..1379: note = RE
  misc_feature 1148..1367: note = bridgeRNA
tgatgctgtggacggctcctccaccggcacgtaagtgccacggaccgtggtcgccaagggggtgacctgattcggaggactgggccatgcacgctgtcacgacgattggtctcgacatcgcaaagtcgatttttcaagtccatggcgttgacgccgaaggcaatgtggtcgtccggcgcaagctgaagcgccgttacatcgttgccttcttccagaagctgccgccgtgtctcgttggtatcgaggcctgcgcgtcatctcattattggtcgcgcgagctccaggcgcttgggcataccgtgcgcctgatgccaccagcctatgtcaggccgtacgtgaagcggcacaagaatgatgccgctgatgccgaggcaatctgtgaagcagtgaccaggaccaacatgcggttcgtggcgacgaagacgcccgagcagcagagctgcctgatgctccatcgcacgcggcacctgttcattcggcagcagactgcagtgatcaatgcgacccgcgctcaccttgccgagttcggcatcgtcgcgccggtcggacgcaatggtgtcgaggaactgctcaatgtcgtcgccgattccactgacaaacgcgtaccggagattgcgcgggcgtgtctcgccgcacttggcgcccaactgcggatgctgaagacccaggtcttggagttcgatcgcctcatcatggcctggcaccgatccaatgagacaagcaagcggctcgatgagatcccgggcgtcggtccagcgctagccacagctctagtcgccagcgtcggtgatccgagggctttccgatcggggcgggacttctcggcttggatcgggctcgtgcccaagcagaactcgagcgggggcaaggaaaagctcggcaacatcagcaaacgaggcgatcggtatcttcgcagcctattcacgatcggggcgctggccgtgatccgctatgccaaactccatggcgctaagcatcggccttggctcacggcgctgttggcgcggcggccgaccaaggtggccgcaatcgcgcttgccaacaagatcgcgcgaatggcttgggccatgatggcaaagggtgagcgctacaaggaacccgtcgcgctcgccatgtgaccgagatcgcgccgatcaccggcgtgatgtgaaggttgggagggcgaacagcacgtaatgcagagccggtcgatccggcgatcaggacaacccatatgtgccagcgcatggtcgaatgcggggttatgaccgggacctgatccgcggagggcattatggccagcggtcatgcgaaccgcgctaacaggccgaacacatggctgcaccgaccaacccctgctacgtgaagattctccttgccaactcggagccgtccacaca

SEQ ID NO: 7794 - DNA, 1336 bp, unidentified
  source 1..1336: mol_type = unassigned DNA; note = element_c1769f6
  misc_feature 1..2: note = core
  misc_feature 3..77: note = LE
  misc_feature 78..1094: note = CDS
  misc_feature 1095..1336: note = RE
  misc_feature 1073..1325: note = bridgeRNA
tgttggggtggacggcccaacggcatcgaatgtgccaatatggggtcgaacaaccaacccaatgaaagggccgcccaatggaatttaaacgcatctccatcgacacgtctaagcatgtttttacgatccacggggttgatgaccaagagcgcccggtattgcggcgcgacctcaggcgcgcgcaggtcgaaccgttcttcgccaaactggcaccaacggaagtggctctcgaagcttgtgctggatcgcaccattgggggcggctgctccgcggtatgggccaccgggtgaggttgattccgccacaatacgtgaagccgttcgtcaagcggagcaagaacgaccgcaacgatgcggaagcgataagtgaagcagcatcacgtccgacgatgcgcacagtttcggtcaaatcggcagaagagcaagccgcgacaatcattgtgaagcatcgggagctcatggtgaaccaacggacccaggcgatcaatgcgttacgcgggcacgcggcagaattcggtatcattgccgcccagggctgcgggaacgtgactgcattgctcgaagttttgtcttccgaggattcaatcccggtagtcgcaaaggcaatgttcgagcaaatgggccagcacgtcagcgatctcgatacgaagatcggcgcgctggagaaacagctgctagaacagcacaaggcaaatgcggtaagcaagctcctggccgcaattcccggtgtcgggccaattaccgcgattacagtggcactaacagtgaacccagccagctttgagaccgggcggcattttgcagcctggattgggctaacgccgcgggaacattcaactggcggcaagcatcgcttaggaagaataagtaaggcaggtagcgaacggttgcggcaattgctcgtggttggggcgatggcggtgatccgctatgccaaacctggcagcaaatcggcttctgcctggctattacaattgctggagcgtcggccgcggaaggtcgcagcggtcgctctggccaacaagatggcccggattatctgggccatgatggcgcgaggtgaagcgtatcggtgtcagccggtagcagcctgatccgagcgccggtgccgtgggtttaagagcagagcaagagatgatgatcggtcgaaccgacgaatgacagaatccgaccagttccagggcgttttatgccgttgccttgattggatgtcgttcgcggaacccatctgggccggcggccatgcagccgcttacataggccgaacgcatgaccgctttcgaaccgccatcaaatcctgcaaattcgcacttgaccccaccgggccgtccacgca

SEQ ID NO: 7795 - DNA, 1167 bp, unidentified
  source 1..1167: mol_type = unassigned DNA; note = element_c17749c
  misc_feature 1..2: note = core
  misc_feature 3..159: note = LE
  misc_feature 160..1161: note = CDS
  misc_feature 1162..1167: note = RE
cttgtattagcgcgacctgctatccttcatcattcctttcggggaatgccccgtcccggacggccatccgggacggggcgccggtcgtcggatcgttgggcttccagccttgtgggctgttcctgagcaagatcgcgatcggctcttcatcaggcccggatggttgaaggaaccgagggttcgcatcacaaggaggggatgacgaagatggccaagcttagcatggtctgcgccggaatcgacatcggcaaactcaagctcgacgccacgatcaacgggaccaacgagtacctgcaggtcgacaattcgccggacggctacatcgccttggccgcctggctgcgccggcaccacgtcaagcgggtcgggatggaggcgagcggaggctacgaacagccggtgatggcggcgctgcgacgcgccggcttcgtcgtcgtttgtctgcagccgatgcaggtccgggcctacgcgacgttcaagctgcaacgcgccaagaacgacaggatcgatgccgccttgatcgcgacctgtacggccgcggtcgcggaggttcgaccgccgccggacccgcggtttgcagccctggcctgccggttgacgatgatcgagcaactcaccgaagacgtcgcccggctcaagacccgatgtgaagcctgtcgcgatccacacggtctcgagttctggcgcgccgagattgcccgcctcaaaggctgcatccgcaccgaactcaaacagctggtcgccgacatccggatccacccggacctcgccgcgcggctcgacctgatcaccagcgtcgacggcgtcggcctgcgcaccgccgtcgccgtgctgatccggatgcccgagatcggcaacgtcagccgcgaacaagccgcagccctggccggcctcgctccttatgacgacgacagcggaagccgaaccggacagcgccacatcgccttcggccgccagcggctcaggaccagcctctacgctgccgccctgccggccgccttcaagtggaatcagcaactcgtagcgctctaccggcggctgaccggccagggaaaaccccacaaagtcgccctggtcgcctgcgcccgaaagctgatcatcttcctcaacaccgtcgtcgcccgcggcaccccttggatcgctaaatctgccgcgatctaatggttg

SEQ ID NO: 7796 - DNA, 1351 bp, unidentified
  source 1..1351: mol_type = unassigned DNA; note = element_c188ca6
  misc_feature 1..2: note = core
  misc_feature 3..66: note = LE
  misc_feature 67..1095: note = CDS
  misc_feature 1096..1351: note = RE
  misc_feature 1114..1337: note = bridgeRNA
tgatgccgtggacggctctccacccaccccgcaagctgagcttgcggctgcgaacggaggagcgccatgggacaggttacgacgatcggagtggacatcgcgaaatcggtttttcaagtgcacggggttgacgcgacgggagaagttatcctgcggcggcgcctgacgcgggcacgggtggtgccattttttgcgaagctggcaccttgtttggttggaatagaggcttgcgcgacctcgtatcattgggcgcgtgagttgcggaagctgggccatgaggtccgcctgatgccgcccagctacgtcaaggcgtatgtgaagcgacagaagaacgacacggccgatgcggaggcgatttgcgaggcggtgaccaggccgacgatgcgcttcgtggaagtaaagtcacctgagcagcaaagcatcatggtggtgcacgggacgcggacgatgctgatgcgtcagcggatccagctgtcgaatgcgatccgtggccacatggccgagttcggggttgtggcgccggtcgggcgcgaggggcttctgacgctcacggatactctccatgacgaggccgatgaccgagtgccagccgaggcacgccattgcttgcagatgctcgccgctcagctccggttggtgaacgcccaaatcctggagaatgatcgcaggatcaggttgagcgcccgggcgacagatgtggggcgaaggctgatgggcattcccggcgttggcccggtgctcgccagtgcgtttgtcgccaccgtgcctgatccccatgcgtttcgctcaggccgaaacctcgctgcgtggatcggtcttgttcctcgccagaactccagcggtggcaaggaacggctcgggggaatcacaaagcagggaaaccgctatttgcggcagctgctgttcgtaggcgccatggccgtcatccgatatgcggagcggcatggcacccgccggccgtggctggtgcggttgctggcacgtcgcacgacaaagatcgcagcggcggcgctcgccaacaaaacggcacggatggtttgggccatcatgaccagcggtcagtcatacagggagccggaattgcgcactgcctgacggttcaggcggggcaaacacgattgggaagggcggaaagaatgtaatgcaacaagccggtcgataccggggagcgggaaaacccactttcgccagtgcgctacgagcgcgtgtttttggtcgggacccgattccgcggaaggcattatggccagcggccgatgtgcgccgcatcaacaggtcgaacacatggccgcaccgaccagctctgcagaaacattcaaatcccccttgccaaaggagagccgtccacaca

SEQ ID NO: 7797 - DNA, 1442 bp, unidentified
  source 1..1442: mol_type = unassigned DNA; note = element_c18d221
  misc_feature 1..2: note = core
  misc_feature 3..124: note = LE
  misc_feature 125..1165: note = CDS
  misc_feature 1166..1442: note = RE
  misc_feature 1202..1395: note = bridgeRNA
agatggggtaatcggcttcgtgccccatcttcgccgaccggaaggaaggtgctgcgctccgagctgatgataaaacgtggtctgttcgtaacagccacaagcatcagaaagaggaagcgcagccatgcaacattacgccggcctcgacgtctctgtcaaagaaacgagcgtctgtattgtcgatgcaagcggaaggacctgccaagagaaaaaggtggtgtctcacccggaagatttagtcactatcctgagcaatcccgcactcagcttggagcgtattggcctggaggcgggaccaatgtcccaatggcttttcgacggactggcgaaggccggcctccccgtattctgcatcgagacgcgtcatacgaaggggttcctaaaaccttcgcaaacgaacaaaagtgaccgcaacgacgctcgcggcattgcgcacatgatgcgggtcggtcttttcaagaatgtgcacgtgaagacgctcacaagccagaagcgtcgtgccctgctgacggtctcgctgctgcaggaaaaggcgatcgcgctcgagaacgatatgcgtgggctcctgcgcaacttcggacttaaggtcggcgtggtgtccgcagggacgttcgaggagaaggtacgcgagctcgttgaggcggacgccgatctgctggagatcatggagcctttgctcgctggacggcgcaaactgcgcgaggaattcgccaaactggacaagaaggttgtccacgaggcgaagcgtgatcaagtttgcaagcgcctgatgacagtgcccggggttgggccagttgtctcgttagcctatgtcgcgacgatcgacattcccagcccgttccacaattcgcggtcggtgggagccgctctaggcctcacgccggtgctcaaccagtccggcgaaagcaaaaggatcggccatatctccctatgcggagacgcgatgatgcgatcgcttttatatgaggcggcgcagacgatgctgacacgtttggtgaaatggtgctggctaaaagcatgggcaatgaacattgccaggcggcatggcagaaaaaaagccaacgttgcattggcgcgcagacttgcggtggtgatgcatcgaatgtgggtagacggcacagaattccggtggacgcgggaagcggccggccccatgcccgtgtaagaaagttgggtctcacgaaatcagggaagcatattcaaagttccgcctcgcggcggaagacgtccttcgcggacgatggtgatgtgagttcgtgggcggcgctataccgatgatatgtcatcaggttgcagcatagattggaccacgtcatctactgaaccccatggtgggagggctgattgccgatcccggagagaagcacgggccgcgaagaaacgtcgaacgccgcaccaataggaaagctcgaagcgcttgacctcgacccgccgattagaga

SEQ ID NO: 7798 - DNA, 1446 bp, unidentified
  source 1..1446: mol_type = unassigned DNA; note = element_c19a467
  misc_feature 1..4: note = core
  misc_feature 5..225: note = LE
  misc_feature 226..1437: note = CDS
  misc_feature 1438..1446: note = RE
ctcattggatgagtatgggtgggcaggtcaggttggcctgttcgtcgggaacggcgagggacggcctcgatgtctcgccacgtgatggcctgtttgagctggtcgccctcgtcgttgccgggagacgtgatcggcacgagagagcagccccggtgagggccgaacaatgaggctccgacggtcatcccggtccaagcggcgaggtttcggccgggaggtcaacgcatgttcgtgggatgggattggggctcgacagtgcacggggtctgcttgatcgatgaccacggtgcagtcgtcaagaagtggatggtccgccacactgaggaccagctcatgagcgtcttcaatgagctcgctcagctcgtcgaagacggtgaggtggggcaggtcccgatcgcgatcgagcgcggcgagggcctgatcgtcggcctcatcgccggggctggccaccctgtgtggatggtcgagcccgcggcgttcaaagcagcccgcccccggtggggatcggctggggcgaagtcggacctgggtgatgcattcatgctcgccgactacgcccgcaccgacggtcaccggctacgtcgggtggagccggtggctcaggcgacccgggagctcgccgcactggtccgggcccggacagcgttggtcgaagcccgcactgcggcgtcgaaccagctgtgggcgatcttggccgagcactggcccggcgccgcgatggtgttccagaagctgacctcagcgattgcactggacttcctgaccgactacccgaccccgcaggcagctgcccacctcgggaaggggcggatgggacagttctgccgacggcacagctatcgtggtgggaagtccccggcggagctcgtaggccggctccgcgcggcaccggtaagcgcaagtccgatcgctgccccgatcttgacctcgattgtgcacacatcaacggcgcagatccggctgctcaatgctgagatcacccgacttgaaggcgacctggcacgggcgttggccacccatcccaagaccccactgctgcagacactcccgcgtgtcgccacggtcagcctagctgcgctcatcgccgagatcggtcctttgctcgagcgctgtgacaatcccgaacaagtcgccgccatgtgcggcgcggccccggtcactcgcgcgtcaggcaagtcacggaccgtgggcttccgatacacagcaaacaagccggcacgtgtcgcgatcaccagcttcgctgacaactcacgtcattcctcagattgggcgaacgacgcctaccggcgagcaagagcacgcggcgcccgccatcctcacgcgatccgaatcctcgccaggggctgggtccgagtcatctgggcctgctggacgaccgacaccgcctacgatccctcccgacactgcagtcgacaactcctcgcggcagtgagttgacctagagag

SEQ ID NO: 7799 - DNA, 1389 bp, unidentified
  source 1..1389: mol_type = unassigned DNA; note = element_c19ec37
  misc_feature 1..2: note = core
  misc_feature 3..89: note = LE
  misc_feature 90..1106: note = CDS
  misc_feature 1107..1389: note = RE
  misc_feature 1153..1388: note = bridgeRNA
ataatggtatggacccactccacttcctaatcggcctctgatgggccaaaatgaatttggatatttcatttaaaagcggagtggatcagatgaatattacaacaattggtttagatatagcaaagtcagtgtttcatctttttaacataacgaagacaggtcgattcattggtaagaagcagctaaaaagaaatcaagtattagcttatatggctaagcttgagccgagtattgttgttatggaagcttgcggaggtgcaaattactggtccaggaagttcatggcaatggggcaccaagtaaaattaatagcacctcagtatgtgaagcctttcgttaaaggaaataaaaatgattacaacgatgctgaagcgatagcggaagcctctcagcgaccgagtatgcgcttcgttcccataaaatcggttgaacaacaagatatccaaaacttgcatcgccagagagggttgataaaaaagtctcgtaccgcgctagtcaatcaggttcgcggtctgcttgccgaatatggtgtcgttattaagaaaggggtgtcagcttttcacaatgatttacccagcattttagaagatgctaacaatgaactaaccgttcttagtcgagagttgttcaatgaattgtacgaagatttaattatcatagaagatcgattcaagaagtgtgaaaagcgtattaaagccatcaataaagaaaatggcacctgccagcggctgataggagtattaggtataggtcctattattgctagcgcgacttttgccgaagggggaaatggtaaaaattttgtaaacggccggcatttttccgcttggcttggtcttgttccagggcagcattctactggaggaaaaccggttttgcttggcattagtaaacgaggtaattcatatttaagaacattgtacattcatggagcaagagcagtacttcaagccagctcgacgaaatcagatcggtttagcttatgggcacaagcattgttagcccgtcgaggtcataacagggcttgtgtggcgatcgcgaacaaactcgctaggattgcgtgggtaattatggcgaagggcgatacttataggcaagccgtttgagtattcaccgaagatattagtcataagaaataaagcaaaagaaaaccttttacgtcagttgcaagaagtagattaatcggatggtaagacaagtcagactggctcataaaaaacctgttcttggcattggctctttaaagaagccgtatggatgatgaggattatgagcgcaaacaaccatcggggccagggattagtttcccataaataggccggatatatgagagcaatgactttcctcttacatcgattaaaatgctttgcaaacggggtgggtccatat

SEQ ID NO: 7800 - DNA, 1353 bp, unidentified
  source 1..1353: mol_type = unassigned DNA; note = element_c1a5483
  misc_feature 1..2: note = core
  misc_feature 3..74: note = LE
  misc_feature 75..983: note = CDS
  misc_feature 984..1353: note = RE
  misc_feature 1107..1342: note = bridgeRNA
ttatgggatggcccgccccttttcccccggcatcgggtatgatgctggtgttcgaaaaggaaaggagcggtccgatgtctattttgatcctgggaattgatctcggcaagaattcttgcagcatcgtgggcgttgacgcgcaaggcgctgttgttgttcgccgatcaatgcggcgcaagacgctcattgaatacgtggcgacgcttcccgcgtgcgtggtggcgatggaagcttgctgcggcgcccatcatctcggccggctttttgctgcaaaagggcacgaggtccgactgatgtctcctgagtacgttcggccttacgtgaaagctcagaagaatgacgatcgtgatgcggaagggatcgccgaggcggcctccagaccaacgatgcgatttgtcgagctcaagagccaggcgcagctggacatccagacgctgcaccgcatgcgatcacgcctggttgctgaacgcactggtctcatcaatcagcttcgcgccattctgtcggagcgcggaacggactttccggccgggcgtcgcaagctcgagcaaggggtcgatggtttgctcgcagacggcgatgacacgctgtctgctcgtatagtcgagctgatcacacaacttcgcgcggaatggagcgagctcgatacgaagatcgaggcactgaacgctgaattcgttgaaatggcgcgcaccgatgcagccatgcgccggctgacgaccataccgggcgtgggcgtgctcaatgcgacggcgctggtggcagctgtgggtgatggaagcagctttggcaaagcgcgtgacctcggcgcctggctcgggctggttccccgtcagcacactacgggggcaagcctcggttgcttggaatctcgaagcgcggcaacacttacctgcgtacgcttctcgtccacggtgcgagagccgccttaccctcgctatcccaaagcgacacgccattgggccgctggctcaaagcgatgatcgagcgaggtgttcatcggaacgcgatcgtggtcgccctggccaacaagctggcgaggattgcctgggcggtcttgcgtaaagacgtagcgttcgagcgcggccgcctcgtcgcggcatagtcagatcggccacgcacaatgcgcgcgtggctcatgaggtttgcaggaaggatcgtaaagatggcctgagagtcgaacgacgtttggaaacccggtgaatgaagtggcattcgatgccgtcgccttttgtgggtcccaagcgtgcggatgtccatcttggccatgggcgtgcccatgagaccgtatacgttgacgcagactactcagaacaccgtaatatcctcttgcagacggggcgggccatacgt

SEQ ID NO: 7801 - DNA, 1397 bp, unidentified
  source 1..1397: mol_type = unassigned DNA; note = element_c1a59d6
  misc_feature 1..3: note = core
  misc_feature 4..98: note = LE
  misc_feature 99..1121: note = CDS
  misc_feature 1122..1397: note = RE
  misc_feature 1169..1394: note = bridgeRNA
cgatgagatggtctcctccctctcccttctacggcgtcgatgcgccaggggatagatgctatgcatctactggaaccgaacggagacaggaggagaccatgaaccaatctatgacaattggcatcgacctggcaaagcacgttttcttcgttgcagcccttgatggctcgggcaaaccagcccggcgcaagaagcttcgtcgccatgaggtgctgccatttctggccaatcatccgggggctgtcgttggcatggaggcttgctccggcgcgcaccactgggccagggagatacgcgcgttaggtcatagtgtgcagctgttgcctgcgcagcatgtcaaagcctacctgcgtggccagaagaacgattacaacgacgcgcttgccattgctgaggcggttcagcatggccgtattcgttgcgttgagatcaagacggtcgatcagcagttggaccagagcctgcatcgtctgcgccaggcgctggtgactgaacagacggggttgatcaaccggactcgagccttactcgcagagcacggcgtggatctgcctgaaggtaagtaccgcttcaggcagacggtcatcgcacagttggaagatgcggagaacggcttgccatggcgcctgcgggaactgctgggccggcagtatcagctgttcatcgcgctggagcaggagctcgcttggtacgaacgcgaaatcaaaaccaaggccgcagaaagcgaagcctgccagcgcttgatgagcgtgccgggctacggccctatcgtcagcagcgccttctatggctggctagggagtggccagcagttccgttgcggtcgtgatgtggctgcggctctcgggctggtacccaagcagtacagcactggcggaaagactgtgctcggcagtatcagcaagcgcggggatagacacctcagggcgctactagtgcatggggctagagccgttgcccgttacgccaaagagcgtgacgacagactaagtcgctgggtctgcagcctgatcgagcgacgaggttacaacaaggcagtcgtggcactggccaacaaactggcacgcatcggctgggcagtagtggctcgagggcaaccataccaagccgttccggcctgaagcgcagcagccacacacttgatttaaccaagaggtaaggcactcccccaggttgcgaaggcaatcagcagatggtggtaatacaggtcaaaccgatgtatcgaaaacctgaggaaggtcatggcctcacaggccgcgagctcgataaggacgaaacgtggcgactgctcatcaaggcccgcagcactgtgctgcacactgaggccggatatacgacagacaacctgctcttgccgtcaaaaactgatgccttgcaatgagggaggagaccatata

SEQ ID NO: 7802 - DNA, 1459 bp, unidentified
  source 1..1459: mol_type = unassigned DNA; note = element_c1ae03f
  misc_feature 1: note = core
  misc_feature 2..173: note = LE
  misc_feature 174..1445: note = CDS
  misc_feature 1446..1459: note = RE
  misc_feature 58..198: note = bridgeRNA
cgttaccttgtttatatcttcggatggtgtgagtatctgaggacgttggcccgtcgggtccggcatgattattgcccccagtcgttgatgatccggggggtgttgtcaccgggccggattggtatcaggtaatcgctaataggggccggactgttgtttaggccattcgtaacgtggatgtgagactcgataccgcggcgctgaccaacataacggttcagagacgggagtacatcatgatggagaactacgaatccgcggacgtgttcgtcggcgtcgacgttgggaagggggagcaccacgcggttgcctacgatcgggccgggaaagtgctcttcgacaaggccttacccaacgatgaaacgaaacttcgagaggtcattaggaagctgaaaaagcacggtcaggtcctcttcgtggtcgaccagccggccacgatcggcgcgctgccggtcgcggtcgctcaggccgagaacgtcctcgtcgcctacctgccgggcttggcgatgcgtcgcatcgccgaccttcatccgggtgaagcaaaaaccgatgcccgcgatgcggccatcatcgcccaagcggcccgcacccttccgcacgcgttgcggtccatccaactggccgatgaacaagtcgctgaactctcaatgctgtgcgggttcgacgacgatgtcctcggacagattgtcgcgacgagcaaccgtatccgtggcctcctcacccagatccacccagctctggagcgggttctgggcccgcaccttgcccacccggcagtgctggacctgctacagaaatacccttccccagcgtcgatgaaaaccgccggtacgctccgtcttgggaatcgattgatcaagcgggcaccccggatgggacgtcgccttgccgccgaaatcacccaggccctcagcgagcaaacggtcgtcgttgtgggcacgaatgcggccaatacggttctgccccgtcttgccgaacaactcgccgccctgcgccaacaacgcgaggagatcgcggtcgaagttgagaaactcgtcgacgcccaccctcttcaacccatcctgatcagcatgcccggagtcggggtccggaccgctgccagactcctcaccgaagtctcggggaaggacttcgccaccgccggacatctcgcctcatacgccggccttgccccagtgacacgacgttccggatcgtcgatacgcggcgaacacagttctcgacgaggcaacaaagtcctcaaacgagcgttgttcctctccgccttcgcggcgcttcacgatccagcgtcacgggcctactacgaccggaagatcgccgagggcaagaggcacaaccaggccctcctagcccttgctaggcgccgctgcaacgtcatctacgccatgatgcgcgacggaacactctacgaaaacgaaccgaaaaaacacgtcctagctgcttgacaaaaacatagggg

SEQ ID NO: 7803 - DNA, 1192 bp, unidentified
  source 1..1192: mol_type = unassigned DNA; note = element_c1afab2
  misc_feature 1..2: note = core
  misc_feature 3..220: note = LE
  misc_feature 221..1171: note = CDS
  misc_feature 1172..1192: note = RE
  misc_feature 63..231: note = bridgeRNA
cttatatgtctcgaatcattcaaacttcattggtcaaggcgcgggcacaggccttgaccgctgaacgggttgactcaccgtcgcgcagcctgtgtctccttcgagttcgagctcggacacaagccaagggcgcgcggtggtggtctctttgttctgctgcatccccaatggttgaccgaacacatttcgtattcgtaaggctgggagccggagaacttttatgagtgaactcgtctacgtaggtatcgatgtggccaaggacagcttcgaggtcgcggtcacaggtgagtcgcagaccctcaagctcgacaacgatgaagcgggccacgccgagttgagccaattgctcatgccgctggcaccacgactggtcctgttggaggccaccggtggctacgagcaggacctggcgctggcgctggccgccgcgggcttgcgcgtctcggtggtcaatccacgccaggcccgcgacttcgcacgctgcacgggcaagctggccaagaccgaccgcatcgacgcgcaggccctgcgcggctttgcgctcatgctcgacgtgcaaggccatgagccgcgcgccctggctgacgatcagcgtcgcgaactcaccgccctggtggtgcgccgcaggcagttggtcgccatgctggtggccgagcgccagcgcctgggcgtcgcccaccaaaaggccaagcccagcatcctggccatcatggatgccatcgccgcgcagctcaaggatgtcgatggcgggctgaaggcgcatatccaggcccaccacgccgatctggccaagctgctgacttctgtcaagggcgtgggccccacgacggccagcaccctgctggcgcagctgcctgaactcggccatctcaatcgcaagcagatcaccgccttggtcggcctggcgccgatgaaccgtgactccggcacgctcaggggccagcgccacatcttcggcgcgcgcgcggatgtgcgacgtgtgctctacgtcgcggccctggtcggcacgcgcttcaatcccgtgctcaaggccttctatgccaagctgctggccgccggcaaacccaagaaggtcgccctggtggcctgcatgcacaagctcctggtcatcttgaacgctatcgctcgcaccaagtccccttggcgcaacgacttcgctcaggctctgtaagttagtcattcaagatggttg

SEQ ID NO: 7804 - DNA, 1311 bp, unidentified
  source 1..1311: mol_type = unassigned DNA; note = element_c1b8e51
  misc_feature 1..2: note = core
  misc_feature 3..190: note = LE
  misc_feature 191..1150: note = CDS
  misc_feature 1151..1311: note = RE
  misc_feature 28..200: note = bridgeRNA
cttgtgtccgcaaaatctgccagaatgtgcgaacgggcggttctcaccaaccgcccgtcgctggaactgagcccgttacgccccaaaggcgacagagcctgtctcagagcgagggacagtccggtgtcttcctcaacccgaacagttgcaagggcttcgagcccgcaccgagcaaggaagggagtggatgatggcacaagttgatctcgttgtcgtgggcatcgatgtggcaaaagacaaggtggatgcgtgcattcgctcgctgtcactgcggcagacgtgcccgagcaccgcgcaaggtcagcgcaagctggttgcctggcttcgcaagcacaaggtgaacaaggcggtgatggaggcgagcggcggttacgagcgtgagtgggtcagggtgctgcaccaggccggcatcgaggtgcgaatcgtcgaccccaaacgggtccgcagcttcgcgctatcggccggacgcctggccaagaacgatgcgatcgacgccgagatgatcgcctggttcgccgagacctttagcgaggcgccgagcccgattcacgatgccgcgcacgaggagttgcaggcactggtgaaggcgcgcaaaggcctgcttgatcttaagatccgactgcaaagccaaaacgagcatgccgcaccgggaccggttcagaaagcgtatgcccgcatcttgaagagcctggccgccgaaattgtcaaactcgaggccgcgatcgcagtcaagatcaaggccacaccggagtttgccgagcgcgccgagatcatcgagagtgtgcccgggctcgccgaaacgacgtctgcgaccatcattgcggggatgccggagctcgggcaggtgagcaacaagatctcccccgccttattgggcgccgccccttatgacgacgatagcggccatcgccgtggcgagcgccacatcaagggcggccgccgctgggtgcgaaacgccatctatatgccctgtctcggcgcagccacgcagaacaacccggtactcaaggcgttctatcaccgcctgattgccaagggaaaggagcccaaggttgcgctcatcgcctgcatgcgcaagctgatcgtcatcctcaacaccatgatcgcgcgacggcagaaatgggatcccagccgttacgcgttgaactgagctgaccagcgcacacgcctgcgctcggcatccggccgagcgcatgcaaagccaacagaccagtgagcggacggggtcaaggccgtcagccgccgcaggcgggggcgcgccagcgccagccttgaggccggccgatcactggtctacttccggcacagttg

SEQ ID NO: 7805 - DNA, 1530 bp, unidentified
  source 1..1530: mol_type = unassigned DNA; note = element_c1d14c8
  misc_feature 1..2: note = core
  misc_feature 3..241: note = LE
  misc_feature 242..1417: note = CDS
  misc_feature 1418..1530: note = RE
  misc_feature 19..221: note = bridgeRNA
cttgtattatagagtagtagttattagagcccctctccaagggctgtgctacactgtaagggatgctgtggattggtttgcacctcctaccacgcagatggttctggaaaggttccaaccacagccctttgcagttttgttgatcagttaaataccgccagacggtttatgtggaacaaggctacaaaagcaaagtgtcctgtggatgcagcatcacaaatttaccgttggaggtattgctatgatttgcgtaggaattgatgtggccaaggacaagcacgactgcttcatcctcagctcggaaggtgcggttctggcggatgtgttcaccatccccaacaatctggaaggcttcaatactctgctggataagctccgggcctgctccacgccccaagacagcataaaagtaggacttgaggcgaccgggcattacagctacaacatccttgggtttctccttgacaacggtctggccacctatgtcttgaaccctctgcgcaccaacctttaccggaaaagcctcagtctcaggaagacgaagacggaccgggtggatgcgcgaacgattgcggctttacttctgtccgatacgggcctcaagccctacacggatacagcataccacaacgaggagctaaagtcactcaccagatatcgttttgacaaggtaaaagagcgggccaagttaaaaacttctgtttctcggctggtgtgcatcctgttccctgaattggagaagctggtgccaacacttcacatggcgtcggtctatgagctgctgtctgagtttcctggagccaaacaggtcgctgccgcacacctgaccaggctgaaagccttgctggcggaggcttccagaggccgttacgggagggatatggcggtggagctccgggatgctgccagacgctcgattggctccagaatgcccgccaagtccttggaattgcagcacaccatccgccttatccgggagttggatgccgagattgaggaaattgaggcagcaattcaggccatcatggaggaacttcactctcccatcaccacgattccagggattgggtaccgcatgggagccatgatcctggccgaagttggtgacttctcccgctttgattcccccgacaagctgctggcttatgctgggatgtctccttctacctaccagtccgggcagctcaaaaactgctatccccatatggagaagcgaggctcccgctatctccgctatgccctctataacgccactaaatacgtctgcctctggaaccctgcctttgccgcttacctcgccaaaaaacgctctgagggcaagcattacaacgtcgccctatcccacgccgccaagaagctggtgcggcttatcttcgctctggagaagtccaggcagtcttactgccccgctgcttgatttgcctcaatagccatccggggcccctgggcctctgctttgctataccctttttgaaccatctaacttttcctggcattcttcattttaggggttgacttctaatagttaat

SEQ ID NO: 7806 - DNA, 1344 bp, unidentified
  source 1..1344: mol_type = unassigned DNA; note = element_c1e43e4
  misc_feature 1: note = core
  misc_feature 2..234: note = LE
  misc_feature 235..1329: note = CDS
  misc_feature 1330..1344: note = RE
  misc_feature 6..230: note = bridgeRNA
cagtgaggatgtaggggtggatcgccgtcgagcttcggcttgactcgtgccctgactgaccgtggtgtcctgaacgggatgtgtcggccggggttcggcggcgatctcggcacctgccggacgggcgtcgtgaccttataggagcctggccagaggccccgtcactgtcttgtccgcccgcccgaccggcgcgtgccgcccttcccggttcagcgacaggacggcaggtcaacgatgacagcagtacaagcggagcgacaagcagactcatcggcggtcgaggtggtcggcggtgtggacacccataaggacacccacaccgcggcagcggtggacaccgcggggcgggtgttggggtcggcccagttccccaccgacgccgccggctaccgggcgttgctacggtggctgcgcgggttcgggacgctgctgctggtcggtgtcgagggcaccggtgtctacggggccggcctggcccgattgctggccgcccagggcgtggccatggtcgaggtcgaccggcccgaccgcaaggcccgccggtggcagggcaaatccgatcccgtcgatgccgaggctgcggcccgggccgcgttggcccgggtgcgcaccgggctgcccaagcagcgagacggtcgtgtcgaggcgctgcgggcattgcgggtggcgcgccgttcggccgtcgggcaccgcgctgacgtgcagcgacagatcaaggcgctgatcgtcaccgcaccggaatcgctgcgcgcccagctgcgggcgttgcccgaccgagaactgatcaaggtctgcgccgaccagcggccggaccgtgccggtgccggcgatccgggcacggccaccaagatcgcgctgcgctctcttgctcggcgccaccgggcgctcagcgtcgagatcgccgatctcgacgagctgctcggtccgctcgtggcccagatcaaccccgggctgctcgcactcaaaggcatcggtcccgacgtggccgggcagatgctcgtcacggccggcgagaatgccgaccgcctcaccaacgaggccgccttcgcgatgctgtgcggcgtggcgcccttgcctgcttcgtcgggcaggacgacccggcaccggctcaaccgcggcggagaccgagccgccaatagcgcactctggcgcatcgtcatcacccgcatggccaccgaccagagaaccaagaactacatcgcccgacgcaccgcccaggggctgaccaagcccgagatcatccgctgcctcaagcgatatgtcgcccgagaagtcttcctcgcgcttacgtccgcgtccgcagaaaaacgacccgccaaagcagcttgacaaccataggagcat

SEQ ID NO: 7807 - DNA, 1382 bp, unidentified
  source 1..1382: mol_type = unassigned DNA; note = element_c1e706f
  misc_feature 1: note = core
  misc_feature 2..92: note = LE
  misc_feature 93..1124: note = CDS
  misc_feature 1125..1382: note = RE
  misc_feature 1153..1377: note = bridgeRNA
caatgggatggactcctcctcacccggctggctcgcagcgcacggcgcatgattgtcgtcgcgttcgaccagtcaacgaggaggaacctgaaatggacatgattcgtgttgggattgatctcgctaaaaacgttttccagatgcatggcgtcgatcgaagcgagaaggcaatatggcgccgcaagcttgcccgcgtggaatggctggatgtcttgcaacggacggttcctctgcatgccgtgataggaatggaagcctgcggtagtgcgcatcattgggcgcgtcgtcttcaggcgatcggatataccgtgaagctgatagccccgcagtttgtgaagccgtacgtcaagagtaacaaaaacgacgcaaacgacgccgaagctatctgtgaagcgatgagccggccaggcatgcgctttgtcgccgtcaagaccgtcgagcagcaggacgtgcaggcggttcaccgcgtccgcgccggtttaatggagcaacgtaacgcaaaggcaaaccagattcgcggcctgacctccgaatatggcattgtggcgccccgagagattctccagttgcgccgcgctgttcctgtctggatggaaaacgtaaacagcggtctgagcgaccgattccggcgtctgctcagggggctgtgggaggacctgcgctccctggacgaccggattcgcgaactcgatcgtgaaattgctgcgattgccgcatccgatcccgtcgccagacgtttgcagcaattacgcggcgttgggccaatggttgcaacggcgttgatcgcaaccgtgggcgatgcccgacagttttccaatggccgacagatggcggcgtcgctcggactgacgcccagacaaaacagctccggtggaagagagcggcttctagggattagcaagagaggtgacgcttacgtgcgttgcctgttaatccacggcgcacgcgcgatgatccagatggcccgtcgacggactgatgcgctaagtctgtgggtgatgcgcatagcaggcagccggcatccgaacattgcagccgtagcgctagcaaacaaaaccgcacgcatagcctgggcgatgattacacgggaaaccgattaccagccggaacttgccgcacattgaaacagtaactaccagcagtaccttcatccacggttgcaaaacaagccgcacgatggccaacaggtcgaaccggcgctgatcaaacccgtgactgaccgaggccttgagcccgtaggaacgattgggagtcagcgcgcgaatagcccatcagggtccgttgcctcacagaggcacagttgtacgagaccggatatacgtgagcaatcgacaccgaggcttgacaagcgacgtgtttgcaaacgaggaggagtccatata

SEQ ID NO: 7808 - DNA, 1584 bp, unidentified
  source 1..1584: mol_type = unassigned DNA; note = element_c1ebc7e
  misc_feature 1: note = core
  misc_feature 2..78: note = LE
  misc_feature 79..1131: note = CDS
  misc_feature 1132..1584: note = RE
  misc_feature 1348..1575: note = bridgeRNA
taatggaatggtccggccgtgctcctgccccgccagcgagcgaagctgggaaggggtgcccaagacaaggagcacgccatgtctcagacactcaagacttcggttgccgtgatcggcattgatatcggcaagaactcatttcacctcgtgggccaggaccggcgcggagccatcgtgctgcggcagaagtggtcacgtggccagcttgagggccggctcgccaatgtgcctccatgcctgatcggcatggaggcctgcgtcggggcgcatcatctcagccgcaagctgcaaatgcttggacacgacgcccggctgatgccggcgaagtatgttcggccgtattcgaagggacagaagaacgactttcgcgatgccgaagccatcgccgaggcggtgcaacgcccgaccatgaagttcgtcgccacgaagaccgccgatcagctcgacctgcaggcgctccaccgtgtgcgcgagcgattagtcagccagcgcaccggcatcatcaatcagatccgcgccttcctgctggagcgtggcatcgcggtgcggcaaggactgcgctttctgcgggcggagttgccggacatcctggcgacccgtaacgatgtgctctcaccgcgcatggttcgcatcatcgaggagctggcggcagactggcgccactttgatgagcgcatcgaaggcctctccagcgagatcgagaggctggctcgtcaagacaaaggctgcgagcggctgatgacggtccctggcattggcccgatcatctcgagcgcgatggtggctgcgatcggcaccggtgatgccttctcgaaaggccgcgacttcggttcctggctcgggctggtgccgaaacagatatcgactggcgaccgcacgatcctcggcagcatatcgaggcgcggcaatcggtatctgcgcagtctgttcgttcaggccgcctgggtcgtcttggtcaagatcgggccgaagcgttgggaccgctatgggctcaagtcgtggatagagaccgcaagaaagcgactgcaccacaacgtgctggcgattgcgctcgcgaacaagctcgcccgcattgcctgggcagtactccataagggtcgcgccttcgagtgcgtcaggacagatagatgacgctccgaccagcttgatcctcgcgccgtgctcgggcccgtcaaggcgtggcctggcagcaaaggagcgagaggcaagaccagcgtgacggccagccttgacggcccctagcgcgcggcgcgtctgcgtgcgcaggccgggacgaaggaatggcagaaaggcacgaacaaaggaatgttctagacacgagttgtcggtgacgcagccaacaccgttgcccgccgaggtctgcgagagaatgagacgaaatggaggatcggtctttccggcgtgtgcgaacactggtgacccgaatggccctgtgaggcctatccgctaatcaggtcgcacgcgcgctgatatccatgatggtcaggagccacgataagctccaatcagagaccggatacattgatgcaagaccgcatccgctagatcgacgaaatctcttgcaacgcacggccggaccataca

SEQ ID NO: 7809 - DNA, 1576 bp, unidentified
  source 1..1576: mol_type = unassigned DNA; note = element_c1f59b7
  misc_feature 1..2: note = core
  misc_feature 3..270: note = LE
  misc_feature 271..1449: note = CDS
  misc_feature 1450..1576: note = RE
  misc_feature 30..244: note = bridgeRNA
ctggtaaaatatggtagaattatcccatggatgttgcattgtttactttccttttttgtgacatttatgttatgattctccgtgtgaatagaggtcgcagctaacctgcttaagactttgatcttcccccgaagagttgcgcctctttctctgcgtgattgtgcgaataagctggatgatacttgttatcctttgtcctaaccagtctgtaccggcgcagttaaagcggatatcctttattcattattcttttacctcggaggtatctttatgtttttcatcggcattgacattgccaagcgttcccaccaagcagccgtgactgacgtctccggcaatatcataatcaagcctttcaatttcaggaattcgtctgtaggatttaatcagttcctgtccatgttagcttccaattcagttccgaaagatgattgcataatcggattagaatctacagggcactattggtatccgctgtatttctttcttgtcgagcagaaattcaacgtcaaagtttttaatccgattcaaaccgccgcattcagggaaatcactatccgcaaagtcaaaaacgataatctggacagcatcatgattgctgattttactcgcttcggccgctattcggaaacgcacattccctccgagaatatgcttgcgctcaaaaatctttcaagattccgcttgtcggtatgcgatatttgcggtagcttaaaaaaacgtaccattgtccttttagaccaggtatttcccgaatatgacaccgttttctgcgatattttcggcacgacaagcaaactgcttcttgaaaagttttctactcccgaagaattctccgaaatttccaccactaaacttgcaaattttatccataaagtcagcagaggcagactcggacgagaaaaagctgaacttatcaaggctgctgccaacaattccattggcatttcatacgccgtcgatacgttttccttccaaatcaagcaactcattgagcaaattgagtttatggaaaaccaactctccgaaatcgatgcggaaatggcaaaactgcttgccttatccgaatactctgtaatcacgactatcagcggagtaggccctaccttaggcagcattatcgtcagcgaaatcggtgacatagagcgctttgaaacctcatccaaacttgttgcttacgcaggattagatgcttcagtaaaacagtccggagagtttaattcatctcaaaacaaaatctctaaacgaggttctccccaccttcgcagagcgctttggatggcggctttcatgtcattgcagtgcgaccctgcgctgtatgattattattcccgtcttcgcgccagaggcaagtctcaccgccttgccacaactgccgttgcaagaaaactttgtatcattgtttgggctattatgaagtccaaacaaccttattcgcctaatatttaaaagtaatatacaaatatcttgccgtccgaatgcgaacggctttttgtcttactcttttatcgtactttacccccccctcaaaaaatttgaattttactgattttccgcttgactttcaatagctggt

SEQ ID NO: 7810 - DNA, 1374 bp, unidentified
  source 1..1374: mol_type = unassigned DNA; note = element_c1fdb29
  misc_feature 1..2: note = core
  misc_feature 3..86: note = LE
  misc_feature 87..1148: note = CDS
  misc_feature 1149..1374: note = RE
  misc_feature 1121..1362: note = bridgeRNA
tgatggtgtggaacggcccttcgcgccggcatccaggatgcctatcgtggtgacgccaatcgccacaagacagagggaaccgttccatggagaagattaccacaattggactggatttggccaagtcggtctttcagatccacgccatcactgaaggcgggcacgtcgctgtccgccgtgccttgcggcgatcacaggtgttggagttctttcgtcacatcgaaccatgccttgtcggaatggaagcatgcgggagtgcccactactgggccaatgcgatcggcgaattcggtcatacggtgcggttgatgccgccagcgtacgtgaagccctacgtcaaacgtaacaagaccgatgccgccgatgcggaggcgatctgcgaggcggtcacgcgcccgacaatgcgcttcgtgccagtcaaaacaccggacgagcaagctgccgggatggttttgaagacccgagagttactcgtgcgtcagcgaagccagacggtgaatgcgatgcgtgctcatatggtcgagctcgggatcgtcgccgcgaccggcatgaccagtattgcaaagctcgtcgccattttgcgcgacgatcgtgacggtcgtctaccaaactcggccagagctgcgcttttggagatggccgatcagatcgaaaggctgacagaaagggttgaggtgctcgacagtaagattgtcgcagcagtgaaagctgatgatgccacacgtcgtttaacaaccatccccggcgtcggtcctattattgcagcgactgttcgtgccgcggttcaggatccggcagcctttcgaacagggcgggatttggcggcctggatcggcatcacgccaagagcgaactccagcggagggaaggagcggcttggcaagatctcaaagcgcggcaataagcagttacgaactctactgattgtcggtgctacatcgatcctgaaacaggctcggagaggttcaaagctatctggctgggtcgtttcaataatggacgacgcccctacaaggtggcagccgtggcgctggctaacaagatggcccgcacgatatgggcgattttggtcaagggcggcacataccaagcgccagcgatggcagaggcgtaggaacagaattcccggcgttcctgcgtcgggataaagcggcaaggtacgaaagggtgatgaacccgaggggcgatacctcgatgtcgatcagaccgtctgactcactgcgcctttaagcgcgcaaaattgattaggcgatcgacatcgcggatctcatcgtggccagcggtcaatgaccgcgctcacaggccggacatatgactgcaccgtccggaggtgatttgcgctgaaaaaccttgccaaccgggccgttccacata

SEQ ID NO: 7811 - DNA, 1531 bp, unidentified
  source 1..1531: mol_type = unassigned DNA; note = element_c203c17
  misc_feature 1: note = core
  misc_feature 2..116: note = LE
  misc_feature 117..1220: note = CDS
  misc_feature 1221..1531: note = RE
  misc_feature 1242..1504: note = bridgeRNA
acgatatgagttgaacattgggagcccctccccttgcagctctatcgtgggtcgggcgacaatggtcgtagcgccaaccgtggccgcgcgccacatgcgacggagaggggcccgccatgtccaattatgtcacagccatcggtctcgacgtccacgcgaggagcatctccgcatgcgccttcgaccccatgaccggcgaggtgtcccgcgcaaggttcggatacgaccccgcgtcggtcgccgagtgggcactggggttcgagtcgcccaaggcggtgtacgagagcggcccgaccggcttccacctctgccgcgccctgagggcgctcggcgtcgactgcgccgtgggcgccgtctccaagatgcaccggccggccgccgaccgcgggcgcaagaacgaccggcgcgacgccgagtggctcgccaggctcctcgcctgccgcaacgtcgtcgaggtgtgggtgcccgacgagcgcaccgaggccgcccgcgacctctcccgcgccctggaggacgcccgcgacgacctgcagcgcgccaggcagcgcatgtccaagttccttctcaggcacggcctggtgttcgacgagacgacgccgaccgggcgccgcaggtcgaactggaccgaggcgtactggaggtgggcgaggtcgatcgagttcgacgaggccgacgacgcggccgcctacgagcactgcacgggcgcggtggaccgctgcggcgaggccaagagggagctcgagcgcagggtggtcgaggccgcctcgcgccccgagtgggcgccgacggtcgacgcgctgtgcctggtgaagggcgtcgacgtcgccgccgcgttcctgctcgccgccgaggcgggcgacttctcgaggttcccgagcgcgccgtcgttcgccgcgtggtgcgggctcgcgccctcggagcgctcgagcggcgagaccgagtcccgcggcgggatcacccgcgcggggaactcccacgtgaggcgcgcgctcgtcgaggcgtcgtggcacgtgccgatgtcgacgcgccaccccaagaagccgaggccgggccacggggtcgcgccggcggcgtcgaggcacgccgcgaagcgcgaccgccgcctgcgggacaggcgcgacgccatgtcgcaggcgggaaagaggccctgcgtggcgaactgcgcgacggcccgcgagatggcctgctgggtctgggcgatagcgctcatggtccggtagcgcccgcggcgagataggagtccgaccccggggcgcgccgcgctcgaggccgttgggaggccgttccagttcctttttctgggcagcgggggaccgccgcgcccgccacgagactgcgatgaagccggaggcccccagccgtagcaacgagatgcggttccgacccgcggatattagagtgccgaacgcgcgccgggcagacacgccctcaagcggcgcgtcccccgggtgaagataggtcgtccccgccccccgcggtagctccccgggggcggggacgttttgccacttgacaatgttcaactcatatt

SEQ ID NO: 7812 - DNA, 1156 bp, unidentified
  source 1..1156: mol_type = unassigned DNA; note = element_c21b10d
  misc_feature 1..2: note = core
  misc_feature 3..208: note = LE
  misc_feature 209..1144: note = CDS
  misc_feature 1145..1156: note = RE
  misc_feature 13..214: note = bridgeRNA
cttgtcttatggattggagcggctctcgttgtagaagggagccactgcccaccacaccatttatggtgagcagtggcggcggttgggtcgttagcagcttggtcgtgatggaccgtttcagagtttgatcaaccgccgtcttcaccaaagggcctgaacggatacgcgtgtaacaagccacgcatgacaagcataggacatggcgaagatgaccgaacataacattggcgtggatatttcaaaatcctatttggacgttttccgactggaaaatgataaagcgcagcgcttcgacaattcagcagcggggtttcgtgctctgaccaaatggctgggcgaagccccggttgcacggatcgtatttgagccgacggggccttatcataaggccttcgagggggcgttcggcaagacatttcctttggtcaaagtgaacccgctgcaagcgcgccggtttgctcaggcgcacgggaccagggccaagaccgatgctgtggatgcccagatgttggcccggatgggggctgcgttcgaccttgagccccaagcgccttgttccaaggaaacgcttgttctcaaggatttgcacgttgcgcgtgccgtgctgatcaaggaccgcactagattacggaaccgcgcccaaacgcaggacattgctctcctgaaacgtcaaaccaaggcgcggctcgcgcaggtggaccgtcagattgccgagctggacgctgaaattgctgcgctgattgaggcgcatgaggccactgcacgcaaccgcgatattctctgctcaatgcccgggatcggtgcagtcacggccgccgcaatgctgaccctgttgcccgagatcggtaggttgcaccgcaagcaggtggccagcctgaccggccttgcacccatcacccgacaatccggtcaatggcagggaaagtcattcatcggaggcgggcgcaagcccctgcgcgacgcactatacatgcccgcactggtcgccatgcgcttcaacccagaccttaaggtcaaatacgaaggactgcgtgccgctggaaaacccgcaaaggtggccatagtcgccatcatgcgcaagctcatcgaaactgcaaatgcactggtcaaagctgatcgcacgtggaccccaaaaaacgcttgatcaagacggata

SEQ ID NO: 7813 - DNA, 1231 bp, unidentified
  source 1..1231: mol_type = unassigned DNA; note = element_c224e6e
  misc_feature 1..2: note = core
  misc_feature 3..244: note = LE
  misc_feature 245..1213: note = CDS
  misc_feature 1214..1231: note = RE
  misc_feature 12..206: note = bridgeRNA
cttatgtcttgatcccggcccttccaaagagttgaaatcctctggttgatccccggagcagggtggggaatgctgtaactatcctaaggcttcaagtctgtgtgtcagattagcaccccacccacctttgccaccagttcggacggtatccgaggcctgtgttgcgcatgagcctgcacagataaggatgaaccggcatagtccgtagatcgctatttcccatgaaggttaaggagactgcccaatgactactcccactacctatgtcggcattgacattgccaaggcgaagtttgatgtcgcattgctgaatccccttggcaaatatcgcagcaaggtctatgccaataccccggaaggctataatcagtttctcacctggctacaaaaacatgaggctctggatgcccatctctgcatggaaaccacgggggcctatggtcgtggtttggcgcgttttctgacacagcaaaaccccttggtgagtgtcgtcaatcccgcccagatccatgccttcggcaaaaccgaactggtccgtgctaaaaccgataaggccgatgcgcgactgattgcgcggtactgccaaatgcaccgccccgcccattgggtgccactgaccgatgagatcgtcaccctgcaggcgctggtccaacgtctggatgacctgctgggcctgcacaacatggaaaacaaccgccttgagactgcagaagctgccgcgcaaccttccattgaggcggtacttgtcactatcaaccagcaggtcgacgctgtacgccgacaaatccaggagcacattgacgatcatcccgacctcaaatcccagaagaaactgctgttgagcattcccggcattggcgacaacacgaccgccaccttactggcttttatcaatcccttcgagcgattccactcggcgaaacaattggtcgcttatgcaggactcaatcctcgtatccgacagtcgggtcagtgggccgggaaaactcccattgcgaagaccggcaatgttcttctgcgtaaggccctgtacatgccagcgctcaccgccaaacgctacaatcctgtgattacggttttctgtgaccgcctgatcgctcatggtaaacgccctatgcaagtgatcattgccgccatgcgcaagctcctgcatatcgcctatggtgtcctcaaatccggtcagccgttcgaccctgaaaaagctcttgcataggcgtcatcaagacggtat

SEQ ID NO: 7814 - DNA, 1383 bp, unidentified
  source 1..1383: mol_type = unassigned DNA; note = element_c226f02
  misc_feature 1..2: note = core
  misc_feature 3..91: note = LE
  misc_feature 92..1108: note = CDS
  misc_feature 1109..1383: note = RE
  misc_feature 1147..1381: note = bridgeRNA
cgatgagatggtctcctcccccttattaatcggcgtcacaatgcgccatgatggagtttcaagcaaccatcagagaaagggagagaagaccatgaacaaggttacgacgattgggttggatttggcaaaaaatgtattccatgtggtgtgctgcgatgcacgtggcaagcaggtaggcaggaaaatgctgaggcgcagtcagatattaagatattttgctaacttaccaccgtgtctggtgggtatggaaggctgtgccagcgcccactactgggcccgggagttaacagcacatgggcatcaggtccggctgattccaccgcagtacgtgaagccctttgtgcggggcaacaagaacgactacaacgacgccctggcgatcgccgaagctgtcatccggcccgagatgcgttttgtggcggtcaagacaccggcacagcaggatgtacaggcactgcaccggttgcgcgagcgccgcatcgcagagcgtaccgcgctgtgcaatcaggtgcgtggtttgatgggagagtatggcattgtcttgccccggggtatcaataccctgcgccgtcaattaccggccttgctggaagggggtgagaacgggctgagtgagttttttcttcagttgttggctgagagttaccggcagcttcaggagctggatgcacatattgagttttatacccgggaactggtacagcagagtaagcatagtgatgcctgtcagcgtctgcagacgatacccggatatggcccgatcgtagccagtgttttttatgcgcaggttggcaacggtactggataccgtcggggccgggatgtctcggcctctgtgggcctggtaccccgtcagcacagcagtggaggcaaagatactttgctgggcattagcaagcggggtgatcgctatttacgcagtttgctgattcacggggcgcggtcggtggtcacccaagcggcgaagaaagacgaccggctgagtcgatggatcaatcggatccgggccgaacggggcatgaacaaggccacggtggcactggcaaacaagctggcccgaatgggctgggcggtattggcacacaagacggtctatcaggctgcatagcactcatgagaatgggtataacgagtaacaggaggtaacctgccagcgattgcgaagatattgagacaaccgatgacacaacaggtcagaccggcgtattgaaaacctgactaatccgaaggccgaaaagccgataggtcgataaggacgatacgcgcgcatttcatcgaggccagaaacgtgaagacgtttcaccaacaggccggatatacggaagcaagcctgtccctgacatcaatgactcaataccttgcaaaccgggaggagaccatata

SEQ ID NO: 7815 - DNA, 1430 bp, unidentified
  source 1..1430: mol_type = unassigned DNA; note = element_c229f9c
  misc_feature 1: note = core
  misc_feature 2..91: note = LE
  misc_feature 92..1132: note = CDS
  misc_feature 1133..1430: note = RE
  misc_feature 1194..1425: note = bridgeRNA
taatggaatggacgcccactaccctaaaaggcatcgaagtgccaaagtagtggtgcattaaaggccactaaacaagagaggagcgtccgacatgaagattacaacgataggcattgatttggcaaaagaagtatttcagattcacggggtggatatgtacggcaaagctgtgctacgtaagcagctgcgccgtagcgagatggcgaggttctttgccaatcttgatccctgcctggttggcatggaagcctgcggtagttcacaccactgggcgagaaagctgggcgaatttggtcatactgtcaaactcatgtcaccccagttcgtcaaaccttatgtgaagactaacaagcatgacatggcagatgcagaagcggtttgtgaagcagtgagccgacccaacatgcgttttgtaccgatcaaggatgttgagcaacaagcgattctttcgatgcaccgtgccagacagggtttcgtcaaggccagaactgcacaggcaaatcagatgcgtggtttgctctctgagtttggtatcgtgatgcctcaggggatccgatccatcaacaaacgtatgccggatattctggaagatgctgagaatggtttgccaggaactatgcgtcggttgcttgaaagactaaacgatcatctcaaggaattggatcgccaagtggaagaattagagttgcaaatcaagctgtggcataaaaagaacgaagccagcaagaaactggaagccaatcccggtattggcccgatcacagccagcgccattgtggcaacggtctggaatgctacggaattcaagaacggcaggcaactttcagcatggttcggattggttccaaagcaatgctccagcggtggcaagcaaaaattgctcggcatcagtaaacgtggcgacacttacttgcgcactttactgatccacggagcacgagcggttatccgctttgctgagaacaaagttgaaccagagagctggttgagcaaactgatagcgcggcgcaacaagaatgttgccgctgttgctctggcgaacaagaacgtacgtatcatctgggcattgcttgccaaagacactacattccaccccaatcatactgcggcagcatccgctgccgtagcctgatcgtacggatgaatagaagccgtattggtgatgtcgcatcagcaacgagtttaaggagaaaaacttttaccgattgcacaggcaatcatgacatgatggcaagataggtcagaccgtggttgggaaagcccgtactggtacaagcacatcaagcgcgtaaaagtgatagagcctcaaccagcgtattccatcagggacagaggcaatgagcttcacataaagtccggatgtatggctgcaatctttaccttctctaaatcattgactgaaagtttggcataccgtgggtgtccatgta

SEQ ID NO: 7816 - DNA, 1359 bp, unidentified
  source 1..1359: mol_type = unassigned DNA; note = element_c22f637
  misc_feature 1..2: note = core
  misc_feature 3..75: note = LE
  misc_feature 76..1098: note = CDS
  misc_feature 1099..1359: note = RE
  misc_feature 1077..1347: note = bridgeRNA
cgttggggtggacgccccctgacggcatcggcgtgccagagtggaggtgttgtgacaccactgcaggaggcgtccatgggcgaggttagcacggtcggaatcgatctggccaaatcggttttccaagttcacggctccggtccgagtggcgcagtcgtgttccgcaagaagctgcggcgtgatcaggtgctggcgttcttctcgacacttccgcgatgcgtggtcgcgatggaggcgtgcgccagtgctcattactgggcgcgcgagatagccgtggcaggtcacgacacgcggctcatcccaccagcctacgtgaagccgtttgtgaagcggcagaagaacgacatggccgacgcggaagcgatttgcgaggcggcgcagcgcccgacgatgcggttcgtccagggcaagagcgcgcaggctcaagctgcggcagtggtgttccgtacgcgcgacctgctcgtgcgtcagcggacccagttgatcaacgcgctgcgcgggcacctcaccgagtttggatacgtcgttcgccagggggccgggcacgttggccagctcgtcgcgatcgtccgcgaccccacatctgacgttccggccgaggcacggccggtcctggccgtcatcgcggacagcctgcaagcgctccaagcgcagatcgcgcgcctcgaccgcgcgatcgcccagcgtgcgaaggacgatgccgtggctaagcggctgatgacggtaccgggtatcggcccggtggtcgcgaccgcactggtggcactggcaccggccgccagtaccttccgccgcgggcgcgactttgcggcctggctcggcctcgtcccgcggcagcactccagcggcggcaaggagcggctggggcgaacgactaagatgggcgagcgcagcttgcgacggttgctgatcctgggcgcgagttctgcgaccaaggtcgcggcgcgcgctcccgacaaagctggggcgtggttggccggtatgctgtcgcgcaagccgcgcatgctgatcaccgtcgccctggcgaacaagatggcgaggatcgtctgggcgttgatggcccgcggcggctcctacagagctccggccacggcgtgaccgccacggcctgaggcgtcagggaggcagggaaggtcaggcgagaggtatggcgcaacggtcagaagacggggtcgggaaaaccagtgaacgtccaagcgcctcgagcgcgccaaagcgacttggacccgatccgcgatctccatacaggccagcagccgtgaggatggctgcatcgaaaggccggacacacggaagcacctgaacctgcgcgcacagatctctcaaacacccccttgaatccgatggggcgtccacaca

SEQ ID NO: 7817 - DNA, 1508 bp, unidentified
  source 1..1508: mol_type = unassigned DNA; note = element_c2303ec
  misc_feature 1..4: note = core
  misc_feature 5..250: note = LE
  misc_feature 251..1483: note = CDS
  misc_feature 1484..1508: note = RE
gtcactggtccaccctcttctgtgcgggggtcatgagggcctctgtggtaggaaacggtcgggagccggggtgacggcccgcgtcggtcgccgtgagacggccgcgatgacactgccgcccccggttcctgcccggtctgagatcgacgacagagggctgctgcggtgttgagtgccggtcagtgaccactcgactcggggccgggctctcgaccgtgtcctgcccactgtggacaggaaggcgacgaacgtgtcgctggtgggtgccgagtacttcgtggggatcgactgggccgcgacgaaccatgcggtatgcgttctcgactcgtccgggcgtcgagtcaccgggttcggcgtggagcacaccgcggcggggttcaccggtctgatccgccgactcgccaagctgggtgagccgggcggggtgccggtggccatcgagcgcccggacgggcggctggtcgacgcgctgctcgccgccggctacccggtggtggcggtgaagccgaacgcgatcaagacctggcgtgagggtgaggtgatctccggggcgaagtctgatcccggtgacgctcacgtgatcgccgagtacctgcgtctgcgcgcgcatcggctgcgggcggcgacccccctgtccgaggacacccgcgcgctgcgtctggtgtcgcgcacccgctcggatctggtcgccgcccgtgtcgcggcgggcaaccagctcgccgcgctgctggacacggcctggcccggggcgaaggagatcttcgccgaggtgacctcggcgatcagtctggcgttccttcaccgctatccgacccccgatcatgccgcgcacctcggggagaagcggatggcggcgttctgcatcaagcacggctactccggacgtcgcagccccgccgagctgctcacccggctgcgcgccgcaccggccggtgtcagcggcgcagtcgtgtccgacgcgctgcgcgacgccgtcctcgccctgatcgcggtcctgaccgcgctcaacacagcgatcaaggacctcgaccggtccaacgccgcgcacctgcacgcccaccccgacggaaaggtgttcaccagcttcccccgcgccggactggtcaacgccgcccagatccgcgctgagctcgccgaacccgacgcctactccggaccggatgccatcgctgccctcgccgggctggtcccggtcacccgcgcgtcgggcaagcaccacgcggtgagtttccgttgggcctgtaacaagcggctgcgcgtcgcgttgaccaccttcgccgacaattcccgccactccagtccctgggccgccggcatctaccggcgagctatcgccggcggcaaggaccatccgcacgcgatccggatcctcgccagagcctgggttcgagtgatctggcgctgctggaacaacggacagccctacgaccccgcccgccatggcggggcagcccgccaactcaacccaccgaccgcagcctgacgatcttgaggttgacacagagggt

SEQ ID NO: 7818 - DNA, 1203 bp, unidentified
  source 1..1203: mol_type = unassigned DNA; note = element_c23587f
  misc_feature 1..2: note = core
  misc_feature 3..206: note = LE
  misc_feature 207..1181: note = CDS
  misc_feature 1182..1203: note = RE
  misc_feature 12..190: note = bridgeRNA
cttgtatcttgatcgagttggtggttagctactgccagcagaggtgaagaccagcttgggcccacccttaaggctcgaccttggaaggtagatcaagcccttcacctcgttcccacaccataccaaacactggacggtagccaagggcaatgaccctgtatgcacaaggagagtgggtgtgttgatcgagaacacaaggagaaaccatgttttacctgggtatagacgttgccaagaaaacgcttgattgcatgctgctcgatacctcgaccggtaagctgaaatcgaagggcggcatctcaaatacagctgctggctttgtgcagttactaaattggctggcagagaagaatgcagtcgctccacacgtcgtgatggagccaaccgggctgtaccacgaagcggctgcgttagctttggctgatgctggcttgattgtgtccctggttaatccggctcagctgcgcgcttttgcgcagggtctaggcgtgaagaacaagaccgataaggaagacagtgctgtcctcgcccgctttggcgctgcccaaaatcctgcgccatggcagccgccatcgccatcagcacgacgcctcaaagctctactagcgcgacgcgatgctgtcgccgacgatctgcagcgtgaatgcaatcgcaaagaagcaaacgacttcagttcgacaccagaagcggtaagcgactccattgcagaatcgatcgcctttctgaaggctgagcttaagcggctcgaaaagatgattgccaagcacatcaatgacgacccagacctgcgcaagaagaaggagctgctcgaaaccatcccaggtgtcggccggcgtgtttcaacccatatgacgacattatttgctggccgaacgtttgagcgcgccgagcagctggccgcctatctcgggctggtacctgtcgtgtgggagtccggttcctctgtacggggaaggccacatatgtcaaaagctggccccgcctacgtgcgtaaggttctctacatgcctgccgtcgtggcacgaagctgcaatccacatatcaaggcgctgaacgagcgcttgctcgccaagggcaaatctaaaatggccgcaatcggcgccgccatgcgaaaactggtgcacctgtgctttggtgtcatccactccggcaagccctataacccaaattttgcgatgtagggcttgacggccaagacggtat

SEQ ID NO: 7819 - DNA, 1364 bp, unidentified
  source 1..1364: mol_type = unassigned DNA; note = element_c238a68
  misc_feature 1..2: note = core
  misc_feature 3..79: note = LE
  misc_feature 80..1114: note = CDS
  misc_feature 1115..1364: note = RE
  misc_feature 1157..1359: note = bridgeRNA
tgatgtgatggacgcacctcccttctagcgtcgttgtaccaaactaatagtacaaccagtgagaacaggagtaacaagtatgtctattaaagttgtcggtatcgatatagcaaaaaatctcttccaagtatgtgtgttgagtactgatggacaaattttgtcaaacagaaagataaagcgagataagcttcttgatactatccgccaactaccagagcaaactgctcttgcaatggaatcatgtgcaacttctcatcattggggcagaatatttcaagagttgggatatacagtagcgcttattccagctcagcacgtaaaaccatttgttgggcggcaaaagaacgacgccaatgatgcaagagctatttgcgaagccttttctagacctgacatttatttcgttcctgttaaatctgttgagcaacaagacctcaaagcgatacgcagtgtccgtaaacgtttggtggagaacagaactgccttggcgaaccagatcaggggattggctgctgagtacggtgttgtatttcctatttccattaaagctttacggtgtcatttaccgctagctcttgaagatgcagagaatgagctttctccagtaattaggaacttactgcaaactttatactatgactttatcagcctaagcgaagagatagatgaaatgactcaaagtgtcaccatgttgagtcagcaaaacccaaggtatgaggctattcggaatattcctggttttgggccgattttgacagcagcactgattagtgaagtaggagctggaaaccaattccaaaatggtcgccagttctctgcatggtgtgggctggttcctaaacaaaatagtacaggcggaaaaagtactcttggctctctatcgaaaaatggcaatcgtgaattaagaacattacttattcacggtgctcgcgcagtggttcggtgcggagctaaaaaatcggatgctatgggagcatggttaagaggactcattgcacgccgaggcaaagcaaaagcgattgtcgctcttgcaaacaaactaggtcgggtaacatggcacatcttggcgaaaaatagtgaatacgatattaatcaggcttttaagcctgtttgattaaaaatagtaagttcaaggggaattttcttaagaagcaactgagtttgcaatagctgatgaataaacggtgaaccatccttactacactctgatacgcaacagggttattgaaaccgtggctttgaaaagacagtaaggggcggattacatcatggcgcaggtctattatcgatctagaaagacgtcggatatatgttagcgaccgtactcttcaattagccattgcatcctgaggtgcgtccatata

SEQ ID NO: 7820 - DNA, 1427 bp, unidentified
  source 1..1427: mol_type = unassigned DNA; note = element_c2476c9
  misc_feature 1..2: note = core
  misc_feature 3..220: note = LE
  misc_feature 221..1411: note = CDS
  misc_feature 1412..1427: note = RE
ctgatataccgccttgtggaggtcgatgatggcaccgacctccacggggagaccggcgaccggctatccggcagatgaccgttggccctagtttccggcccccgacctctggccgtgaacggtgattgggatccggcggctttgaccggtgatcggatacatcagctgacgtcgaccggagagcacgggtacccgttggtggccgggaaggaagcgcccggtgacgacgatcgggattgacatcggcggacggacacatgcggtggcgcgttgccgggatggtcaggcgcgggccgatcgggagatcctccgggttagccagagccgagcaggcttcgccgccctcgacacctggctcgagcgccaggctgaaccggtgaccctcgtgacgatggagtcatccggtcactactggatgtcgctcgcgagccaccttgggcggcacgacatcccggtcgcggtggtcaacccgctcgcggcgaagtactttgcgcggagccggctcagccggaccaagtccgacccggccgatgcccggagcctcgccgagatggccatgcgcgacacgccacccgcccgcgatccgctcaccggggtcgagctgcgtcaggccgcccgcttcgcgatgaccctggtcaccgagcaggcgaaggtctgccagaggctcatccggctcgtcgaactcggcttccccgagctcggcgagctgttcgaggacccgacctgccggacggcccgggcggtcctccggatcgccccgacggcgcgggccgcgagccgccgtcggacgagcaccctcgccgccgcgaacgcagggccaggacaccgtcggctcggcccggccagggccgagcggctccaggccgcggcggccgactcgatcgccgtgcccgagctcgacgccgaggtcgccttcgaggtcggcctcctgctcgaccagtacgacctgctcgaggaccagatcgaggacgctgaccggcgggtcgccagtctgctcgacggcgagaccgcccgtcggctccggacgatcccgggggtcggccccgcgatcgcggcgaccctccttgccgagatcggcgacatcgcccggttcaccgacttcgaccagctcctcgcgtacgccggcgtccacccggccgagcgcagctcgggtcgcaagggcgccaaccccgagaccgcctggcacatgtcaaaggccggcaacagccatctgcgcgcggccgcctatcggatggccattgtcggggtcgggcacaacccggtcatcgccagccactacgcccgcaaacgcgcagccggcaagagcaagatgaacgccctcggccattgcatgcgcaaggccctcagcctcgtctggggcgtctggcgcaacggccaggatttcgaccccaactggggggccgaggcttgacaagaccctatgggat

SEQ ID NO: 7821 - DNA, 1355 bp, unidentified
  source 1..1355: mol_type = unassigned DNA; note = element_c262bcc
  misc_feature 1..2: note = core
  misc_feature 3..79: note = LE
  misc_feature 80..1114: note = CDS
  misc_feature 1115..1355: note = RE
  misc_feature 1148..1350: note = bridgeRNA
tgatgtgatggacgcacctcctttttagcgtcgttgcaccaaactaatggtgcagccattgagaacaggagtaacaagcatgtctattaaagttgttggtatcgatctagccaaaaccctctttcaggtatgcgtactgagtactgatggaaaaatagtatctaatcgcaaggttaagcgggataaattacttgatacaatacgtcagttgccggataagacagctcttgctatggagtcttgtgcaacgtctcatcattggggaagagcgtttcaacaactagggtttagcgtcacacttattcctgcacaacacgttaagccctttgtaggaagacaaaagaatgatgccaacgatgcaagggcaatctgtgaagcattttcaagacccgatattcattttgtccccgttaaatctgttgagcaacaagatctaaaagcattgcgtagcgtccgtaaacgcttggtagaacaaagaacagcacttgctaatcagataagaggcttagtcgctgaatatggcattattttccctcaatctattaaggtgctacggagccagttgccgctagccattgaagatgcagaaaatgaactctcttatgtcatgagggggttactgcaaacgctatatagtgaattcatcgatattagtgggaaaattgatgaattcactcagaagataacagcgttaggtcagctgcaccctcggtatagcgccattaaaagcattcctggttttgggccaatattgaccgctgcgcttatcagcgaaattggctctggcaaacagttcaaaaatggtcgtcagttttctgcatggtgcggattagtccctaaacaaaatagtacgggtggaaaaagtagcctcggagcaatatcgaagaatggtaatcgtgacttaagaacattgttcattcatggtgcccgtgcagttgtccgatgcgggacagataaagagaatgctatgggctattggttgagaggtcttatcgctcgacgaggcaaagccaagactatcgttgctctagcaaacaagctcggccgcatagcatggcacgttttagcaaaaaatactgaatatgacatcaatcaggctttcaaccctgtgtaaattggataaaaggaatacattctaaacggcaactgagtctgcaatagttgatgaagaaacggtgaaccatccttactacactctgattaggaaaccggtcttatagaccgaggctttgaatagacagtaaggagcgaattacatcatggcgctggtctttaattgaccaagaaagacgccgaatatatgttagcgaccgtacccttcaattagccattgcatcctgaggtgcgtccatata

SEQ ID NO: 7822 - DNA, 1357 bp, unidentified
  source 1..1357: mol_type = unassigned DNA; note = element_c267b02
  misc_feature 1..2: note = core
  misc_feature 3..85: note = LE
  misc_feature 86..1105: note = CDS
  misc_feature 1106..1357: note = RE
  misc_feature 1090..1344: note = bridgeRNA
tgatggtatggacgccccctattacggcgtcgagtgcgccagaatggagtttggtttcaaactccagacagagggagcgtccacgatggatattacaacaatcggttttgatctggcaaagacggtgttccaggttcacggtgctgatggtgaagggcgagtggtgctgcgccggaagttgcgacgcgggaaggtgctggcgtttttcgccggattgccatcgtgtcttatcggtatggaagcctgcgcctctgcgcactactgggcgcgtgagttacaagcgctgggccatgaggtccggctgatcccgcctcagtacgttcgtcccttcgttaagacgaacaagaacgacgcggcggatgcggaagcgatctgcgaggcggtgacgcgtccgacgatgcggtttgcgccggcaaaaagcgccgagcagcaatcggttctgatgctgcatcgggcgcgtgagttgctggtccgtcaacgtaccatggtgatcaatgcgcttcgcagccattgtgcggaactcggactgatcgtcgctcaaggggcgtcgaaggtggaggaactggttgcgatcatcgaagatcccggcgatgggcgactgccgcctctggcgcgcgaggcgcttggcatgctggttgagcagctccgttctgctcaggtccggatcaaggcgctggaggcgacacttatggcatggcaccgctccaaccaggcgagccgccgtcttgcgacgatccccggcgtcggtgtcatcaccgcgacggcgctggtcgcgacgatcggagatggcgcacagttccgctcgggccggcagctctcggcctggctcggtctcgtgccccggcaacactcaagcggcggcaaggacaagctggggcgtatatcgaagcgcggggatggctatatcaggcgcttgcttgtgcacggtgcacggacggttctgcgctggcgccgcgcgaagccgagcacgcgtcccggctggaccgaccaactcctggcgcggcggccgacaaacgttgtcctggtcgccatggccaacaaaacagcccgcgtcgcctgggcactgctcaggtacgagcgtatctaccaaccaacgctggcatagccagctgccaagccggcaccaaattgcgagggtaacaacgatttgatggcgaaacagggttccacccgagatcggccaaacccgaggcattgtccgagcatcaagctcgttagtctgactgggcgtcgatctttcggattccatcagggccagcggtcagcgtaccgcagagaaaaggccggatacatgactgcaagctctaccgctgtttcaaatcagttttccccttgcaacaccgggggcgtccataca

SEQ ID NO: 7823 - DNA, 1436 bp, unidentified
  source 1..1436: mol_type = unassigned DNA; note = element_c268729
  misc_feature 1..2: note = core
  misc_feature 3..6: note = LE
  misc_feature 7..1185: note = CDS
  misc_feature 1186..1436: note = RE
  misc_feature 1254..1375: note = bridgeRNA
taatcgatggactcgcccccgccgaggcatcacagtgccacggtggcgttcgaagaagccaacggcagcgagggcgagaccatgaaaaagcatagttccaagcaagcttctctgtcttccactgatgtggaatcttgcaccaccattgcgatcgacctggccaaacaggtctttcaattggcaggtgaggatgctactggcagggttatctacgaagatcgcattaaatcgcggcaagctttccacgatttcctgatcagattgccctccacagtggccgtcttgatggagtgcggccctggtgcacaagcctgggcaaggctgttgcagacccaaggtaacccagtgcgtattcttcctgcgcagcgcgttgccgaacaccgcagcggtgcaaagaacgaccgcaacgacacccatgccattttgcgtgccggccgagatagcagcatcgcggcgatacccatcaagagcaccgcagcattggccatccaggccctgcaccgtgttcggcgcggcagcatcaagcggcatacagccttgggtaatcagatgcgtggcttgctgcttgagcacggcgtatccatgccgcagggcgatgcagcgatcatcaagcatgtgccgcggtgcctggaggatgcttctttgcctttgccagacttgttgcgcgagctgctcgatgagctgttggctgactggctgtccctgggtgagcgcatcgcccggttgagtaagcggctggaagcgacagctcgcgaggacaaggttgcgcagagactgatcaccattcgtggcgtcggcgccatcaccgccaccgcgattgtcgcgaagcagacagagcccagccgtttcgccagtggccgaatgtattcagccttcttcggcatcgtgcccgaccagcacagcagcggaaacaaggtcagattgggcaggatgagcaaacgaggtgatggctacatacgcagcctgatgattcagggcgcgcatgctgtcttgagtcagctaaagcctgattccgatcagccagacgatcgccgcctcttacgctggctgtctcgccttggacgcaaggaggcggcgatcagactggctaatcggaatctgcgcatcatctgggcgctgttgcagagcgatcaggtttatcaacgcaaaccgaacagcaagccggaggcggctatgagcctctgaccaaccgagtaatgccaccggggcgctaagcgctccaacccctgctagtgaacatcgacccttggtaagaccgtcgcagattgatgcctccgctcctacaggcctgttagtggcctcaatgtaaacggcactctgcgagctcaccacgatggtggccagaagcaaaaagcttcctcgaataggcctgatacatagatgcaaccgggttcctatgttcaaaagcagctagacagtgtgggcgagtccataca

SEQ ID NO: 7824 - DNA, 1533 bp, unidentified
  source 1..1533: mol_type = unassigned DNA; note = element_c2690bd
  misc_feature 1: note = core
  misc_feature 2..119: note = LE
  misc_feature 120..1148: note = CDS
  misc_feature 1149..1533: note = RE
  misc_feature 1192..1459: note = bridgeRNA
gaatgaaagggacttccccgtcccgagagagagccgcatttgcgggatagggcatcaaagtgccacgatgggaagtgcgaactctcatcaactcactctttttgtggaaggggaaatccatgacaatcgtaacgcttggcattgatctggcaaagaacgtttttgccgtgcatggcgtggatgcggcaggcaagcccgcactggtgcggccgaacgtggcgcgtagcaaactgctggaactcatcgcctcgttgccaccctgtttgatcggcatggaggcctgctcgggggctcaccactgggcacgcgagtttgcgcagttcggccacaccgtacggctgatggccccgaagtttgtggccccataccgcctgtcgggcaagcgcggcaaaaatgatgccgctgacgccattgccatctgcgaggccgtcacccgccccacgatgcgctttgtacccatcaagagcgtcgagcaacaaggccagctgatgctgcatcgtgcgcgccagggctttgttgaacaacgcaccgccacgtttaaccgcatccgtggcctgctctcggagctgggtattgtgttgcccgtcaaggccgctgtggtgcgccgcgaagcgcttgcgcatcttgaggccctgcccggttgggccaacatcgtggtgggggatttgttgagcgagatcaatcgactggatgaacgcattgcccagtacgatcaacacattcaggccatggctggtcagagcgcgcccgcgcagcggttgatgcggctggcgggcattggcgagattaccgctacagctatcgtgagcactgtgggcaatggacatgagtttgcctgtgggcgccagttctgcgcctggctcgggttggtgccagggcagtacagctccggcggcaaggcgcgcctggggcgcatcaccaaggcgggggatccgtatctgcgcagtttgctggtgatgggggcacgagcggtgctggcgctggcgatgcgcaaagatcaccccagacaagactcgctgagccgttgggcgcgcggcgtggctgagcggcgcggttactggcgagccattgtggccattgcagcgaagaacgctcgactgtgctgggcagtgcttcatcacggcgagcgcttcaaggtgcccgcctgagcgcgcccacgactgactactcagcacgacagcaccgatcaatctatccgccgcgtgaaggcttgtcgttgatgtgcaaagggttggacctgcgccggggagtgctcgattaaatcaaggggacaagtcaggagccatcctgcaacgcccgactaacgagtggagcccccggcgcgcgtctttcatcagggtccgctgcaagaatgcagcatcaatgaccgtttgtagtaccgccgtccgtaccgtttgcagccaatcatcagcgccacaccgcacaaggcgaatcattgatccgacccgacatcggctaaaccaccaatccggtcaatagctacgctatcgaccgatgaacgcttttgcttgcaatgcgcgggaagcccttgta

SEQ ID NO: 7825 - DNA, 1203 bp, unidentified
  source 1..1203: mol_type = unassigned DNA; note = element_c26affb
  misc_feature 1..2: note = core
  misc_feature 3..187: note = LE
  misc_feature 188..1168: note = CDS
  misc_feature 1169..1203: note = RE
  misc_feature 12..196: note = bridgeRNA
cttgtatctctccagatagagtaatatgctgttattctatcacaagaattgagagagtttggttccgcccttagagtaataactctgtttcgtagatgaaaccctcaattcattttatctaaataaactggatggtatccaagtgcctttttaaaagtgacactgcatccacaaggggagttattagatgacatactttattggtattgatgttgcaaaagataagcttgattgtttatggttgagagatattgagtctctcaaaataaaaaccaaggttttacctaattcagcaaagggatttaatgatttaaaactttggtttgagaaaaatgtatcttctgatttatctcttattcatgtctgtcttgaagcaactggtgtttaccatgaagcattggcttatgcactgtttgaaatgggtgtaaaagttagcgtagttaatccagctttcatcagagattttgctaaagggcttggtgttcgtagtaaaacagataaaaaggatagtatggtattagctcgttactgtgctttaacctctcccagattatgggagcctgagtctgtagatatcagaaagctcaaggctttattggcaaggcttgcagggttaaataaggacttgcaacgtgagtctaaccgtttggaaaaagcatctattagtcaagcttctactgcggtcattgagtcgcacaaactgattattgaacagcttcaaaaagaaattgaacggatgaaaaaacagattgaagatgatgttgaccaaaacccggatattaaaaataaccgagaattattaaagactattcctggtattggagaggttctatccttggagatgttagctgtgctaaagagtcgatgttttgtaaaagctagtcaggcagcagcatttattggtgtggttcccaagctatgggaatcgggaaaaatgaaaggtaggacgacattgtgtaaaaatggctctgctcgtttacgttcaattttatatatggctgctattgttgcaactaaatacaatcctgatattaatgcacaatatgagagattgttggctgctggaaaaaccaagatgcaggcgcttggagctgcgatgagaaagctagtacagatttgttttggtgtgttgaaacatcagagcgaataccgacctcaaatttgttaaatttaacatttgaaatcggttcggagagatggtat

SEQ ID NO: 7826 - DNA, 1341 bp, unidentified
  source 1..1341: mol_type = unassigned DNA; note = element_c26e6e6
  misc_feature 1..2: note = core
  misc_feature 3..81: note = LE
  misc_feature 82..1098: note = CDS
  misc_feature 1099..1341: note = RE
  misc_feature 1106..1337: note = bridgeRNA
ttaatgagatggtcagcccggtgagatcctcggcgggtctaaacttgccgaggctctctttttactgaaggaggatttctcatgaataccatcacgctcttgggtatcgacatcggcaaacacactttccacctgcatggccaagacgccagaggccatcaggtactgcgtaaaaaactcaaccgaaaccaattactcccctttctggcgcagatctcgatctgcaaaatcgccatggaatcctgcggcgggtctcaatggctcgcccgaaaaatcatggaacaggggcatcacgtgcagttgattgccccccaacatgtgaaggcctacgtcaccggaaataaaaacgatttcattgatgccgaggccatttgtgaagcggcctcgcgccccagaacccgctcggttcaagtcaaaaccgtagaacagcaggtactgtccacagaacaccgactgcgcaagtctttagtaaatcgacgcaccgccgtcatcaatcaagtgcatggatttctcctggagttcggcgtcgtttttcccgttggatacgccgcactggatcggctctcaggtctgatggagagccgtgaactgcccactcgcttgataagtgctatcgaacgcatgcttgaagacattcggcagctgacacatgagatcaaaaaactcgacgtcgaaatcaaacaacagctgacgcaaaacgatgccggccaacgcctgcagagcatccccggtatcggccctctcatcgctagcgcgctggtggccgatgtcggcgacgcttcgattttcaagtcatctcgcgattttgcagcgtcgttggggctggtgccgcgccagtactcaacgggtggggaaacgacattgctcggcatcagcaagcgaggggacaagtatttaaggagtttgctgatgcagggcgctcacgccgttttgtgtcgcgtcgataagcgaacggatgccctcggtgtctgggccaaaaacttactagcacgcaaacatccaaacaaagtggcctgcgccctcgcgaacaaaatggcaagaatcgtctgggtgttgttaaccaagggcggcaccttcaactcaacgctcttagcttgatctgtacgcttcaccaacggcttttgcgacgtcagtactgatgacgataaacggcagacatcctgactgaaaacctgataacccaaaaagctttggaagctgaagcctttttaaggacaggcaggagcgactactcatcaagggccgagcgctatccgtgctcacactgagcccggatacattagcgcaagctcgatttaccgttaatcgctgctgagtggcagaagatgggctgaccataca

SEQ ID NO: 7827 - DNA, 1417 bp, unidentified
  source 1..1417: mol_type = unassigned DNA; note = element_c26fb57
  misc_feature 1: note = core
  misc_feature 2..225: note = LE
  misc_feature 226..1404: note = CDS
  misc_feature 1405..1417: note = RE
  misc_feature 14..239: note = bridgeRNA
ctacttgtttcattgacgtcatggccgggatctgacgaggctcggtctaggcgttcggggttgtcgctctcatttcggctgctcacctcggtgtggctctcatttggcctgcgcatccccggacgtcgccagagcggaagtggctcaagaggggtttgccctagctcgaagtagcgttgccctccccgctcgacaaccccatcaggttcgagttcggaggacaacatggaaggcacgccagcacgagtggtcatagggatggacgcgcacaaacgctcggtcacgatcgaagtcatgaccggtggcgaatccatcgtcgggaaaggacgactcgcgaccgaccgtgacggtcttgccgcgatgcgccggtacgtgcaggcgtggccggagcatgtctgggcgaccgagggatgccaaggcatcggccggcacgtggccaaccggctactggccgaaggcgagcaggtcctcgacgtcccgccgaagctgtccgcgcgggcgcgggtgttcgccaccggtcagggccgcaagaccgatgccaccgatgcgcactcggtggcgctggtgggcacccggatgagtgggctgcgcccggtcgtcaacgacgagcagctggcggtgctgcggattctggtcgaccggcgccgatccctgggcgaggagcacacccgcaagatgtcccaggtccaccacctgctcctggagttgatcccgggcggggcgaagaaggaactgtccgcggcacaggccaaggcgctgctggcaaccgtccgcccccgtgacgctgcgggcaagacccggcgtcgcgtcgcggccgaactggtcgtggacctcgagcggatctatcagcgcaagaaggccgcgaacaaggaactgaccgctctggtcgccgcgaccggcaccaccctgatggacctgaacgggatcggcccgtccagcgcggcccggctgctggtcgaggtcggtgacatcacccggttcccggacaacaaccacttcggctcctggacaggcaccgcagccatcgatgcctcctcgggggacaacgtccgccaccgtttgtcccgaggcggcaaccgtcagatcaaccgggtgctgcacatcatggctaccgtgcagctgcgtaatcccaccgagggccgcgcgtacttcgaccgctgcaaggctcgagggaagacctcgaacgagtcgatgcggccgctcaaacgccgactgtccgacatcgtgtatcggaccatggtcaacgacgctgcacgacacatggcgacgggcccgggagggcaacgaggcaacgactctgactccagcgcggtcggctcacaacctcacaccaactcttcggacaagccacttcccggacccgccaccacccaccgtagaacccgacttgccgccgcgtcttgacacagagaggagc

SEQ ID NO: 7828 - DNA, 1537 bp, unidentified
  source 1..1537: mol_type = unassigned DNA; note = element_c27390e
  misc_feature 1: note = core
  misc_feature 2..252: note = LE
  misc_feature 253..1026: note = CDS
  misc_feature 1027..1537: note = RE
  misc_feature 1302..1528: note = bridgeRNA
taatgggatggccgggccgtgctcccgccccgcgagagatagaatctcgcagggaattatcaacatgaggagcacgtcccatgtcgcgtgaagcaatgccatccaccatcaccacgatcggcatcgatatcggcaagaatacgttccacctgatcggcctcgatcagcacggggcgattgttttgcgattgaaggtctcgcgggcgcaactcgagcggcggctggtgaacatttcgcgctgtctgatcggcaatggaggcctgttccggagcgcaccatattgcgcgtaggctcgaagctctcggtcacgacgtgcggctgatcccggcgcaatacgtgaagccctttctcaaggggcacaaaaacgactatcgcgatgccgaggcaatcgcagaagccgtgcagcggccggccatccggtttgtggcgatcaagacgccggagcagatggatttactggctctgcatcgcgtgcgctcgcggctcgtccgactgcgcaccggagtgattaatcagatcagagggttcctgatcgagcgcggcatcgcagtcaggcaacggccgacgcccttgtccaaggcgctgtctgatatcctgagatccggctcagaggctctctcgccacggctggctcgtctcattgctgacctagtcgaggactggcgccgattgaatgatcgcatcgcgatagtatcggccgagactgaagcgcgggccaaacaggacggtcactgccagcgtctgatggcggtgccgggtatcgggccaatcatctcaagcggtgtggtggcggcgatcggtaacggcaatggcttcagacagggacgcgactttggcgcatggctggggctcgtgccaacacaagagccgaccggggatcgcacgatcctggggaagatctccaaacgcggagacaagtatctgagaacgcggttcgtgcaggctggtcacgttatcctggcgcgccgaccgagtgccgcgatggggtctgtggccctggatcgagcaggcatcgaagcggcttaaccgcaacatgctggcgatcgcgctcgccaacaagcttgcacgcgtcgtctgggccatgcttgcccgcggttgcccctatcagccgagggtcatcaccaatgtcgcatgatcaatgcgcgcttaagttcaccaaggggatgcgccccatccctcttcgccaccgctcgctcgccacatagggcgagcgagcgacggtcgctccgaggggatggcttctcgtgatccccgacaccagcaacggaacagagacaaacagtttgatatattagcaactttcccgccgaggtctgcgagatggaatgaagctatggacgaacggtctgcccggcgcagccaagaggctcggtgccatgatgatccaacgaggtcgttccgttagtcagcctggatgcgcgcggaacccatgacggccgggagcgcgaagctccccctcagaggctaatacattgttgcagctctcacgttcgacgatcttggatctctgtcttgcgacgcacggccgggccataca

SEQ ID NO: 7829 - DNA, 1332 bp, unidentified
  source 1..1332: mol_type = unassigned DNA; note = element_c2765c0
  misc_feature 1..2: note = core
  misc_feature 3..256: note = LE
  misc_feature 257..1318: note = CDS
  misc_feature 1319..1332: note = RE
  misc_feature 23..259: note = bridgeRNA
ccgacttatgttcgtgtcaccggttcggctgcggattcggtccgtagcgttcggtagcagaccagaagggctgactcgcgaaattcctgtcacccgttggttggggttgaccctagtggggtgtgtccgcccttccggtctacgttcgcggagtgactgaagagaggcgtgactgcaagctgctgtgagaggtacttgaagtcggattgtcctccgcggattcccccgtccgtgcagagaagggaacccgacttccatgatcgtcattggtatcgatcctcacaagtccagccacaccgccaccgcgatcgatccggctaccaacaccgaccttggctcgatccgcatcgacgccactgtcgctggctacaaggcgatgatcgcctgggcgaaggcctggcctgagcgcaagtgggcactggagaacgcagagggattgggccatcacctggcgcagtggttgctggtcctcggtgaggtggttctcgacgtcccgaccaccgccaccgcccgggttcggcaactctcccgcggcggacgccgcaagaacgaccgtatcgacgccgccgcagcggcctgtgtcgccgtactgcagggcgatgcccgcccggtggacccggagggttccgccgatgtcttggctctgctcgatgaacgtcgaaccaatctgtgtaacagtcgcactcgtttggtcaatcaactgcacgcgctgttgcggcagctgctggccggcggtgcaccgacctcgctgaccgcgaccgctgccagctcggtgctgcggggttttcgtgcccgcagcgagatcgaccgcattcgtgtcgggctgtgtcgcgacctgatcgccgacatcggtcgacttgatgaccggctcaccgacaacggcaagcagatgacgcgagcactcgacgagcatggcacaagtttgcggggggtcgacgggatcggtccagtgtccgccgcccggttgatcggccgcaccgggcgcgcgagcaggttcgcgaccgctgctgcgtttgcgaactacaacgggacggcacccgtccaggtcgccagcgccgactccaatcggcaccgactgtcccgctacggcgaccggcagctgaactcagcgctgcacaccatcgcgatggtccagatccggatgcccgccagcgctgggcgcgcgtattacgacaagaaggtcgccgagggcaagagcccccgcgcggccaggcgcagcctgaaacgacacctgtccgatcacgtctggcgcatcatgatcgccgacgaaaaacgcagtcacaggcaacgcgccaaggaacccgccagcgccgcttgacaaatagagaggca

SEQ ID NO: 7830 - DNA, 1388 bp, unidentified
  source 1..1388: mol_type = unassigned DNA; note = element_c282630
  misc_feature 1: note = core
  misc_feature 2..89: note = LE
  misc_feature 90..1121: note = CDS
  misc_feature 1122..1388: note = RE
  misc_feature 1163..1383: note = bridgeRNA
caatgggatggactcctcctcttccatcggcatcgatgtgccagactggttttaggccaccagtcgaggataagcaggaggagtccaccatgaatattagtcgaattggcgttgatctggcgaagaatgtgtttcaagttcacggcacagacaatcagggtcacgtgacctggaaaagaaagctcagccgggagaagtggatagccgcggtctgcaggacagttcccaagggtagcgaggtcggcatggaggcctgcgctggcgcccaccactgggcgaggcgattgtccgagcatggctaccaggtaaaactcatcccgccacagttcgtcattccgtacgtcaagagcaacaagaatgacgctaacgacgcggaggcgatctgcgaggccatgagccgccctaacatgcgcttcgtcaaggtgaaaaccgtggagcagcaggatattcaggcgattcatcgagttcgcagtgagttgatgagccagcgcacggcgaagattaaccagatacgggggctggtggcggaatacggactggtggccccgaagcaggccgaatcattgcgaaaagccctgccgcgctggctggaagatgccgagaatggactaacaccgcggttcaggcacttgctgcacggtctctcccaagaccttggttatctgtatgatcgcatcgccaggctggatcaggagatcaaggaaatcgcaaatggtgatccgatggcggtccggctgcagcaattgcggggggtggggccgctggttgccacggcgctgattgccgccgtgggcgatggccggcagtttgcgaagggacgtcagatggccgcagccatcggcctgacgccaaggcagttcagctccggcggcaaggacaagctgctggggatcagcaagcgtggcgacgcctatctgcgcacgatactcattcacggggcgagagccgcggtctacaaggcgaagatgcgcgatgacaggttgagtacctgggtgacggatttagcaaagcgacggcacgtcaacgtggcggcggtggccctggccaataagaccgtccggatagcctgggcgatgatgagaaacaacgtggattacgacccggaatacgcggtagcgtagtgaataatggtccgagagggcgagtaaagaggagttctatctacggttgcgaagcaagctgactaatggtgaatcggtcgaaccggcactggaggaacccgaaaatgtccgcgtactgacagtacggcaaagcgattgggacccggtgcgcgaatagcccattatggcccggcatctgcgtatgccacctgagaggccggatatacgtatgcagtcgagccaaatcaccgaagacagcctgcttgcaagcgaggaggagtccatata

SEQ ID NO: 7831 - DNA, 1170 bp, unidentified
  source 1..1170: mol_type = unassigned DNA; note = element_c2859d2
  misc_feature 1..2: note = core
  misc_feature 3..180: note = LE
  misc_feature 181..1149: note = CDS
  misc_feature 1150..1170: note = RE
  misc_feature 35..201: note = bridgeRNA
cttgtatcttgaaactcagttagtatggttttggattagatttggcacagcatgtgcagcctgaccttccctagggttcaaagcccgagatacagcgaccggcgcacatgctgagccactcatctgaaacccgaacagttatccgtattttccataacgtatttgcaaggatgggtaataatgaggctgccaaatccactctgcgtgggcattgatgtttctaaagcaacacttgatatcgctgctaccgctgaaatcgaacagttcacgaccagaaatgattccgatggttttgatgagatcatcaataaactcaaagagtgtcgtatctctcttgtgcttatggaggctactggtggctttgaagcagcaatagcttgctcgcttcaggctgcgggttttgatgtaacggtgatcaacccaaggcaagcgcgtgattttgctcgcgctatggggtatctggccaaaaccgatcgcattgatgccagggttcttgctcaaatggccgaggtaatcaacaagcatccagatagagaacgcttcattcgccccattcaggatgctgaacgacaagttctcactgcaatggtagttcgacgtcgccagttgatagccatgcatgtagctgaacgaaacaggcttcacccagcacaccctcaaagcagaaagagcatcaacattatcataaaagctctcgacgatgagcttgccagagtcgatgctgagatgagtaaacacgttcaaaaccacttcaaagagcttgctgacagactcaacactttcaaaggtgttggtattagaacgaccgccagcctgctcgcagaagttccagagcttggcaatctcacacgcagagagattagcgcgctcgttggtgtggctcctgttaaccgtgattcaggaacgatgcgcgggcgaagaaccatatttggcggaagaattggtgcgcgaaccgcactgtatatggccgctcttgttgctaccagatttaaccctgtgattaaagcgttctacagcaggcttttggccgttggaaagccaaagaaagttgcacttgttgcctgcatgagaaagctgctgacaatcctgaatgcgatgctcaggaagaacgaagaatgggatatgtcataccattcggtatctctttgattttatcattcaagacagttg

SEQ ID NO: 7832 - DNA, 1317 bp, unidentified
  source 1..1317: mol_type = unassigned DNA; note = element_c287f91
  misc_feature 1: note = core
  misc_feature 2..246: note = LE
  misc_feature 247..1311: note = CDS
  misc_feature 1312..1317: note = RE
  misc_feature 37..243: note = bridgeRNA
ctattggtgcacagtgttaaggccggacggcttcgacgggagtcaatccggtgggctgctgggtgactcggaaaacacgtgccgcacatggcttcccgttgatttgtccacggcagcctaggggcgagtgccctgaccggtgtgacctgatagaagcctgctgagccgtcaactcgcaataggtctgtccaccgggcagagccctcgccatcgtcccgtcacccgattgaacgaagggacgtttcgatggtgacagtagggatcgacccacacaagcgtgtccatgtcgcggtggcagtcgatgctcgcggtaatcgcattggcaagccgctgaccgtgaaaaacgacgggctgctgattatcgcgctactcacatggatccgctcaatcacggacagcaagtcggtgacctgggccgtcgaagacggtcgcggcttcgcccgccggttggccgatggactgctgcttgccggtcaagaggtggtaggggttcccagccggctgaccgccgcgcatcgcaagttgcacgccgctacgggctccaaatcggatgtcatcgacgccattgcggcagcacatgccgcgatcgcgacaccggatctgacccgccaccacattgatgagcggattcgtgaactccgtgttttaactgactaccgttcggaccttgtcaaacgtcggaccacgatgattaaccagctcaaggcgcaatcgcatctatggcttgaccacacgccgggcgatctggcgcggaccaaggctctggtgacgctgaccgcacgactcgacgccgtgcaggtgggcgcccacgtccgtcatgtgatcgtcgagatgatcagcgagctcgctgaggtcaaccaacgtatccatgatctcgacgccatgatcaaagagctcgtcagccccctcgcgcccaacttgctggcaatcaccgggatcagccataactctgcggcggtgttgctcgccgaaatcggtgacatcacacggttttcaagctcggccaaactggcccgctacaccggctgcgctccaatcccggtctattcgtccgacgaggaacgtcaccgccttcaccggggagggaaccgccgcctcaacagcgtcctctacaccgccgccatcgtgcagaagcgcttcagtccggccgcccaacacctcatcgcacgccaggagcccgtgaagggcgcccgtggcgccagacgtatcctcaaacgccaccttgtcgatgtgatctaccgagctatgcacactgatcaagcttcctggcagcaccagatcaccagataccaaccgctcgcgttgacatagaagcat

SEQ ID NO: 7833 - DNA, 1382 bp, unidentified
  source 1..1382: mol_type = unassigned DNA; note = element_c2902d5
  misc_feature 1..3: note = core
  misc_feature 4..89: note = LE
  misc_feature 90..1121: note = CDS
  misc_feature 1122..1382: note = RE
  misc_feature 1150..1371: note = bridgeRNA
atgatgctgtggacggctccccccaccggcacgtaagtgccattgaagtgatcgccgctggggcggtcgcggttttgggggagcgaagcatggaagcgatcacgaccgtcggtctcgacatcgcaaagtcggtctttcaagtccatggcgtcgatgcggcaggcgtcgttgttgtccgccgtcaactgaagcgccggcatgttctggcgttctttcagaagctcgcgccatgcctggtcgggatcgaggcctgcgccacatcgcatcattggtcgcgagagattgcggcacttggccataccgtgcggctgatgccaccggcctacgtgaagccctacgtaaagcgacagaagaacgatgccgccgatgctgaggcgatctgcgaggcggtgaccagggcaaacatgcggttcgtggagaccaagacgcgcgagcagcaggcctgcctaatgctccaccgaacgcgccatctgttcatcaaacagcagaccagcgtgatcaactcgatccgcgcccatcttgccgagttcgggatcgtcgcgcgggtcggccgcaatggcgtcgaggagctgctcagaatcgccgccggtccaggcgacgcgcgcgtccccgaagcggcgcgtatgtgcatcgccgctctgggcgtgcagctgcgcattctgaaggctcagattctcgagttcgaccgccggatcatagcctggcatcgttccaatgagacgagcaagcggctcgatcagattccgggtgtcggcccggcgttggccacggcattggtcgccagcgtgcctgatccaaaggcgttccgttcagggagacacttctcggcctggattggactcgtgccgcggcaacactcgagcggcggcaaggacaggctcggcagcatcagcaagcaaggcgaccgctatctacgcggcctgttcaccgccggcgcgctcgccgtcattcgctatgccaagatccacggcatcgggcatcgtccatggctcaccaccttgctggcgcgccggcctacaaaggtcgcggcgatcgctctcgcgaacaagctcgcgaggatggcctgggcgatgatggcgaagggtgagcgctacaaggaaccagccgcattggcggcatgaaccagatcacgccgctagtcgggtgatgtgaagttgggaggggcgaacagcacgtaatgcagagccggtcgatccggcgatcaggacaacccacaatgtgccatcgcatcttcgaatgcgggcttttgaccgggacctgatccgcggagggcattatggccagcggtcacgtgaaccgcacaatcaggccgaacacatggccgcaaccgaccaaagctcaatacgtgcagaaagtccttgccaacagggagccgtccacac

SEQ ID NO: 7834 - DNA, 1561 bp, unidentified
  source 1..1561: mol_type = unassigned DNA; note = element_c29a96b
  misc_feature 1..2: note = core
  misc_feature 3..585: note = LE
  misc_feature 586..1473: note = CDS
  misc_feature 1474..1561: note = RE
  misc_feature 11..240: note = bridgeRNA
ctcgtatattaatattgtcagatacattctgactggttattcctttaaaccttctttttagtttaaacttgtagtaagcagatagaggtcgtagttttcctccttgaagctttgtcttcctcaaaaagactgacgcctcttctcttgcgacagtatatgaatgagctagacagaagctggtttctgaatatctaacgaggctatatcgtccaagagcagagaggataaccgatatctgacaaatccttgaaaggacctgattgaatgttttttctcggtattgatattggtaagcaacaccatgaagttggattgattgatcaacacggaaaatcgatcggaaaaaccatccgtatctccaataccaaatttggcagtgaacaactgcttgctttcttcaataaacacgcgttacttccagaaaacaccatggtcggaatggaagccactggtcattactggctgtccatctacactttcgtgcattagctaggctttcataccactgttttcaatccaatacagtccgatgtattacgcgatttttacattcggaaaacaaaaactgatacgattgatgctttattgatcgcccaagtcattcgattggacttacccgataaaaccgaacttcccgcagaagatatcttccgattgaaacagctggaacgattccgctatggtttagtggatcggtgttctgacttaaaaagaaaaattcttgcttgtttagatcaggtctttcctgaatacgatcagattttttcggatgtgtttggttgttcttccacgcaagtcttactaaattctcctattccagaagatcttcttgagattgatgacgaacgtctcattgaaaccatcaataccgcaagtgagaaacggttaggaaccgctcgctcagaagaaaaagtgataaaattgaaagaagctgcggcacattcttttggcatttcaattgcttctgatgtcttcaagttagagattcaaatcatgttggaacagattcagttgcttgattctcaaatcaagatcattgaagcagaaattcaagaaattgtttcaaaacaagaaaactatttgacgaccattacagggattggtgacattactgccgctgtcctcatggcagaagtcggggatatcaaacgttttgaacgccccaatcagctccttgcttttgctggactggatgcctctgttcatcagtctggagattttacaggaaccaaaaccagactttctaagcgtggttctccttatcttagaagagccatttggcaagctgcttttgtcgccgcatttaaagatcctgccctttccttgtattatcaaaaattgagaaaacgaggaaagtcacatggaaccgccattggtgcagttgccagaaaactcgtgaatatcatttttgccgtttggacacaaaacaaaccttacgaagttcattttcccgaagatatctccgaaaaataaatttttcattcgatttttggaggtctatttggtgtgttttcttaaagataaaagaaattcctttttcacttgactaattcatagctag

SEQ ID NO: 7835 - DNA, 1374 bp, unidentified
  source 1..1374: mol_type = unassigned DNA; note = element_c2b112e
  misc_feature 1: note = core
  misc_feature 2..92: note = LE
  misc_feature 93..1127: note = CDS
  misc_feature 1128..1374: note = RE
  misc_feature 1150..1369: note = bridgeRNA
caatgggatggactcctcctcacccacgaatcggcatctaggtgccagactagtggatgtaagtactagtcaggggcgaggaggaatccaagatgaaggttatgcgagtgggcgtggacttggcaaagaacgtgtttcaggtgcatggcgtcgatgcggaggagcagcctgtgtggcaacgcagcttgaggcgggcgacgtggctaagggagctcgtcaaacgagtcgaacctggcgccgagattggattggaagcctgtgctggcgcccaccattgggctcgggcgctaggagcgcacggctatcgagtcaagctcatggcgccgcagttcgtgaagccgtacgtgaagagcaacaagacggatcggaacgatgccgcggcgatctgcgaggcgatgagccgaccgagcatgcggtttgtcgaggtgaagaacgtcgagcagcaggatatccaggccgtacaccgggtgcggtcggagctcgtcagccaacggacgagcaaagggaaccagattcgaggcttggtcggcgagtatggcctcgtcgcgccggttcaactggctgcgctgcggcgggcgttgccggagtggctcgaagacggggagaacggcttgaccgaccgcttccgccggctggtagcggggctcgccgacgacctgcggcggctcgaccagcgcatcgcggagctcgacgcggagattgcctcgatcgccgccagcgatccggccgcgcaacgcctgcttgagctgcgcggcgtgggcccgatcacggcgacggcgctggtcgccgcgctcggcactggcgaagcctttcgtcgcggtcgcgacttcgcggtctcgttggggctcacgcccaagcagcacagcagcggcggcaaggaacggctgctcggcatcagcaaacgcggcgacgcgtatttgcgccaactgctggtccacggcgctcgtgcagtcgttcgcaccgcacccagcaagaacgacccgctcagtcgctggctgcaaaagctgctcgcgcgaagacataccaatgtcgtcgcggtcgcgctcgcgggcaagaccgcacgcatggcctgggcactgatacgacacgacatggcctacgaggcgcgtctcgcggcggcatcgtaacaactacgggagatcgagtttaggcgattgcaaatggttctgattgacggcacacaggtcggaccggcgctggcaaaacccggcctccgcgaagggctcacgaacccgcccctccgcttgggagtcagcgcgcgaatagcccatcatggtcccgtgccaatgcgcacgactcaaagaccggatacacgtaagcagtcgatcctttgccggacatcaggaccgttgcaaacgaggaggagtccataca

SEQ ID NO: 7836 - DNA, 1541 bp, unidentified
  source 1..1541: mol_type = unassigned DNA; note = element_c2b20fe
  misc_feature 1..2: note = core
  misc_feature 3..247: note = LE
  misc_feature 248..1423: note = CDS
  misc_feature 1424..1541: note = RE
  misc_feature 3..224: note = bridgeRNA
ctcgtataataaatgtagtagtttttagagttcctctccaagaactatggtataattgtttagatgctgtggattggtatatcactcctactactcgatggttttcggaaggctccaaccacagtctctttgcagtttgttaatcagttagataccgccagacggtttatgtggaacgaggttacaagagcaacgagtccctgtgggtctaaacagcgtcatattatttttttcaggaggtatccttatgatttttattggtattgatgcagcaaaggacaagcatgattgttttattgtcagttctgatggcgaggtgttatgtgatgtattcactatttctaacaccctcgatggtttcaatgacctgctttctaaaatcaaatctttttccaaagatttaagcaaaacaaaagtaggacttgaagccacaggacattacagttacaatctgcttggatttttacttgacaatggcttgcccacctatgtcttaaatcccttgcacaccaatctctaccgcaaaagtctgtccctcagaaaaacaaaaacagacaaggtagaggctcgcacgattgcttctatgttaatgtcttgtcaaagcttaaagccctacacaagagcattataccacaacgaagaactaaagtcactaacaagatacagatttgacaaagtttcagagcgagcaaaactgaaaacttctgtatcaagacttatcaccattctttttccggaacttgaaaaattagtttcgcaagttcactgtgtttctgtatatgcactcctttcagagtttccgtccgcaaagcatattgcaaacgcaaacctcacaagactaaccaatcttttgtattcagcttcaaaaggtcactacaacagagatactgccattcggattcgtgaagcggcaagaaactctataggctctgttatgcctgccaaatctcttgaattaaagcatacaatcaagttaataggtgagcttgatgatgaaattattgagatagaagcagcgataaaacagattgtagatagtttgggaactaccatcttaaccattcccggcattggttatgcgactgctgcatcaatcattgccgaagttggtgatttttctaattttgaaacatcggacaagatacttgcttttgccggaatgtcaccatctacataccagtcaggacaactcacaaattgttatgcacatatggaaaaacgaggctcaaaatatttgagatttgctctttacaacgctaccaagtatgtttgtaaatgggatagcaactttgccgcctatcttgctaaaaagcgttctgagggcaaacattacaatgttgctatatctcatgcagcaaaaaaacttgtgcgattgatttttgcattagaaaaatctcgacttccgtatatgcctgttgcataatttgtttcctgatattttttcaaggcttcctctcggaggtctgtttgccatacctgtttttaatcagataaaattttttaactttttgcatttttcctcttgacttttaatagttagt

SEQ ID NO: 7837 - DNA, 1201 bp, unidentified
  source 1..1201: mol_type = unassigned DNA; note = element_c2ca253
  misc_feature 1..2: note = core
  misc_feature 3..223: note = LE
  misc_feature 224..1186: note = CDS
  misc_feature 1187..1201: note = RE
  misc_feature 28..199: note = bridgeRNA
cttgtatgttcccgccggctcctacgaggtatgtaggagccagggtggagggaccgtcaagcaagcatctgcggagtcgagccgacagacgagtcgagcgatccccatcccgcaccttaacgtcgataaaggatctagcggccttttgaggaccgccgatgtaggcaagccaacgtggtgcggtaccaccccagccccttaacaatagctgggagttgcacagatgtcagatcattcggccatcggcatcgacgccgattcaaagactttggtggtggcgcgccacggcaccaagggcagcgcccgaatcgccaattcagcctcggccatcggcaagtggctgtctagcgtgcctgccaagtcgcgtatcggcgttgaagcgaccaatcgccatcacgagcttgtggttcgggcagcccagaaggccggccacgctgtcttcctgctcaacccgcgtgacatcaagcactacgccaagggcgtggcctgccggggcaagactgattccggggacgcgcaggtcatcgcacggtacatcgccagggaggccgacaatctgcacgagcacatcgcccgctcgccggagcaggaacggctgcatgtgcttctgcagcagcgtgacagcctggtccggaacaaggcaacactccatctttctctggggaccgacgcggctgagtcggccatcttcgggccgatattcagtggtctgaaaggggccattgcgatgctggatcgagagatccaacacctctgtcgcagcggcgaacagcgcgatctgtatcggcggatcatgaccattccgggcgtggggccgacggtggcagcctttgttacccatcacctcacccgctggccgttggccaactcagacgcctgggtggcctgcaccggcctggatccacgccccaacgaatccggtgcccggataggccgtcgccggttgtccaaacgaggcaatgccggcctgcgtcagatcctctacatggcggccatgggcctgacccgatccaaggggggaaaacccctctacgtagccatccgcgaccgcggacacagcagcaccgccagcttcaacatcctggccagaaagctggccagaatcgcgtggggcgtcttcaagagcggccgggatttcgacccgagcatgctgaaagtgggtgaagcctgcttccagcagacttgaccacgaacataggat

SEQ ID NO: 7838 - DNA, 1470 bp, unidentified
  source 1..1470: mol_type = unassigned DNA; note = element_c2f4f8d
  misc_feature 1..2: note = core
  misc_feature 3..237: note = LE
  misc_feature 238..1281: note = CDS
  misc_feature 1282..1470: note = RE
  misc_feature 14..187: note = bridgeRNA
cttgtatgttgcagattgaggcgtgaggatggattcacgtcttggcggtaaggccgttcggacctaaggccagcgcgagttgagcctgtatcccagatcggccaccgcccctctgccggaacgccgtggagaatcggaggccgtgtgagcctgcatgttcaaggtcggcgcaagcagtgagtccgttgacgcggacaggggcggcagccaagaccatcctaacggcgaaggaggtctatgaacaagcctgtaacaaccccgacagcgacagtattttgcggcattgacgtgagcgccacaacgctggccgtagccgtaatcgagcaagatcaaccccttcaacaacgtcagttcataaaccggcccagcggccacaaggcgctgatcggctggctggcgaagcgtcaggcctgtgttcgcgtttccatggaggccaccggcatctactcgttggacctggcgctggctctggatgcgcaaacctcgatcgagcttgcggtgttgaaccccaagctggcgaaccgctttcaacagacgctatcccgatccaagacggacgccgcagatgctgttgttcttgcccactacagccaacgaatgccgttcacacgctggcagcggcctggtttgaaggggcttcagttacgtgctctggcccggcacatcggcgcgctggtgtctcagcagagccgcgagaaaaatcgtcagcatgctctcaaaaactcctcgacggcaccccgcgcggtgatcgatgacctcagccgttcgctggcttcggtggcgcggcgcatcgtgaaaatgcgcggtatggccatggaactgattcgcgccgacgaccagctcaacgagcgcttctgcctgctgacatctatacccggaatcgccgccgtcagcgccatccaactgctggccgagaccgtgctgctggctcccgatctgaccgcgcgccagtgggtggcctcgagcggacttgatccgatgcactgcacctcaggcacctcggtgcacaaacgaccgcgcatcagccgctcgggcaatcgccacctgcgccgcgcactctacatgccggccttggccgcagtgcgctgggaccagcatctgaaagccttctatgaagctctgcagatgcgccacaaaaccaagctgcaggcgctgatagccgtggcccgcaagctgctccacgccatctacggcatcttcaaaactcgaactccatacaatggcagcaagttgttcccgcagatgaatctcacaccggagttacaatcggtttccaggtgaaacagaagcagcctctgctgggaagcaaccatgccgagggatagcctggcgggctcatcctgacgatgaaccggtgggcaagcgcgaacatgttcgcttgcccacacagaacatcggagggatagacccgtcatgcctggaaaatccaaagcaagccccaacgaaaatgcttgccttgcaagagagaat

SEQ ID NO: 7839 - DNA, 1354 bp, unidentified
  source 1..1354: mol_type = unassigned DNA; note = element_c2f8e7d
  misc_feature 1..3: note = core
  misc_feature 4..80: note = LE
  misc_feature 81..1103: note = CDS
  misc_feature 1104..1354: note = RE
  misc_feature 1082..1341: note = bridgeRNA
tgatggggtggatggccccgtgacggcatctgagtgccaagatggtgttcgtcgaagatcaccatgaaggggagccatccatgagcaagattacaacgattggactggatttggccaagaacgtctttcaggtccatgcgactgatgagacggacgggcttgtgatgcgtagagcgcttcggcgcggtcaggtgcttaggttttttgccggcttgccatcatgtctggttggcctggaggcctgtgcgacggcgcattactgggcgcgtgagttgcgggcgctgggccatgaggttcgcctcatgccgccgcaatacgtgaaggcttacgtcaagcgtaacaagaacgacgcggccgatgctgaggcgatctgcgaggcggtcaagcgccggtcgatgcatttcgtgccggtcaagacggtcgagcaacagtcggcgctgctgatgcatcgcgggcgggagctgctggttcgacagcgcaccatgctggccaatgccctacgcgggcacttggccgagtacggcctcatcgcggcacagggtctgcacaaggtggcgggactaatcgcgatcgtcagggacgaacgggatgcacgcgtgccgaacatggctcgccaggtgttgcgcgtgatggccgaacagctcggcgacctcgagacgcggatcgcagccatcgaggctcagataatggcttggcacaagagcaacccggtcagccggcgcctggcgaccatccccggcatcgggccgatcatcgccaccgccatcgcggcaacggtcgcggacccaagcgtattccgcagcggccgggagtttgcggcctggttgggcctcgtcccgcggcagaactccaccggcggcaaagcacgcctcggcgggatcagcaaacgcggcgacagctatctcaggcgtttgctggtcaacggcgctcacgcggtgctgctgcgctccagggcggccagggccgatccttggttgctggccttgcgtggccggagacctcgcctggtcgtcgccgtggccttggcgaacaagacggcgcgcatcgcttgggcgatcatgagcaaacaggatacctaccggcgcacaatcgcggcggcataacctgccgcgcggtgtagccggcagcttgcgagagcaatgaagcgtgatggtacagtcggtcgaccaacggatcgggagaagcctgagtgagtcagcgggacctcaatcccgacaagctgataaggcctcgatccgcggaacccatcagggccagcggtccatgtctgaccgcaccgaaaggccggacacatgaccgcaagcgaccaaaccaagcgctacaaaactcttgcaggccgggggccatccacaca

SEQ ID NO: 7840 - DNA, 1371 bp, unidentified
  source 1..1371: mol_type = unassigned DNA; note = element_c2fa234
  misc_feature 1..2: note = core
  misc_feature 3..74: note = LE
  misc_feature 75..1100: note = CDS
  misc_feature 1101..1371: note = RE
  misc_feature 1138..1358: note = bridgeRNA
tgatgctgtggacggctctccacccacagcggagtcggatgtaatctgctccgctcgaatggaggagaagtgccatgtcagaagttcgggttatcggtttggatatcgcgaagtcggtgtttcagctgcacggtgtcgatggtgctggggcgaccgtcctgcagaagcggctcacgcgggcgcgtctgttgccattcttcgagaaactctctccctgcctgattgggatagaggcatgcgccacatcgcacttctgggcgcgggaactcaccaggctcggccacgaggtcaggctgatgccggctcaatacgtaaagccgtatttgaagcggcagaagaacgacatggcggatgccgaagcgatcgccgaggctgtcacgcgaccgacgatgcgctttgtcggcgccaagtctgcagacgagcagagcgcgatgatgcttcacaaggtgaggctgatgctcaaccggcagttggtcatgctttcgaacgcaatgcgagcgcacatggcggagttcgggatcatcgccccgatcggtcgtggcggcatcgaccggctacgcgccatcattgaggacgaggctgacgagcggatcccggcgcaagctcgccgctgtctgcaaatgctgatcgcccaactcaaactcgtgaagcttcagatcctcgacaacgaccgtcaggttctggcgcttgcgcgctcgaccgaactaggccggcgtctgatggagatcccgggcatcgggccgcttgtcgcgtcagcgctggttgcgtgcgtacccgacccttcaatgttccgctgcggacgcaacatgtcggcctggttcggcctggttccgaggcaaaactcgtctggaggcaaggagcgattgggctcgatcaccaaggcgggaaatcgctatctgcgtcagatgctcttcgccggtgccatggcagtgatacgccgagcgatgcagagcacgcggcgcacctggctgtcgcagttgctcgcacggcgtcggccgaagatcgcggcggtggcgctggcaaacaagaatgccaggatcgcttgggcgatgatgaccaacggtcagcgctaccaagaaccgatggcgattgctgcatgatgagattgggattgcgcggctgaaaggctgacgctcagaggttggaaagggcaaaggagctattgcacgacagccggtcgataccgacggaccgaaccaccctacaacgcccacgcacctcgagtgcgagcaattgatcagggatccggtccgcggaaggcattatggccagcggcgtttaacagccgcatcaaaggccggacacatggccgcaccgaccactaagtgcagaagttcaaaacacccttgctaacggagagccatccacaca

SEQ ID NO: 7841 - DNA, 1400 bp, unidentified
  source 1..1400: mol_type = unassigned DNA; note = element_c2fca32
  misc_feature 1..2: note = core
  misc_feature 3..79: note = LE
  misc_feature 80..1117: note = CDS
  misc_feature 1118..1400: note = RE
  misc_feature 1115..1387: note = bridgeRNA
tgttggtgtggacggcccccggcggcatcgggtgtgccagagtgaggtcggtgttgatctcagacaaaggagaccgtccgtggaccagattagccgaatcggaatggatacgtcgaagcatgtttttcagctgcacggagtgaatgccgccgaagaggtggtcttgcgcaggaagctgcggcgcaaggagatggtgaccttcttcgagaagcttgcgccgacggtgatcgccatcgaagcctgtggtgcgagccatcattgggcaaggctgctgcactcgttcgggcacacggtaaagttgatcccgccccagctggtcaagccctacgtcaagcgcggcaagaacgatgcagcagatgccgaagcgctgtgcgaggcgatgagccggccgacgatgcgcttcgtgcccgtgaagacggctgagcaacaggcggccttgatgctgaccagcgtgcgcgaccggctgatccgcaaccgcacgcagctggccaacgccatccgcggtcacgcagccgagttcggcctcaccgccgccaagggcatggcccacctggctccgctgctcgagcgcatccaggccgatgaaagcctgcccgccttggctcgggagctgtttgctgctcaggccaaggaatacgagcagctgcagacgcagagcgacgagatcgatgcccaactcatggcccggcatcgggccgacgagtgcagccggcgccttgccaagatcccgggcgttggcccgatcggcgcgatgctgctgacgatgaagaccccagcgcccgagctgttccgatccggccggcagttcgcggcctggatcggcttgacgcccagggatcactcgaccgcaggcaaggtgaggctcggcgccatcacgcgagccggcgacgaggggctgcgcagcgtgctggtcgtcggggcaaccgctgtgatccagcacgctcgacgcagcggaaagtcctcgccctggctgggggcgctgctcaagcgcaagtcgccgaagctggccgccgtggcgctggccaacaagatggcgcgcatcgcctggaagctgatactgacaggagaggcctacaccgcaacgcctgcgcccgccacttcggccggcgcggtctagagatcggccagacacggggagcacctgaactgcaaccgtgctgagctgatgccagaacttgcaagatgaacagcagatggtgtgatcgatcgatccaagacgcgggacactccgtaagccccaatggccctccatgaggccgccatgttgtttggaacccctgtcgcggaaaccatcttggccagcgctcatgtgcgagcgcatcaacaggccggacatatggacgcaagcgatctgatcaaagcactgcaaaacaccttgcgaggagggggccgtccacata

SEQ ID NO: 7842 - DNA, 1232 bp, unidentified
  source 1..1232: mol_type = unassigned DNA; note = element_c2fdfa7
  misc_feature 1..2: note = core
  misc_feature 3..203: note = LE
  misc_feature 204..1217: note = CDS
  misc_feature 1218..1232: note = RE
  misc_feature 13..206: note = bridgeRNA
cttgtatcttgttttccggtcatggttcgctaccatgacccgaggcggaggcagcttgtgaggtccccgagtgctttgacaccgtgggagagatgaagcccttcgcctcactttcacgcctgccacgagactggacggtagccaagagccccgcgcagtaagcggtgagcctgcatgtacaaggcaagtcagcgtggatgggcatgttcaactcggaagaaggttatttacacaaagtggttcaactcggaatagatgtctcgaaagccaagctcgactgcaccttgctgctggatcgcgatacgttgcgcagtcgctcgaagattgtgcccaacactgcggccgggtttgtgcagctggtcgagtgggtgcaacgccaagcccaggtcgctgcggcagaggtggtggcggcgatggagcccactggggtgtaccaccaggcgctggcgctggccttgtacgaggctgggatgacggtggtagtggtcaacccggggcagctgcgtcagtttgccgaagggctggcggtgcgcaccaagaccgatgccaaagacagcgtggtgttggcgcgctacgctgggcagcctgagcgcatcgtgtggcaaccggcgcccgttgaggtgcgccagttgcaggcactcatggggcgcttggcaacggtagaaacggagctgcggcgcgagctcaatcgccgcgaggcggcgcagctgggtcacgacccgcagctggtgcaagcttctatcgccgatgccatcgcgttctggagcgcagagcagagcaaactgcagcaggccatcgacgagcacatcgatcggcacccgggactgaagattgaacgcgagcgcctgctcaccatcccggcggtcggccccaagacggccaaccgcatgctgtgcgtgctcagtgcgcatgacttcgggcgcgcctcccaagctgccgcctttatcgggctcacgccggtcgagcatcaatcgggctcgagcgtaagaggccgcccgcgcctgtccaagtgcggtgatgcgcgtctgcgcgcggccctctacatggcagccgtggtggccattcgacataaccccgatgtgcgtgccctgtaccagcgactgctcaaacggggtaaggcgaaactcagcgctctgtgcgccgctatgcgcaagctcgtgcatatttgcttcggcgtgctgaagaaccaacaggactatcgaccccagtgtgcttgacatcacagacggtat

SEQ ID NO: 7843 - DNA, 1335 bp, unidentified
  source 1..1335: mol_type = unassigned DNA; note = element_c308f49
  misc_feature 1: note = core
  misc_feature 2..264: note = LE
  misc_feature 265..1320: note = CDS
  misc_feature 1321..1335: note = RE
  misc_feature 15..259: note = bridgeRNA
ctgtgagaatccactacgcggcctggtgattgctgctgggctgtaggccggtgaccgcgagcgtgacccaaatactgactgacttcgtgtctttcgcgggacttgtccgctcgtggtcgccggccccggcccaagtggagcttctggcctgatcaggagctcgaccactggcgatgctgcgccggtgtgtcccatcacagtcctgccgtctccgcctggaccgggaaccggttacgtccccctccgggcaaaggagatgaacgcatgaccagtctgcagcagatcgccgaggtcgtcatcggggtcgacacccacgtgcatacccacagcgccgcggtggttgatgcgcgcaccggcggggtcctcgccgagatcaccgtgaccgccgacgccggcggctaccaggaactgatcgacttcgccggccagcacagcgggcagcgggcctgggcgatcgagggcaccggcgggcacggcaacggcctggcccgggtcttggcccagcgggacgagcccgtcatcgagctggaccggcccgagcgcgccaagcggcgcaacggcgccaagtccgatcccctcgacgccgtccgcgcagcccgggaagccttgtcgcgggacaatctgggcacgccccggtcgcacggggaccggcaggccctgtcggtgctgctggccgcccgccagtcggccgtccagggcgccggtgatgcccagcggcagctgttcagcctggtgatcgccgcccccgaaaccctgcggaagcggttccgcggacacaagctgcccgccatgacccggctagcagcccagctgcggggcagcccgcgctgggacaccgagaccgccaccaccgcggcggtgctgcgcgccctggcgcgccgcgccctcgatctcgccgccgaggcagcccagcacgagaaagacatccgcgccatcgtcgccgcctggcggcccgacctgctcacccagcgcggggtcggccccatcaccgccgccgtcatcttgtgcgcctggtcccaccccggccgggtccgctccgaagccgccttcgccatgctcggcggcgtggccccgatccccgccgacagcggcagcggcacagcccccaaacgcttccggctcaaccgctacggcgaccggcagctcaaccgcgccctgcacaccatcacgctgtcccggctccgctacgaccccaccacccaggcctacgccaagcggcgcaccgccgagggcaagactcccagagacatcaaacgctgcctcaagcgctacatcgcccgcgacctctaccggctcctcgaacacccagccgccacttgacatccataggagcgt

SEQ ID NO: 7844 - DNA, 1499 bp, unidentified
  source 1..1499: mol_type = unassigned DNA; note = element_c30d462
  misc_feature 1..2: note = core
  misc_feature 3..243: note = LE
  misc_feature 244..1479: note = CDS
  misc_feature 1480..1499: note = RE
  misc_feature 14..236: note = bridgeRNA
ctaatgagttctgggagtaagccatccggcagactcctgggtggtagccgctgacaggtgagcactcggttgtcctggacgttgagtcctgatgaaagaccgtgcccctgccagtcggccgggagagttgatcgctgatgggatgtcgtgcccgccggttcggcgtgagtactgattcattaggtcgctgatggttctcccgccggctgctgacggtaatcggttgtggggacgggagaagagttgctgttcgttggagatgactgggctgaggaccatcacgacgtcgagctgatggacgcgtcgggtaggaggctggccaaggtccgcctcccggagggtgtggcgggaatggcccggctgcacgcgatgatcggtgagcggctcggcgaggatgccgacgagttcgccgatcaggtcgtggtcgggatcgagaccgatcggggcccgtgggtgcaggcgttgatcgcggcggggtaccgggtgttcgggatcaatccgttgcaggcgtcgcggtatcgggagcggcacggtgtgtcgggcgccaagagcgacgccggggatgcgcacatgctcgctgacatggtgcgtaccgattcccaccaactgcggcaggtggctgccgacagtgccgacgctgcggcggtcaaggtcgtggcgcgggcgcacaagacgttgatctgggagcggacccgtcacatgcagcggctgcggcacgcgttgcgggactacttccccgccgcgttggaggcgttcgaggacctgaccgcggccgacacgcttgagttgctggccaaggcccccgacccggcctcggcggcacggctttccactgcgcagatcggtgcggcgctcaaacgggcccgccgccgggcgattccggagaagaccgccaggatccaggctgcgctgcgggccgcgcatctgggccagcccgacgtcgtcgcgagcgcctacgccgcgaccgtccggtcggcggtcgcggtcatggccgtactcaacgagcagatcaagatcctgcaagggcaggtcgaggcccattttggggcgcacccggccgctgagatcatcctgtcccagcctgggctgggaccgatcctcggcgcccgggtgcttgccgagttcggcgacgcgccaggccgctacgccgacgccaagtcccgcaagaactatgccggcaccagtccgatcacccgcgcgtccggcaagaagaagacggtcatagcccgctacatccacaacgaccggctcgtcgacgcactcgctgtgcaggccttcgctgcgctgcaagcctcggctggcgcccgcgcctactacgaccagctgcgagcccgcgacgtcagccacttcgccgccctgcgtcaactcggcaaccgcctcgtcggcgtcctgcacggctgcttgaagaccggcaccctctacgacgaagcgaccgcctggtcgcaccacagcaccgaagcggaggctatcgctgcttgacattcaaactcctgggatgt

SEQ ID NO: 7845 - DNA, 1612 bp, unidentified
  source 1..1612: mol_type = unassigned DNA; note = element_c3174d0
  misc_feature 1..3: note = core
  misc_feature 4..349: note = LE
  misc_feature 350..1492: note = CDS
  misc_feature 1493..1612: note = RE
  misc_feature 12..295: note = bridgeRNA
ctactacaatatatttatggttaatacccttacaaccagtaaggaattatccatcttgttgcttaagctgttagaatgagtgtggcaataggtctggccttcccctcctaggacttatcgtccgtagattagtcagccaaccagtccctcattcccagcattcgttttacgcaggttgaaccctccggcgttcgtgtgacatacccagtagattgagtaggcaatgagaaaactggtattgaccattgctaatacatttcaaaggagtatccattatgaacgcagttggtattgatgtttctaaaggtaaaacacagttactatccgcaggcccggcgatgtaatccttatgccaccctgtgacattcctcacacccagtctggaatcaatgacctgattgggaagatccgtagtcttgacggtgagaccaaagcctgcatggagcacactggacgatattatgaacctgtcgcctcatggcttgccgatgccggtatttttgtcagcgctgtaaatcccatcctgatccgggactttggtgacgattctctgcgctctcctaaaacagacaaggctgattctaaaaaaattgctcgttatactcttgaccgctgggcaaaattgaagcaatatggtcgtatggataaaacacgtaaccaactcaaaaccatgaacagacagttcggcttttacatgaatcagaagaccgcaatgaaaaacaacctcattgcccttcttgaccagacctatccgggcgcaaatgatttctttgacagtcctgcccgaagcgacggcagccagaaatgggtggatttcgtccatacctactggcacgtggactgtgtccgcggcagatcgctcaacgcctttaccgagcactatcagaattggtgcagacgcaagggatacaatttcagtgcagataaggcagcgaaaatctaccacctctcctctgacctgatcgctgtatttcccaaagataacaataccaggctgctgattcgtcaggctgtcgcaatgctcaacacggcatccgaaaccgtagaatccctacgtcaggaaatggatgcagccgcttccactctgccagagtatcccgtcgttatgtcaatgaacggggtaggcccaacccttggtcctcagctcatggctgaaatcggagatgttacccggttcacgcaccgtggggcgcttactgcttttgcaggcgttgaccctggaaaaaatgattcaggacagcatattcaaaaaagtgttcgtacatcaaagaagggatcgccaaacctgcgaaagaccctcttccagataatggatagccttattaagcgttctcctgcggatgatcccgtttacgcctttatggacaagaaacgggcacaagggaaaccttactatgtttacatgaccgccggagcaaacaagtttctccgtatttattacgggagagtcaaagaatatctttccactctgcctgaaaacgaagaaatgtaatctaacttccagcttcataacagaccagcgttttacggtggtcttgtttttgtgcttttctttcaacctgtataaaattttcaaagttcatcaatttctgcttgactttttatttgcaga

SEQ ID NO: 7846 - DNA, 1101 bp, unidentified
  source 1..1101: mol_type = unassigned DNA; note = element_c3255b0
  misc_feature 1..2: note = core
  misc_feature 3..162: note = LE
  misc_feature 163..1095: note = CDS
  misc_feature 1096..1101: note = RE
  misc_feature 1..164: note = bridgeRNA
ccctgtgtcttggaagcctgtcatgatggagtgggcgggaagccgttgggtccttggcgcttgacgccgtgatccggcccggtctcccgcccgttccatctatcaacctgaacagttgcacgaggctgcggcaacagacctcgcatcacagggacaggcaccgtgatcataccccttcgttacgtcggaatcgacgtctccaaacaacatctcgatatcttcgatgagggcttgggtgtgccggagcgcatcgccaacgcgccgcaggccatcacacagatcgtggcgcgttggcgatgcgacgtgctggtcgtcttcgaggcaacgggtgtctatgatctcgaacttcgcgaggcgctgggtcaggccggtatccgcttcgcgcggatcaacccggcccgggctcgcgactttgcgcgcgccagcggccagctcgccaagaccgacccgatcgatgcgaggatgctggcggcctttgcgcgggccctgaagccagccaccgagcaaattgccaatcccgcccgcaatgccttggcgaggctcgcaaaacggcgggatcagctggtcctcatgcgtgcgcaggagaagaaccggcgcagcgaggccgacgaccgtgccatggccgatcgtatcggccgtctcatcgaggtcctcgacggcgagatcgccgagatcgaggccgacatcagcacgctgatcaagaccgagccggagatctcgggcgatgcgcagttgatacgttcacttcctggcgtgggtcccgtaacctgcatgcaactgatcgcgcagatgccggaactcggaaaagtgggaccgaagcaggtggcagcgctagccggcctggctcccttcaacgtggcttaccgtggcaaacgtaagatcgccgggggccgaaagcgcgtccgtgatgccctttacatggctgctctcaacgcggtccgccgggccgatccgttcaaggtcttttacgtacgattgcgacaggccggcaaaccagccaaactcgccctcattgccgtcgccaggaagctgctgacggtcctcaacgccatgatgcgcgacaggaagccctacctgaacgtcaagccgacataacagttg

SEQ ID NO: 7847 - DNA, 1347 bp, unidentified
  source 1..1347: mol_type = unassigned DNA; note = element_c32a27b
  misc_feature 1..2: note = core
  misc_feature 3..75: note = LE
  misc_feature 76..1101: note = CDS
  misc_feature 1102..1347: note = RE
  misc_feature 1118..1345: note = bridgeRNA
atgaaatggctacccccaccgccccctgcgatcgcccactaagctttcgcagggggctcatcggagactgttgccatgaacaaagtagctattgccgccatcgatttgggaaaacactcctttcacctgcatgctcaagatgatcgtggtcatgagctttatcgcaaaaaatttactcgagtgacgctcgctcaacacctggcgaatctcgaaccttgcaccgtcgtgatggaagcttgtggcggagcccacttcatggcgcaggaggtcgcgaagctgggacatacgcccaagctcattgctcctcatctcgtgcgtccttacgtgaagagcaacaagaacgacttcgctgatgccgaggcgatctgcgaggcagcgactcgcccaacgatgcgctttgtgccgccaaaaaaccaagctcagcaggcgctagccatgctcaactcgacccgcgattcgttcatcaaagaccgcaccgcgaccgccaatcggattcatgccgcccttctggaggtgggcatcagcctggccccaggcttcaaatccatcaaagagcttccggcgcggctggaggcgagttcactttctgaacgcttcaaaaaaattctgatgaagctgcatgagcacttcaaccacctggatgagcaggtcaagacactggacaaggacgtggagagccaggccgctgaagatgatctggcggctcgtttgatgactatgccctgtgtcgggccgatcacctccagcgccctggctgctgagttgggcgatggtaaacagttcaagtgcgggcgaaactatgcggcctcaatcgggctggtgcccaaacagcattccacgggcgacaagacggtactgctgggcatcagcaagcgcggtgatcggaatcagaggcgtctgctcatccagtgtgcccgagtctacttaatgcagctggagcgccaaagaggctggctggcggactgggtccggcagctgttggcccaccatcactccaaccatgtggtctgcgcgctggccaataagatggcgaggatcgcttgggcgattgcggcacaccacactgaattcgatgcagggccagctgcgatgaacacctgaccctgctgtcatccgagcaccacccacctggttttgcgatgctggataactgatgacgtgaacggccaaccggcctgacgacaaccctgagctcccacacggcagaaaggccgttcaattaattaggatcgtcgggcatcgattctcatcgaggcgcggggccacaaccccactcagacgccggatagatgaaagcaagccaaccacgcatcaaaaacagtattgcagaaaaggggataaccatag

SEQ ID NO: 7848 - DNA, 1801 bp, unidentified
  source 1..1801: mol_type = unassigned DNA; note = element_c32c544
  misc_feature 1..2: note = core
  misc_feature 3..419: note = LE
  misc_feature 420..1652: note = CDS
  misc_feature 1653..1801: note = RE
  misc_feature 102..386: note = bridgeRNA
ctcgtataatatgttttgtagggtttttgagtagctttttccagttataaaaccctatacaatcggcttttatttctaaaactaactggaaattctattgttctttgaaaatctaatatattatgctattgaacttaattaatgtccgtgtaacaatatttttaagctattgaggacggttcttctacctcctgttggatcttatgatctcttctgctttagtccgttcccctggtctgatgttagctttgtaccgctggttgtttactctattaacttcctcctgtatggcagttcaaggagacgtgcatgaagtttttagagatgtattctaattgcgaggatgttgatgcatcagataccacgggcattagttaagttcaatagcttttaattcaaacaagaaggaggtgactgcattgtcaaattcattgctggtcggtattgacgtcagccttaatgacaacaaggttcgtatcctccatcctgatggaaccagtatttcaaagtttgttgtatctaactccgttcccggtgcaaaagtcctttctcaaaaagtcaccgaggttatgaatagatacagctttgattctcttgtaattggtcttgaatctacttctgtctatggcgatcctcttgtatacttcttaaagcaagacgcctctcttaatagatttaataccaagattcatgtgcttaatgcaactcaggtcaataagtttaaaatgttttatcctgacctccccaaaaccgatgatattgatgcatggattattgacgagcatctaagattcggccggataaacaaggaggtctatatggatgacagatacaaagctctacaaaagcttacaagagcaaggtttcatacagcacaaaatcttgcaagggagaaaaactggttcttaaacaacctgttcctcaaattttcttctcttgcccaagaaaatatctttgcagacaggtttggagctacttgtagcagccttatcgaggagttcttctctgttgatgaaatagcctatatgcctattgaagagctagttgagttcatcaacaagaaaggtaaagggcattttgaaaaccctgatgaaatagctgctactgtccagaaagcagccagaagctcataccgcctcccaaagacggtaacagactctgtaaatcaggtacttgctgtttcctttgcagctatgaaagcttacaaggaacagcttaaaatcttcgataaagccattgaagagcaacttaaactcatacccaatactctaacttctatcaaagggattgggcctgtttacgctgctggtattgtagctgaaatcggtgatattcatcgtttcaaggatcatgccgctttggctaaatttgcaggtattgcctggactaagtatcagtcaggtaattttacggctgcgaatacgcatttgattaagtttgggaacagatacttgcgttactatatcatggaagctactaacaaagtgaaaatgcacgattacgagttaaagcgcttctatgatttaaagtacagccaaacccctaaaacaccacataaaagagcacttgcactaactgccagaaaatttgtccgccttgtctatgctctgctgcatagcaaccggctttatacaccaccaaagggagaataattcccatttggtatatccataacctaccatttttgtaaatgctacttggtaggcttattgggaggtgcctttttgtgcctaaaatgcccagaaacccattgatatttcaaaaattatttccaattgtctcttgacattttaccgctgga

SEQ ID NO: 7849 - DNA, 2096 bp, unidentified
  source 1..2096: mol_type = unassigned DNA; note = element_c342351
  misc_feature 1..2: note = core
  misc_feature 3..657: note = LE
  misc_feature 658..1488: note = CDS
  misc_feature 1489..2096: note = RE
  misc_feature 28..250: note = bridgeRNA
ctcgtataatggatttacggtttggatgtggtggaaaaacgcataaaacccacttgttgttccacaagccatgtgggataataaggccagcagacagagggcgcagatagtctccttgaagtgcagcttccaaagaaagaattgcgcctctgtctttgcgggttgacgcgaatgagctggatagcgaagatgcgctgcatatctaacgaggttgtgtcccgcaaagaagcgtgaggaaactctgtctgaaattttgaagcaggaggtttcgccatgttttactgcgggattgacatcgccaaatacaagcacgaagccacggtcatagacggggccggcgcggccttgctggacagtatttccttcgccaacagcaaagagggctgtgagaagttggtggcagtgttcgagaagctggatatctcaaaagatgacctgcttcttggcatggaggacaccggccactactggctgagcgtgtacgggtatctgctggagcagggctttgaagtaaaggtcatcaatcccatccagtctgaagcatttcggaagatgtatatccggcagacaaagaacgaccgaaaagatagcttcatcatcgcttagatcatgcgcttcgggcagttttccgtcacaaatctgtcagaggaggtcatcgtggcgctgcggcagctgagccggtaccggctggctttggtggatgcctgcggggactgcaagcggcggatcatcgcactgctggatcaggtgtttccggagtacgacacgctgttctcagacaccttcggagtcacctccaaagaggttctctcccaataccctaccccagaggctctgctgtctgtttccaccagaaagctcgccaatctcttagaaaaggccagccatggtcggtttggaaaagagaaagcagagcagctgaaggctgcggctggcagttccttcggggtgagctttgccaaagacgctttcgcttttcagagtcggcagctcattgagcagctggagttcctggagggacaagttgaggaactggaggagcagatttcctctctgctgaagcagaccggcagttacatcacgaccatccccggaattggggataccctgggggctattatcctgagcgaaatcggagacatccaccgcttcgacgcgcccaataaactggtcgcttttgccggactcgatgtccaggtcacacagttcggagaatttaccggcacccggcagaaaatctccaaacgtggctcaccgtatctcaggcgggccatctggctggccgcctccagggcggccttctgtgaccccatcctctcggagtactaccagtccctccgcgcccggggcaagcaccatctcaccgccatcggcgctgtctcccgcaaactctgcagtatcatcttcgccattctcagcgagaacagaccctatgaggccgtaccaccaaagagcattcgacacagttcgtcatctttcacaacctgaaacgcatttcgtcgttgaacggcacaaattggtatatccttcctttcgcaaaggaggaatgcttgtgtcgtttaaattattattctccggtgatttgcgccggacccgtgattccatgggctggacacagccctttgtcgcgaacctggtccccatcactttgcgggaatatcaaaatatcgaaagcggaaagcgcattccaaagacagaaacttttttaaggctggtctatctattcgatctggatattgaaaactatcgggaggagtttgacattcgtgatccactatctcccatttgaaaatgaggtatcttctccttacatcggaacatactgcacctttggcctgcgcgttttgcagagccgggatggctttgaggacgagattatgctcctgccggatatttccacggatttttctttcgtgctgcgcctcgccgctctcctcaccaggaaacagctcaaccccatccacctgctggatgtcttggaggacttgttgtaatcgcgtcccctctttccgggctcacaacatgtgggccttcttttgctgtcctcatttccctttcatttttctcatttcacctcttgactttttatagctggt

SEQ ID NO: 7850 - DNA, 1359 bp, unidentified
  source 1..1359: mol_type = unassigned DNA; note = element_c344848
  misc_feature 1..2: note = core
  misc_feature 3..75: note = LE
  misc_feature 76..1113: note = CDS
  misc_feature 1114..1359: note = RE
  misc_feature 1093..1345: note = bridgeRNA
tgatgggtggacggccccctgacggcatcaagggtgccatgctgggtgtgaagcatccaacagaggagaccgtccgtgggacaggctatccggtttgggatcgaccttgcgaagagcgtgatccaggttcacggggttgatgcgcagggtgaggtggtggttcgccgccagctgcgtcgcgagcagtttgcgacgttcttctcgaagcagcctccggcgctgatcggtatggaggcctgcgggtcggcgcactactggggccgggaactgtcggcgctcggccacgatgtccgtctgatgccggcgctgtatgtgaaggcgtacctgaagcgcggcaagaacgatgcgcgcgacgcggaggcgtcgtgcgaggcggtgggtcggccgacgatgcggttcgtgccgatcaagtcggtcgagcagcagtgcggtcgggcgatcgagcgggcccgcgaccttctggtacgccagcgcacgcagcacgcgaacgcgatacgcggccagctctatgagatggggctgacagccagcaagggggcgagcggcatagcggcgctgctgcagcggatcgagatgtcggacgcggccattcccccggcgctgctgccggccctggcgccgttggctcggcaatggcgcgctgccgatgccgaggtggctgcgctggacaagcagatcctggaactggtccgtgaggatccggcggcgcggcggctgatgacgatcccgggcgtcggccctatcaccgcccacgccgtggtcgccgccgtcggcgatggccggcagttcaagaccgcccgcgacttcgcggcctgggtcggcctgacccgccacaaccacgacaccggcggcaaggcccggctcaccggccgcatcaccaaggccggcgaccgagggctgcgacgattgctcgtgctcggcgccagttcctggctgcgccatgtcagggcgcctgggcgaaccacataccccgccggctcgatctggatccgaggcgtgctcgccaggcggcccgtcagggtcgccgtcgttgcccaggcagccaagaccgcccgcatcgtctgggcggtcctgacaacgagagacgtttaccgggcaccgggcgcggcttgagctgcggccggaccctcacggagtaaggagcgaaaggcagcacggcaaaatggtcaggatctgggtcgggacattccgtttcgtcatcgcaccgtgagtgcctcggggtgattggagcccgatccgcgaaacccttgcgggccagcggtcatgtagagaccgcacaaacaggccgaatacatgaccgctccagaccaaacgtcgacgctgcattttcgcacttgcccaacgggggccgtccataca

SEQ ID NO: 7851 - DNA, 1541 bp, unidentified
  source 1..1541: mol_type = unassigned DNA; note = element_c363695
  misc_feature 1..2: note = core
  misc_feature 3..236: note = LE
  misc_feature 237..1412: note = CDS
  misc_feature 1413..1541: note = RE
  misc_feature 3..221: note = bridgeRNA
ctagtatattgatgtcacgtactccggagggttttgagataaaattctcgtagtggtcggggtactacggcagcttccttgggaccattggttctcgttccgaagagtgtagtccccgccttgcgggagtttacgaacgagctggatgttggagggtttgtgccctgtctccgaatctcaatctaggttgtagatcgcaacgttgtgcggatccgacccacttggaggtacgtgttgtgtattttgttggcattgacatcggtaaacgcaatcatgaagcctgcatcatcgatgcatccggccagattcgggggaagacgcttcgcttcccaaatactcaggccggcggccagaaactaattcagtggatgcgctgcgttgatcccaatttgtcatccacccatatcgccatggaggccaccgggcactactggctcgttctgcattcgttcttgcgtaagcatgggctccagcccagtgtcatcaacccgattcaatcggatgcatttcgcaacatgtacattcgccagaccaagaatgatgccaaggatgcttttatcatcgccgaggtgctgcgcttcggtcgatatacaacgacggaattggcgagtgaagaagtcattgccttacgccaattgagccgatttcggtttagtctggttgacacgatttccgacctgaaacggcaagtcatcagcattctggacatgctgtttcccgagtacgagcgagtgttttccgacctgtttggtaagacgtcctccaagttgctgatggaatacacgacgccagaagaaatcctggccgtggatacggaggagcttgctgcattcatcgcaaagcacagtcggaatcgcttaggtctcgataaagcggtggagctgaaatctgctgccaaatcatcgttcgggatcgatatggcccttgatgcttatcgcctacaactgcgcttgcttgtgcaacaaattcgattcacggaggagcagcttgagtccctcaacactgagatcgcgaagcgattagaggccgtcgatagcaacctggtgacgatcccaggcattggtcctgttttagctgctgcgattctcggcgaaatcggtgatatttccaggttcccgactggagtaaagcttgttgcctatgctggaatcgacccaacggtacgacagtctggtgaattcgccggcacacgtaaccgaatgtccaagcgaggctcaccataccttcgacgagctatctggctggccgccagtgtcgctaaaacgcataacccaatactccgggaattttatgaacagaagcgagctgaaggcaagcatccattggcagctacaggcgccgtcgcacggaagctgacttacatcatccatgccgtgctccgagaccgacagccgtacgaaccaatcgcatgagaactgggttctgactgaatattcgattatccgtctgtcttgcacaggcttactaaactacaccctaaaacatcacttcccttcaatgttcttaaaactcgatgatggacttgacatcacatagctggt

SEQ ID NO: 7852 - DNA, 1541 bp, unidentified
  source 1..1541: mol_type = unassigned DNA; note = element_c372305
  misc_feature 1..5: note = core
  misc_feature 6..265: note = LE
  misc_feature 266..1519: note = CDS
  misc_feature 1520..1541: note = RE
ctcactggtgcaccatcgtcgtatccgagtcgcccgcttgatcggtaggtgggagggttcgggtgcacccctggtccccgccgggccatcgccacatctgcttgaccttcgaggtccagcgtgagttctgcgaggcccggcggcccaggacaccccgactggctacagggctatgcgccacagagcgccgctcagtgagcgaccggcagcggtgtcccggaccaccgggtgtcttccccactgacgcatcagcgaggagacaaccatgagtatcgcccccgactgcgccgacgcgcccatcgtggtgcgcatcacggccggactggactgggcaaaggacgaccacgccgtgtgcgtggtcggcgaccagggacaggtgatcgaccgtttcacggtggcccatgacgctgccgggttgaagcggatgaccgcccggctgctgcgggccggggtggaccaggtcggcatcgaacgcggtgacggcccggtcgtcgacgccctgctgggggccgggctgaccgtgttcgtgatcccgcccggtcaggtgaagaacctgcggtcgcggtacgggtcggcgggcaacaaggacgaccggttcgactcctacgtgctggccgacgtggtccgcaccgacgcccgccggctgcacccgatggtcttcgacagcgagcagaccaccgcgctgcgctcggccacccgcacccgtaaggacctggtcacccaccgggtcgccgcagccaaccagctgcgcgcccacctgcagatcgtgttccccgctgccgcaacactgttcgccgacattgactcggcgatcagcctgtcgttcctggaacgcttcaccacccaagatgccgcggactggctgacggcggcccgcctggcggcctggctgaagaaggtccactacagcggcggcatcgagccggccgtcctgcacgcccgcctcctggccgcacccgccggcaagaccggaccgcacgcccggctgcacgcgggcaccaccagggccctggtcgcgctcctgcgtgtcctgaacacccaggtccacgccctggccgtcagcatcggtgagcaactcgacgcccacccggacaagaagatcttcacctcgctgccgcgctcggggaccgtgcgcgccgcccggctgctcgccgagatcggcgatgcccgcggccggttccccacccgcgactcgttgacctgcctggccggggtcgccccctccacccgacaatccgggaaggtcacgtccgtcacgttccggtggggcgcgaacaagcagctgcgcgacgccctgtgcgacttcgccggcgactcccgccacgccaacccctgggccgccgccctctacgccaaggccatcgcccgcggctgcgaccacccccacgccgtccgcatcctggcccgcgcctggggacacatcatctggcgctgctggcaggagaaccacccctacgaccccgcagcccacggcgccctccaaaccatcctcaaccaagatcaaccagcagcggcctgacccaggggttgacacagggcaa

SEQ ID NO: 7853 - DNA, 1360 bp, unidentified
  source 1..1360: mol_type = unassigned DNA; note = element_c379a48
  misc_feature 1..2: note = core
  misc_feature 3..75: note = LE
  misc_feature 76..1101: note = CDS
  misc_feature 1102..1360: note = RE
  misc_feature 1074..1348: note = bridgeRNA
tgatggggtggacgccccccgacggtatcgatgtgccaaagtggaggtgttgaacaccacttgagggaggcgtccatgtcagaagttagcataatcgggttggatatcgccaagcatgtttttcatgcgcacggtgtagatgtgtcgggccatgtgcttcttcgcaagaagatcagccgagcgaagctgttgccgtttttcgcagcacagccgcgttgccaggtagttctggaagcatgcggcggcgcgcatcactgggcgcgcgagttgctcaagctgggccatgatgtgcggttgattgcgccggcctatgtgaagccgttcgtgaagcgtcagaagaacgatgcggccgatgccgaggcgatctgcgaggcggcccagcgaccaagcatgcggttcgtgccggtgaagacagaggagcagcaggcggcggcaatggtgttccggggccgtgacctgttggtgcggcagcggacccagatcagcaatgccctgcgcggccatatgaccgagtatggctggatcgcgcccaaggggctggcccatctggaaaagcttgccgcgctgctcgccgatccattggctgttccccagggcgtgcgatcggtctgcatgcttctgctcgacagcctggcgatgctcgaccggcagatcgccgcactcgacaaggagattgtgcgccgttcgcgcgaagatgctctcgcacgccggctcatgacgatcccgggcatcggtccgatcacggcaactgccatcctggcgcttgcgccgccgtcgggcaccttcgccaagggacgtgactttgccgcatgggtcggcctcacgccgcggcagcactcgacgggcggcaagcagaagctgggttcgatctcaaagatgggcgagcgaacgctcaggcggttgctgatcatcggcagcagcgccgtggtgttgcaggcgagcaagcggggcgcgcccaagggatcatggctggagcagatgatggcgcgcaagccacgcatgctcgtaacagtggcgctcgctaacaagacagcgcgcatcgtctgggcgctcatgatgaagaatgaggattacactgctccggtcgcagcggcggcgtaagccaaagcggaccagaggtcgtcggggcgtaagtcggtcgaaggagggtatggcacaacagtcggcgagacggggtcggaagaaccagggctaaccaccatgcttcatcagcacgcttagggtgatgtggttccgatccgcgaactcccatacgggcccgcagccttcatcgctgcatcagaggccggacagatggcagcatccgactacgcgccaaatactccaaattaccgcttgcgtcgcgcggggcgtccacaga

SEQ ID NO: 7854 - DNA, 1407 bp, unidentified
  source 1..1407: mol_type = unassigned DNA; note = element_c3951a2
  misc_feature 1: note = core
  misc_feature 2..218: note = LE
  misc_feature 219..1394: note = CDS
  misc_feature 1395..1407: note = RE
  misc_feature 14..233: note = bridgeRNA
ctacctgttgactcgacagcagccgcggacctggccaaggttccggttaggtggtcggcgagtcgctctctaagtgcctgcccgcctcgtgcgtggctctctaacgggatgcgtcctcgccgaccactgctccggcgctggtcgtggctcaagaggggtctgcttcgctcgaggtaggactgcccgaccgcgccacttcttcgaggtggaggcgacagatgacagcagtgatgatcggcgtcgacccggccaagcgttcacacgcgatggcggtgctcgacgggaacgagaacgagcaggcgatgttgcaggtcaggaacgacaacgacggctatcgagagatgctgcgcttggccaagcgctggaagcaacggacctgggccgtcgaaggtgccggcggggttggggtacagctcgctcaacggctcgtcgccgacggagagacggtcgtggatgtgccaccgaagctggcgacccgcgcccctatcttcgacaccgggcgcggccgtaagaacgacccgggcgatgccaggaccgtggcggtggtggcggtgcggaccaagggcctgcgccaggtcgtgctcgatgacgaacgcctcgcgctgcggctgatgtctgaacgccgacgggagcttgtgcagtcccggacgaagaccgtgaaccacttgcaccagctgctgatggagctgcttcccgctggtgcagaccaaaagttgaccgccaccaaaaccaaggcactgctcgcgaccgtgcgccccaggcacgccgccggcaaagcccgacgccagctggccgtcgacttcctggacgacctggtcattctcgaccgcaagatcaaggacatcaacggccggatcaagaccgccgttgaagcgaccggcacgaccctgaccgacatcaagggtgtcggcatcactaccgccgcggtcgtgctcggtgaggtcggcgatgtccgccgattcccaagcaagcatcacttcgccagctacaccggcacggccccgatcgaagtgtcctcgggcgaggtggaacgccaccgactctcacgggcagggaaccgcaagctcaacagcgccctgcaccacgccgcgatgagccacaagcacaccgacccggcgggcatcgcctactacggccgcaagcttgccgatggcaagggcaagaagggcgccttgcgatgcatgaagcgacggctctccgacgccgtcttccgagcgctcgtccaagaccaagccaaaactgaggcggcgggccgggaaggacactcgggggcgacttttcagtccagcgcgtctgacccaaccccgatggtcagcccttcggacaagtcactaacccgacccgccgcagccgacgctacgccctcacgaacgagggtcaagagggcttcttgacacagaggggagc

SEQ ID NO: 7855 - DNA, 1380 bp, unidentified
  source 1..1380: mol_type = unassigned DNA; note = element_c39ebfb
  misc_feature 1..2: note = core
  misc_feature 3..86: note = LE
  misc_feature 87..1118: note = CDS
  misc_feature 1119..1380: note = RE
  misc_feature 1149..1368: note = bridgeRNA
tgatgctgtggacggctcctccaccggcacgtgagtgccatggatgtgggtgctgttagagctcccacgattcagaggagctattcatgcgaacgatcacgacaatcggtctcgatatcgcgaagtcgatctttcaggtccacggtgttgatgctgttgggcaggtggtcattcggcggcggttgaagcgtcgctacgtcctgacctttttccagaagctgccatcgtgcctgatcggcatggaggcctgcgcctcggcgcatcattggccgcgtgaactccaggcgctgggccacaccgttcgcctgatgccggcggcttacgtgaagccttatgtgaagcggcacaagaatgatgccactgacgccgaggcgatctgcgaggcggtcactaggccgaacatgcggttcgtcgcgaccaagacaccagaacaacagagctgcctgacgctgcatcgtacccgtcacttgtttatccgccagcagaccgcggtgatcaacgccatccgcgctcatctggccgagttcggcatcgtcgcgccagtcggacgcaatggtgtcgcgcagcttctcggcatcgctgctgatgcaaatgacaaacgcttgcccgaggtggcacgtgcatgcgttagcgctctcggcgctcaattgcggatgctgaagacgcagatcctggagttcgatcgtatgatcaatgcttggcaccgttccaatgaggcaagccggcggctcgacgacatccccggcgtcggtccggcgttggcgaccgctctgattgctagtgttgctgatcccaaggcttttcggtcaggaagggacttctcggtctggatcgggctcgtgccgaagcagaactcgagtggaggcaaggacaggctcggcaatatcagcaaacgaggcgatcgttatctgcgcagtctgttcacgacaggcgccttggcggtgatccgctatgccaaaatccatggcaccaggcaccggccttggctcaccgcgttgctggcgcggcgaccaacgaaggtcgcggccatcgcgctcgccaacaagatcgccaggatggcgtgggcgatgatggctaggggcgaacgctacaaagaatccgctgcgctcgcggcgtgaacgagatcgcatcggacattcgatgtgatgtgaatgttgggagggcgaacagcacgtaatgcagagccggtcgatccggcgatcaggacaacccactagggccagagcattgtcaaatgcgagcttttgaccgggacctgatccgcggagggcattatggccagcggtcatgtgaaccgcatcaacaggccgaacacatggctgcaccgaccaatgttgcgttcgtgaagaaagtccttgccaactcggagccgtccacaca

SEQ ID NO: 7856 - DNA, 1378 bp, unidentified
  source 1..1378: mol_type = unassigned DNA; note = element_c3ab03e
  misc_feature 1..4: note = core
  misc_feature 5..88: note = LE
  misc_feature 89..1123: note = CDS
  misc_feature 1124..1378: note = RE
  misc_feature 1145..1367: note = bridgeRNA
atgatgctgtggacggcgcccactctgcggcatcgaagtgccatagggtggttgcgcttaagcgaaccactaacgaggggagccgtccatgggcgaggttagcacgattggtctcgatattgcgaagtcggtcttccaaattcacggcgtggacgtggaaggcgcggtagtgatccggaagcgagtgaaccgcgcgaaagtgtttgagttctttgcggctctgccgtcatgcctagtgggtattgaggcgtgtccgaccgcgcatcattggagccgcaggcttcaggcgcttggtcacacggtgaggctgatgccaccgagctacgtgaagggatacctcaagcgtagcaagaatgacgccaacgacgctgccgcgatctgcgaggcggttacgcggccatcgatgcggtttgtaccgaccaagtccgaacagcaacagtcgatcctaatgttgcatcgcagccgtcagcttctcgttcggcagcgaacgatgctgtcgaatgcgatccgtgggcacatggccgagctcggcattatctcggccaagggtcgcaatggcacgaccgagctactcgacatcctagctaacgagcgggacggccgcattccaaccgctgcgcgcttcagccttgacgtgcttgctcgccaatatgccgttctaatgacggagattagcgttatcgagaagcgcatccatgcctggcatcgatcatgtgaagaaaaccgacggttgcaggagattcctggagtcggtccgatcgtggccacagccttgattgccgaagtgggtgattggaaggcgttctcctcgggccgcggtctcgcggcctggattgggttggtgccgaggcaacattcgactggcggcaaggagcgacttggcagaatctcaaagcagggcaatcgacatttgcgatggctgctcgtcgccggcgctatggctgtcattcgctatgcgcgccggcacggcacaaagaggatgtggctggttcgcttaatggggcgccggccgactaaggtcgcggccgtcgccctggccaacaaaatcgctcgcatggcttgggccatgatggtgcgtggcgagcggttcaaagagcaaaagttgctgccggcggcggcgtagccgtcaacagcggtaaacactaacgaattggcgagggcatgacgacgtaatgcagacacggtcgttccggggatcgggagagcccgctagggtcatcgcactaacaagtgcatgaaaacgattgggacccgatccgcgcagagcattagggccagcggtcacatcggccgcaccaacaggccggacacatgaccgcacccgaccaatgctgcagaaacgtagaaaaagctcttgctaatcaagcgccgtccacac

SEQ ID NO: 7857 - DNA, 1269 bp, unidentified
  source 1..1269: mol_type = unassigned DNA; note = element_c3b1cd4
  misc_feature 1..3: note = core
  misc_feature 4..250: note = LE
  misc_feature 251..1255: note = CDS
  misc_feature 1256..1269: note = RE
  misc_feature 52..222: note = bridgeRNA
catcgtatattgattcctataccaaaaataccaaataattactaaaatgttttataaaagaaaaaagaaggtggaaaaaggacattttcgtcattggttaaaaaaccgttcagaatgttgttcaccaccttcttctcttccccaagacttgacagaacatgaggcaaccaaagcctggataaaaaaacgatgaaagtccaaggaagaatatatcaaaataccaaccaaaagaaaagggagataaaaaaacatgaagtaccaacacgtagtgggcatggatattgcgaaagactcagtgcaagccagttgctttgatggaacaacttttttggatttctcctttcccaatcaagaaaagtcgttcctgaaaaaggttcagaaaagcatcccaaaaagtgatccctctcacatcctttttgtcatggaagcaactggggtgtatcatctcaaactcgccactgccctctataaggaaggttattccgttgccgttgtcaatcccttcatcatcaaaaagtacgccgagatgctcttaaaaagagccaagactgataggaatgatgctcgcttgattgcccaatttggtttctatcaggaggtcactctctttgctcccaaagagaacttggctgaagaaatcactcaagtcttaaaaggtctcgaccaactcaaaaaagaaagaaccaacttgaagaattaccaagaagcactcactcaccataacgagatcaactcagtggtgagggatatctatcaaaaacagctcaaagaggtcgaaaaagcaatcaaaaccctcgaagccgaagcaaaacgactggtttgccagtatgccccgaaagaataccaactgctcctgagtatcaaaggaatcgggaaatgctcggcaactgctcttttaggattcctccaaaagatggatcgcttctctcgaggaaaagaagtggccagtttcttaggtcttgctccccagatctctcaatctggaaaagacaaaggcaaagcctggctgagtaaaaaggggaatggctatctccggaggcttctctatcttgcggctctttcggcttcacggtctaatgctcaatgtcgggaactctatcagcgactccttgcaaaggggaaaccaaagaaagtcgctctcatagcagtcgccaataagctcttaagacaagcctttgcggtattaaaaagtggttgtccttatgatcctcattacttaaaactaaaaagtaatcttgaagtagttttgacttgacaattaacacagaa

SEQ ID NO: 7858 - DNA, 1307 bp, unidentified
  source 1..1307: mol_type = unassigned DNA; note = element_c3be8e4
  misc_feature 1: note = core
  misc_feature 2..235: note = LE
  misc_feature 236..1291: note = CDS
  misc_feature 1292..1307: note = RE
  misc_feature 4..224: note = bridgeRNA
cagtgaggatgtaagggcgggtcacccggttggtctgacccaaggcctgaccgacgatcactgtccttgggcggattcgtcgaccggtccgggtgacccgctaccgcactcaccacctgggcggatgtgacctgataggagcctgtgcgagaggcacccatcactgtcttgtccaccgtcgcggcggtgcgtgccgacccttgtccggtgcgagcgaacgggacgacaccccagcatgacagccaagaagcgtcagatcaccggtggaatcgacacccacggcagaacccaccacgccgccgtggtcgaccagaccggccgggtactcaacgaccagcagttccccgccaccgcagccggctaccacgacctcctggcctggctccgatcacacggccgggtaaccaaggttggtatcgagggcaccggcgcctacggcgccggcctggcccgctacctgaccagccagaacatcaccctggtcgaagtcgaccgacccgaccgcaaaacccgccgcacgaagggcaagtccgacccgatcgacgcgatcgccgccgcccgagccgccctgtccggacaagccaacggcacccccaagacccgcaccggccccgtcgaagcgatccgcaccctacgagtcgcccgcagcggcgcagtcaaggcccgcaccgccgcactcaaccaactccacggcctcatcgcctccgcccccgaagaactccgcgccaacctcaccggcctgcacggccaggccctgatcaccgcctgcaccaccctgaccaccgacgacaccccgacaagtgatccgatccaggccacccgagcggcactccactcgatcgccacccgggtccagaccctgaccaccgagatcacccaactcgaacaccgactccaccccatcgtggccaccaccgccccacgcctgaacgcgctcctcggcgtcggccccgacgtcgccgggcaactcctagccaccgccggagacaaccccgaccggctccacagcgaagccgccctagcccacctctgcggcgccgcacccatccccgccagctccggacgcaccaaccggcaccgactcaaccgaggcggggaccgcgccgcaaacaaagcgctctacaccatcgcgctctgccgcctacgccacgatccccgcacccgcgcctacaccgaacgacgcaccacccaaggcctcagcaaaaaagagatcatccgctgcctcaagcgctacatcatccgagaagtccacaccgccctactcgcagacctcgccgcactcaccacttgacactccataggagcat

SEQ ID NO: 7859 - DNA, 1351 bp, unidentified
  source 1..1351: mol_type = unassigned DNA; note = element_c3c2e29
  misc_feature 1: note = core
  misc_feature 2..60: note = LE
  misc_feature 61..1113: note = CDS
  misc_feature 1114..1351: note = RE
  misc_feature 1125..1345: note = bridgeRNA
taatgggatgacccgccctgtcttctgcacaatattcggggttcgaacaggaggagtgcaatgaaggcgtacaacagtcccaaagacgcggccgtgttcggtatcgacattggcaagaacgtattccacgtggtcgggctcgatgcagttggtgctccaatccagaaggtaacgttccggcgcgagaccctgctacagttcttcgcgcgtgcagcaccagttctggtcggcatggaggcctgtcccggctcgcagtggctagcccgcaagcttgtaacgctgggccacacggtcaggatcgtcccggcccagttcgtgaagccgtatgtaaagtcgaacaagaatgacatcatcgacgcggaagcgatcgccgaagcagtaaccaggccgaccatgcgcttcgttgcgatcaggactccggaacaggtcgatctgcaggcactgcatcgggtgcgtgatcgtatgatcgcccagcggacgcgattgatcagtcagatgcgtgccttctgcctcgagtacggcatcgccatccatcaaggtgcggggaaattcaaggccgacatgcctcggatccttgccgacgagagcaatgacctgacacccggcatgcgagacattctcagcgaggtgcttgatgaactggccgacattgagcgccgtatcgcccgcgtcaatcgggagatcgaggcagtcgccgcacgaagcgacacggcccgccggctgatgagcattcccggcatcggacctctgacggcaaccgccttgctcgcggccgccgggtctggtcggcagttcaggaaagcccgtgatctcgcggcctggctggggctggttccgcgggagtactccacgggtggcaaaacgacgttgctcggcatctccaagcgcgggaacaagtatctgcgacgtatgatgatccacggcgcgcgatcctgtgtggtgcatctcgatcgaagccgggatcgcctcggcccttggctgaatgccctcgaagcccgaatgcacaggaataaggtcaccgtcgctctggccgcaaagattgcccgcatcgtgtgggtggtgatgaccaaggccggagcgagctacgagcggcgggatccagccttcggctgatccatgccggtttgaactgcgaggttcgtgaacgtgatgacgagacagttgatcagcgtgtcgtaagccctgtcaaaaaaacgggctgcaagcccgaagcatttaattgggaacgatacgcgcggatctcatcatggcctggccgcaacagcggcccactcgcgagaggccggatacatttgtgcagactggcaccgtcaacacaaaacgaccttgcacggacagggcgggtcataca

SEQ ID NO: 7860 - DNA, 1495 bp, unidentified
  source 1..1495: mol_type = unassigned DNA; note = element_c3cd4aa
  misc_feature 1: note = core
  misc_feature 2..262: note = LE
  misc_feature 263..1480: note = CDS
  misc_feature 1481..1495: note = RE
  misc_feature 25..255: note = bridgeRNA
cccacccgttactttgttcgtagctcctgatccgcgaggatgaggagtgaggcagccagccggggccggcatgattgttgccccctgtcgtaccaatgatctggggggtgttgtcaccgacctccggtctggcggtcggtgatcgctgataggggcaagaccacagccgcgcatatcggggcagggtcgttcgtaacgtggatgccgacgcctaccgccacctgactgccgaacacatacaagcaggacggaggaacaccccttgaacagcattgagcactacgacgacgtcgcggtcttcatcggcctcgatgtcggcaagagcgagcatcacgcggtcgcgctcacccgcgacgggaagaagctctacgacaagccgctcccgaacaccgaagccaagatcatatcggtgctagatcaactcgctgagcacggccccgctctgctggtcgttgaccagcccgccacgatcggggcgctccccgtcgccgtcgcgcaagcgcatggtgtgctcgtcgggtatctccccggcctcacgatgcgccgcgtcgctgacctccaccccggtgaagcgaagaccgacgcacgggacgcgttcatcatcgcggagaccgcccgcacgatgccctcaactctgcgatcgatcaaagtcgccgatgagcagatcgcggaactctcgatgctgtgtggcttcgatgatgatcttgccgcgcaaatcacgcaagtctccaaccgcgttcgaggtctcctcacccagatccatcccaccctggaacgggtactcgggccgcgtctggatcatcccgcgatcctcgatgtgctgcagcgttacccatcaccgggtgagttgcgccgagccgggcagaagcgcgtcgcggccaggctcctcaagcgtgccccgcgcaagggcggggcatgggcgcaggagatcttcgacgccctcgatcaacagaccgtgacggtcaccggcacgaacgccgcgagtatcgtgctgccacggctcgcgaagcaactcagcgaactccgccagcaacgcaccgatatcgcgtccgaggttgagaagatcgtggaagcgcaccctcttcacccggtcctgacgagtatgccgggagtcggcgtcaggaccgcagccagactcctcaccgagatcgtcgggaaacatttccccacggccgggcacctcgcgtcttacgccgggctcgcgcccgtcacccgccgatccggcacctcgatccgcggcgaacacccctcaaagcgcggcaacaaggtcctgaaacgtgcaatgtttctttccgcgtttgcagcgctccgagatcccgaatcacgggcctactacgaccggaagatcgcgcaaggcaaacgccataaccaagcactcatcgcactggcgaggcgccgctgcgacgtcctccacgcaatgatcagaaccggcagcctctaccagccacgaacccaatcagaaaccgccctcgccgcttgacaaacaacatagggg

SEQ ID NO: 7861 - DNA, 1471 bp, unidentified
  source 1..1471: mol_type = unassigned DNA; note = element_c3cfd62
  misc_feature 1: note = core
  misc_feature 2..137: note = LE
  misc_feature 138..1178: note = CDS
  misc_feature 1179..1471: note = RE
  misc_feature 1220..1416: note = bridgeRNA
gaatacgaagggacttcccgcaatccctaaacggcgtcgaggcgccaagattgatgtgttgaagtcaatctgcaacgggaaaggggaagtccatgagcgagattacacgaggctttatcgttcgggtaggggtcgacttggccaagcgcgtgatccaggtgcacgcggtcgacgcgaccgggcgtgtggtggtcgccaaggcgctgcagcgcgacgcattcatggcctggtgcgggcaactgccgcccggctgtctaatcgcgatggaggcctgcagcggagctcatcattggacacgcaagctcatcaccatgggttttgacgctcgcatgattgcggcgcagttcgtcgctccgtatcgcatgcaaggcatcggcggcaagaacgacgcgaatgatgcggcggctgtatgcgaggcagcatcgagaccgatgatgcgcttcgtgccattgaagacgccgcagcagcaggcgatgcttgctgtgcatcgtcttcgcgagggctacaaggccgaccgcacggcttgcatcaaccgtattcgagggctactgaccgagttcggcctggtgttcgcccagagtcccgacgcgctgcgcaaggtgttggccgacgtgatcgaggacgcgacgaacgagttgcccccactgatgcgcatggcgctgcagcaggcccacctgaactggttggagttggaatgccacgtcgcttggtgcgacgagcgaatcgccacgcatgtccggatggacgaacaagccaaggtagcagcccagctctgtggcatcgggcctgtcagcgcgtcagcgcttgtggcctcggtgggcgacttcacacagttccagtcggccaagcaatttggtgcgtggctgggcctggtgccacgacagaactccagcggaggcaagacctcgctcggcaagatcacgaaacgcggtgacgaatatctgcgaaccctgctgatccagggtgcgaagtccgcggtactgagtgccggcaaacgcagcgaccgaatctcgcgatggttggtgcaactggtcgagagagtcgggtggcagaaggccgccgtggcgctcgccaacaagaacgcccgcatcttgtgggccgtgttgagcaagggcaaggtgttcgacgcgaactacgactcgatcatgcccggggcggcgtcggcagctatggcctgaagcaagacctggcgaccaaaggcaagttgaatttgttcctcgcagacatgcgtccgaagatgcatcacacaggtcagaccggcagcaggtgaactcgggaaagctgcagtcgcgccatcgggcgacgacgagaatggaatggagtcctgctgagcggttcgtatctgggcccgcaccaacgagtgcaacaaggccgcctgtagatgtgcagtctgttctctgtgctgctgcagcttcaagacgtgggtctattcgaggatggaaaggtattgaccgaatgggaagtccctgta

SEQ ID NO: 7862 - DNA, 1592 bp, unidentified
  source 1..1592: mol_type = unassigned DNA; note = element_c3d4bee
  misc_feature 1: note = core
  misc_feature 2..78: note = LE
  misc_feature 79..1149: note = CDS
  misc_feature 1150..1592: note = RE
  misc_feature 1355..1583: note = bridgeRNA
taatgggatggtccggccgtgctcccgccccgccagcaagggaagctggcaaggggcgccaaagacgaggagcacgccatgccacacaagctcaattctggaatcgccgtgatcggcatcgatatcggcaagaactcgtttcacgtcgtaggccacgataaacgcggtgcaatcgtgctgcggcagaagtggtcacgtggccaggtgggggcgcggctcgccaatctgccatcatgcctaatcggcatggaggcctgcgttggcgcgcatcatcttagtcgcaagctgcagatgctgggacacgatgcacggctgatgccagcgaaatacgtgcgcccgtattccaagggacaaaagaatgacttccgcgacgccgaggcgattgccgaggcggtgcagcgcccgactatgaagttcgtcgcgaccaagaccgccgagcagctcgatttgcaggcgctccaccgcgtgcgtgagcggttggtcagtcagcttactggcatcattaatcagatccgcgccttcttgttggagcgtggcgttgccgtgcggcaggggttacgtttcctgcgcgccgagctgccgggcatcctggcgacacgcagtgatatgctatcgccacgcatgttgcgggtcatcgagaacctgacagaagactggcgtcggctggatgagcgcatcgaggacctctccagcgagatcgaaacgctggcccggcaagaccaaggctgcgcacggctgatgagcgtgcccggcattgggccgatcatcgccagcgcgatggtggccgcgatcggcactggcgatgcgttctcgaaaggccgcgacttcggcgcttggctcgggctggtgccaaaacaaatctcaacgggagaccgcacgatcctcggcggcatatccaggcgcggcaatcgctatctgcgcactctgttcgttcaggcagcctgggtggtgttggtcagggtcgggccaaagcattgggagcgctatgggctcaagtcgtggatcgaagcggcgaagaagcgactgcatcacaacgtccttgccatcgcactcgccaacaagctcgcccgtatcgcctgggcggttctccacaaagggcgcgcgttcgaatgtgttaagagcgatgcgatggcatccagacctgcttgatcctcgcgccgtgctcgggcccgtcaaggcctagcctggcaacgcggtagcgcgccgcaaggcaagcgcgacggccagccttgaccgcccctgcgcggcggcgcgcgtccgcatccgcagatcggacgaaggaacgggccgccaaggtacgaacacaggaacagcacaaaatgagaagttatcgatgacgtagccaacagcctttacccgccgagttctgcgagaggatgagaccaaatggaggatcggtcttcccggcgcatgcgaacactggtgacccaaatggcccgcgcgaggcctgaccgctaagcagatcgcatgtgcgctgatatccatgatggctcggagcaccacgcgctccaatcagaagccggatacattgatgcaagaccgcatcagccagatcgacaaaaacctcttgcaccacacggccggaccataca

SEQ ID NO: 7863 - DNA, 1394 bp, unidentified
  source 1..1394: mol_type = unassigned DNA; note = element_c3d8ab1
  misc_feature 1: note = core
  misc_feature 2..89: note = LE
  misc_feature 90..1112: note = CDS
  misc_feature 1113..1394: note = RE
  misc_feature 1163..1386: note = bridgeRNA
caatgggatggacgcccccacccgtaacggcatcagatgtgccaaagtggaagtgtcaaccaaccacttgagtcgaggggggcgtcaccatgaagattacgacaatcggcatcgatttggcaaagaacgtgtttcagattcatggagttgatgcgcacggcaaagcggtacttaagaagcagattaaacgcgaggagatgacggttttcttcgctaacctggaaccgtgtctgatcggcatggaagcatgcggcggggctcattattgggcccggaagctgcagagccaggggcacacagtcaagctcatggcgccgcagtttgttaagccatacgtcaagaccaacaagcatgacgctgctgatgccgaagcaatttgcgaagcagtaacccgtccgacaatgcgcttcgttccggtcaagcatgttgaacagcagtcggtcttggcgttgcaccgagctcgacagggtatggtcagagcccgtactgcacaggcgaaccagatccgcggcctactagctgaatttggactagtcgtcccgcaaggcatcacgcatctatatcaacgtgtacctctcctgcttgagcaagcgaaagacgagctacctggcctattccaacagctggtacagcgtctcatggcgcacctaaaagtactcgaccgccaagtagatgagatggagtgcgagattcagatgtggcaccgttcgaacctattgtcgcgcaagctggaaaagattccaggcattggacccctcacagcaagtgccgtggttgcatcagtaggcgatgcgaagagctttgacaatggtcggcagctcgccgcgtggcttggactagtgcccaaacagcattccagcggaggcaggccaacattgctggggatgagcaagcggggagattgctaccttcgcacattgctaattcacggggctagagcggtgatttatgcgctcaagcgcaagccaccaaatacaggatggctagccaacttactggcacgacgcgacaagaatattgtcgctgttgctttggcgaacaagaatgcacgaatcatctgggcgcttctggcccaggatcgagaattccgatctgattacgcaacaccgtaatcagatcggtgagcgacgacgaaattaaggagctgtaggcagatcaaaccaccgattgctcaggcaaacacgaagtgatggcaaggcaggtaagaccgtagtcggcaaagcccgtttgggtcggagcatgaaaaatgcgcgctttcgattggggcgccggctagcaaatcccatcagggaccgtggcagttactgctgcactaaagtccggatgtacgggtgcaatctttaccttctgctgatcacggaacgaatgcttggcaaaccgggggcgtccatgta

SEQ ID NO: 7864 - DNA, 1551 bp, unidentified
  source 1..1551: mol_type = unassigned DNA; note = element_c3dac0c
  misc_feature 1: note = core
  misc_feature 2..135: note = LE
  misc_feature 136..1317: note = CDS
  misc_feature 1318..1551: note = RE
  misc_feature 1234..1524: note = bridgeRNA
agacgatatgagaaagccatttgggtcgcctcccccgcggcgcagcttctttccgcgggctcgggatgccacaatgggctttgagtatcggcccgtgcggtagcccttaccgcacctgcggggaggaggcttcccatgccccatgttacctccatcggcctggacgtccacgcgcgatcggtcgccgccgcggcgttcaaccccttcaccggcgaggtggtgcaccgtgacttcgggacggacgccgccgagatcgcggagtgggccctcgggttcgaggagcccagggcctgctacgagagcggccccaccggcttccacatggcgcgcgagctgcgcgcgctcggcctcgactgcgccgtggcggccgtctccaagatgcagaggccggcggcggacgcgcgccgcaagaacgaccggcgcgacgccgagttcatcgcccgcatgctcgccacccacaacatcgtggaggtcccgctgcccgatgcggccgtcgaggccgcccgggacctcgaccgcgccctcgacgacgccacggcggagtaccgccgcgccaggcagcgcctcaacatgttcctgatcaggctgggccacgtctgggacgagcgcaacgccgacgggacgaggaagggatcctggacgcgcgcccactggaggtggatatccgggatcaggctcgaggggccccagcgcgacgtactcgagtactacgtcacggccgcgaggtgcgcggagtcggaccgccggcagctcgagaagaaggtgctcgccctcgcccggaccgaccggtggcgcccggccgtcgaggcgctctcctgcatcaagggaatcgacaccctgacggccttcaggctcgcagccgaggcgggctccttcacgaggttccggacggccccggccttcgcgagctggtgcgggctggtcccgtcggagcgctcgagcggcgagaccgagcggcgcggcgggataaccaagacgggcaaccggctcgccaggacggcactggtggagtcggcgtggcactacctgacgtgcacgccccgcccgaagtccccggcgcccggcgcggacgtccccgcggcggctctgccgccgccgcgaggtgctggcggcggcgggcaagagctcgtgcaaggcaaacgccgccgtcgcgcgcgagctcgcctgctgggtctgggagatcgggcgccgggcggaggggaccctcggctgaccccgtcggacaacaagcctcccgccgggagggtccgcgcctcgacgcatcgccggcgcgcgttcacgagccctttttgggcagcccaagggccgtgcccgtgaacaagactggtttcggacgagtgcgccggacggagaatcgaaatgcggtggggtgcgcggacataccgggctgaccgccggcagcgcgcccgcaagagcccgcggatattagcttgccaggcaagcgtcgactaaacgtgcagcgtgcgcgggccctcccgacgggaaacgaaaaagcccggtttaaaaccgggctcgaacaaacacgcctattgacaatggctttctcatatt

SEQ ID NO: 7865 - DNA, 1575 bp, unidentified
  source 1..1575: mol_type = unassigned DNA; note = element_c3dc0ad
  misc_feature 1..3: note = core
  misc_feature 4..247: note = LE
  misc_feature 248..1408: note = CDS
  misc_feature 1409..1575: note = RE
  misc_feature 1..222: note = bridgeRNA
cccgttaccttgtcagtatccccgataatggggatagtcgctggtcccggtatggcttacttgccctgttgtttcgatgatccgggggggtgttgccgccgggtgccaggacgttcgatgacagctgtgatagggacaaggccggttctcaaactaggtctctttgtaacgtgggtgatcgctacgaatgtcatgacgccagcgactggaacaaggacatgttcatctcgttttctaggagctcaccttgtcacaggaactctccatcgacatatttcttggtttagacgtaggtaagtctgaacatcacgcctgcgctctcgaccgcgacggcaacaaggtcttcgacaagccgttgcctcaactcgaatccgaactagcaagcgttttccatcagcttcaagagcatggcacggtgcttgtggtcgttgaccaacccaacacgattggcgcactaccgattgctgtagcccgtgcctgcggatgcgaagtcggatacctaccaggtctagccatgcgcaaagccgcagatctctatccaggacgtgcgaaaacagacaaacgcgacgccttcatcatcgccgacaccgcccgcacaatgccccacacactacgtgcggtcgaccgaagcaacgaagttctgtcggcgctgaagatgctgtccggcttcgatgacaacatcgcccgcgactgcacccgcacagtcaaccgactacgcagtatcctcactcagatctaccccagcctggaacgagtctttgccggtagcaccctgactcgcaccccagttttggatttgctgatccactacaagggaccccaggggctgaaacgagccgggtaccatcgagtgctgaactggatgatcaagcacacacgcaaagaccccaccccgctggtagacgagatttttgcagcactgaaagcgcaaacagtcaccgtgcctggaagtgatgccgccgagctcgtcatcccacagctggccgccaacatcaaggcactcaaagagcaacgcaacaccattgctgaacaggtcgaggggatgcttgatgatttccctctttgcgaggtcttgatgagtatccccggagtcggcatcaagaccgcagcgcagatcctccttgcgatcggtgacggctccgacttcgatagcgccggacacctggctgcatacgcaggaatcgcaccagtcaccaggagatctggttcatcgatccgaggagaattcccagcgcgatcaggcaataaacgcctgaaaacgctttgttctattccgcattcgcggctattcgcagccacgaaccatcacgccagtactacgaacgtaaacgagccgaaggcaaacgccacaacgcagcagttatctgcctggcacgacgccgatgcaacgtcatctacgcgatactgaaaaacaaggaattcttccgcgagatcccaccacgcccagccgccgcataacgtccaacaaagcgaaaccgaccagcacacgctggccggttcctaagcccgcctaaaagctaccccatgcctgtactcgtcagcggcaacctaacacttgacaaaaacatagggaca

SEQ ID NO: 7866 - DNA, 1597 bp, unidentified
  source 1..1597: mol_type = unassigned DNA; note = element_c3dff76
  misc_feature 1..2: note = core
  misc_feature 3..262: note = LE
  misc_feature 263..1471: note = CDS
  misc_feature 1472..1597: note = RE
  misc_feature 12..282: note = bridgeRNA
ctattacaataagttttggttggaagcccagcatccggctgggcttctttccgtctcttgcctaagctacaataagggaagcaactggctgaccacgccctccttgggcttttatgtccgcaagcaagactgtcagccgtccccttattgcagcgttcgatttgagcaggttgagccttggagttcgtgtcacccaatagattgaatcggcaatgagaaaaagatggattccggttgcgattcatagattggaggaatacaaatgaactctgtaggcatcgacatttccaaaggaagaagcacggtttccgtcatgcgtccctttggtgaagtcgtcatctcgccctttgaagtccgtcacaccgacagtgaactgagcgaactggcaaagcagctcaaaagcttaaacggtgagacccgtgtggtaatggaggccacagggaactaccatgcgccggtggcaaaactgctccacgacgcagggctatatgtttccgttgtcaatgcaaagctggtgcatggctacgggaacaacgatttgaggcgtgtcaagaccgacaagaaagatgccgtaaaactggcgaactacggtcttgaccgctggcttactttgccgaagtatatcccagaagaagatacccggctgttgctgaagagctgctaccgacagtaccggcagtattccaaggtgcagacggttttgaagaacaatctgatctccttgctggatactgtttttccaaacacaaaccacctgttcagcagtcctgcccgtgcggatggaagcgagaaatgggtggactttgtagcggagttttggcattgcgaatacgtctgtgaacgctctgaaagagcattcgtcaaccagtaccagcggtggtgcagaaaacatggctacaatttcagcgaggagaaagcacacaccatttacgccgaagccagcggacatattggcgttatgccaaaaactgagaccacgaagcttcttgtggggcagtccgtgtcccagcttagagcaacctctgctgcccttgccgcactcaaacaggaaatgcaatcattagcctcccagctgccggaatatcccgttgttatggatatgtttggcgttggtccggctctggggccacagcttatagctgaaattggggatgtgcgtcgtttctattccaagaaagcgcttgtggcctacgctggcattgatgccccgccaaatgactctggcgatgtgaccggcaggcacaagagcatgagcaaagttggtgctgcctctctgcgcaggacgctgttccttgtcatgaccgtctacttgcagaagttgccacaggatgaaccggtctaccagttcatggacaggaagcgagctgagggcaagccctaccgcgtctacatgatggcttccgccaacaagttcctgcggatctactacgccacggtgaaggcatacttggagtctttagagcaagtctgaattctgttgaataggcattgggctggtcgccgtttcaaatttgagatgcaaagcggcttggattagtgcgtcctttttcctctactcaaaatttttgatcttccttcttgacaaaacttagcaggt

SEQ ID NO: 7867 - DNA, 1411 bp, unidentified
  source 1..1411: mol_type = unassigned DNA; note = element_c3e5bcf
  misc_feature 1: note = core
  misc_feature 2..88: note = LE
  misc_feature 89..1120: note = CDS
  misc_feature 1121..1411: note = RE
  misc_feature 1172..1403: note = bridgeRNA
caatgggatggacccctcctcacctaatcggcatcaaagtgccagactggaagtggtatccaccagtcgatagagaggagaggtccacatgaagcttattcgaatcggggttgatttggcaaaggacgtgtttcaggtgcacggggtagaccggcatgagaaggcggtttggcggcgcaagctcaggcgcaacgaatggctcaaggtgctggtatcgacggtagagcccgggtgcgagattggcatggaagcgtgcggtggggcgcaccactgggcgcgcaagctgcaagggatgggattcaaggtaaagctgattgccccgcagtttgtaaagccctacgtcaaaggcgataagagcgacgccaacgatgccgaggcgatctgcgaggcgatgagtcggccgagcatgcgctttgtgacggtgaagagtgctgagcaacaggacattcaggcggtgcaccggattcgcgtgggcttggttgagcagcgcacggccaaggccaaccagatccggggtcttgctgccgagtacgggctggtggccccaaaagagctggggcagctacgtactgcgctgccctgctggctcgaggatgcacagaacggtctgagcgatcggttcaggcagctgctcagtggcgtgtgggaagatttacgcgcactcgatgagcgtgtgggggagctggatcgagaaataacagtgatcgccaagagcgatccgctggcaaagcgcttgcaacagcttcgtggagtcgggccggtgattgccacggcgctggtgggggcgctgggcaatggggagcagtttgcccgtggtcggcagatggcggcggcactggggctcacgcccaagcagcacagctcggggggcaaagagcgcttgttggggatcagcaaacgaggggacgcatacttgcgcaccctgctcattcacggcgcgcgttcggtgattcgaaccgccaaatgcaaggaggatcggttaagtcgatgggtcgttgcccttgcggcgcgcagccacccgaacgttgcggcagcggcccttgcgaacaagaccgcgcgcatggcctgggcgatgatgagaaacggcaccgattaccagcctgatctggtcacagactagagtaatgagcgggtaagaaacccgatcaaccaccacataacgaaggagcacatcactcacgattgccaagcaaagccgaacgatggcaaacaggtcgaaccggcgtcagcaaaacccgaggaaacccaagtgcttaaaagcacgttggcgcaaatgggagctggcgcgcgaatagcccatcatggtcctgcatcgatcgctcgatgcttcagttagagaccgaatatacgtgcgcagtcgtacctacacgccaaagaacggtcagcttgcaaacgaggaggggtccatata

SEQ ID NO: 7868 - DNA, 1350 bp, unidentified
  source 1..1350: mol_type = unassigned DNA; note = element_c3f097e
  misc_feature 1..2: note = core
  misc_feature 3..67: note = LE
  misc_feature 68..1099: note = CDS
  misc_feature 1100..1350: note = RE
  misc_feature 1103..1340: note = bridgeRNA
ttatggaatggctcgcccctgcattgtgccacatgttggcagaattattcagggaaggagtagagcgatggaagtcgtagttctcggaatcgatcttggaaagaacagctgtagcgtggttgggctggaccaagccggtcgagtcgttcttcgtcggcgcatgaggcgggagagcgtcatcaagcttggtgcaagtcttcctgcctgcacaatggcaatggaggcctgctgcggcgcccaccacctcggacgcattctggaagcgcaagggcacaaagttcggctgatgtcgcccgaatacgtccgcccctatgtcaaagcccaaaagaacgatgatcgcgatgccgaagcgatcgcggaagcggccactcgcccgaccatgcggttcgttgagctcaaggacgaggagcagttggatatgcagacgctccatcgtgcccgtgatcgcctggttggagaaagaacggcgctgatcaaccaactccgcgccatccttctggagcgcgggattaccgcaccgcaaggccgcagaaaactggcgatatggctcgatctggctcggagcaatggcgagctgctactcggccgaagggtcgcggtcctgatcgaggacatgcaggcacagtggagcgagctcgaccggcgcattcaggcctttgacgaggagttcaaatcctatgccctggccgatgctgcctgccggctgctgacctccattcctggcattggtccgctcaatgccacggccttgaccgcttcaatcggtgaagctcagctttttacacgcggcagggatctggcggcctggctaggactggtcccgaggcaaatgacaacaggtgggaagcccaggatgctcggcatcaccaagcggggaaacaagtatctgcgcaagatgctcatccacggcgcccgtgctgccttaccgacgctttcgagcgctacaaccccactcggtgcatggttgcgcggtcttttaggacgggcgcacaagaacaccgttgtggttgcgcttgcagcaaagctggcgaggatcgtgtgcggcgtcctcaagagcgggcgtccatttgaccacggcgtgacaccagccgcggcctgattgaataacagcccagaacgcttacacgtcgagggctgtcgggatctgcatgtggtatgtgaaagatggcctgacagtcgatcggcgcttcgaaatcctggttaaaaaaatggcgttctccgccgtgaaatttatgaggatcgaagcgcgcgaagctccatcttggccgggctttgcccgagaccggatacgttggcgcagactgctcggaccaatcccacaaagcacttgcagacggggcgagccatacg

SEQ ID NO: 7869 - DNA, 1434 bp, unidentified
  source 1..1434: mol_type = unassigned DNA; note = element_c3f83de
  misc_feature 1: note = core
  misc_feature 2..128: note = LE
  misc_feature 129..1148: note = CDS
  misc_feature 1149..1434: note = RE
  misc_feature 1192..1434: note = bridgeRNA
gaatgtaatgaacgcctcccaccagtctgtagggcgaatggaagaggaccctccaggccgacggcatcagagtgcctaaaatggaagatcacgaagattttcttcacaggcaaacaggagagtccaaaatgaagcttacaacagtcggaattgatattgcaaaaaatgtgatgcaggtgcactacatagacatagagacaggggaaatagtgaacaagccgattaaacgcgcgaagttccttgagcactttgccaatcgggagtcctgtttaataggcatggaggcatgtggtggagcccaacactgggctcggcaattgatcctaatgggacaccaggtgaagctgatgccagcgaagtttgtgaaggcttttaatgtgcgtaataagaatgatgcagcggatgcacgagccatctggctagccgtgcagcagccaggtaaggcaattgccgtcaagacagaagcgcaacaagcggtgctggcgttacatcgaatgcgtcagcagttggtgaagtttcgcacgatgcaaataaacggtttgcacggtttattgactgaatacggtgaagtgataggaaaagggcgagccgcgctggataaagcgatgcctattgtgttggaaaggatagccgatcgcctgccaagcatgttgcttgatacgttacgagaacagtggaatgggttaaagcagctggacgcgcaaatcgctgaaatcgagagacggttgcgtgaatggatgaaagaagataaagcagccaaggccctgatggagatacctggggttggggtgctcaccgcgagtgctgccgttgcaacgataggggatacgaaagtgttcaagtcaggtcgagagtttgcggcctggattggtctggttcccaagcaaacaggctcaggcggcaaagtgaagttgcaaggcatcagcaagcgtggtgatgtgtatttgcgtaccttgctcattcacggagcgcgtagcgtgctcgcacatgcgaaacagccaagcttatgggttgagcagatgctcaaacggcgtccattgaatgttgtggtcgtcgcgctcgccaacaagatggctcgaactatttgggcactattggctcataaccggttgtaccaaacagactacgttagcgttaagcctgcataagcaggccgcacggtgtagaaagtttatctttattttttaaagagtgacacctccaaaggttgcgcaggcatttcaaatgggatgacaaaacaggttggaccgggactcactaaacctgcatgatggccagagctttaagttcgctcgaagaatgaggtgtgagtcagcgaatttcatcggggcccgcagctttagtatcggctgcaagaggtcgaatatagagctgcagcctaacctatctgtctgaacttaagaaaagtttgctcaaacgggaggcgttcatata

SEQ ID NO: 7870 - DNA, 1588 bp, unidentified
  source 1..1588: mol_type = unassigned DNA; note = element_c402e22
  misc_feature 1..4: note = core
  misc_feature 5..288: note = LE
  misc_feature 289..1458: note = CDS
  misc_feature 1459..1588: note = RE
  misc_feature 45..265: note = bridgeRNA
tcacgtataatccaattatccttttctatagggtggttggattattttcctttctcccaacctttttgttggggtaattattgttactccgttataatagttaagcactgtggatttgtatctatttaaatacagctttgactgtttccaggtgactcagaccacagcttttcgtcttcattggtaatcagttagttaacgcatagacgtttatatttacgtgatcacatagccggaatccttgtggaaaacaacagtgcaaaaatattatcttaggaggtatctatcatgtactatgtcggtatcgacatttccaagtataaacacgactgtttcatcattactgatgctggttgtgttgtctctaatccttttaccatcaaaaataatcatgatggttttgaagaacttcttacagtccttcactctctggatagcccagaagaaataagaatagggtttgaatctaccagtcattatgctctaaacctgaaattattccttgaaaaagcccactacagcttcatggaatttaatcctgttcttcttgctaagttcaacaagtctcagtctttaagacgtaccaagacagacgcaatcgattgtgctttgattgcccgctggttaatgacggtggaatacaaaccccatccaactggattttatcatacatattcccttaagtcattaacacgtttgcgcgattcccttgttaagcaacgtagtttctatctagttaaaataactaatgttttagatcatacttttcctgaattcaagcctttctttgataacagacttggtgcaaccgcgctttatcttttagagaactatggcactgcagaaaaaatctcacgtatgaacgcacaatcgtatgatgccctgcgtcgaatctctcgtgggaaattttctatgcaaaaatttctaaaattgaaagaactggcaaagaacacagttggtgaagataattctatattcatcttgcaattaaactgtctactggctttatataggctctgtgccaaagaagcggattcattagagcaacaaatcatatttcttatccatgaagttaatccaaaagctttaacgatccctggtattggtgctttatcagctgccgttatctatgctgaatacggggatttttcaaaattcaattccgctgcacagatgctttcatttgccggattagaaccaggctattatcagtctggcatctctgaatatggtgggcatatggtaaagcgtggttcttctcatcttcgctacacactgatgaacctctgtatacctttgattcagtacaatatggtctttgcagaatactatgcaaagaaaagggcagagggtaaaactcaccgggttgcctgttctcatcttgtaaaaaaactgattcgtgtcatttttactctcgaaaaaaatgacatagatttcgttcctgaaaaactccgctgattgtgtagtggcaatcggttatatctgcttttactaacctttcaaaaatctcattttgaaaggtttattaaatatactcatttttagatatgaaactttttctaaaaacatattgacttttaatagttag

SEQ ID NO: 7871 - DNA, 1633 bp, unidentified
  source 1..1633: mol_type = unassigned DNA; note = element_c405db7
  misc_feature 1: note = core
  misc_feature 2..239: note = LE
  misc_feature 240..1457: note = CDS
  misc_feature 1458..1633: note = RE
tcgtataatacatttatcaatcaaatattaaaatattgattgaagttctataaaactcatagctctcacaaaagctaataataaacaagtttttttccttttaggataaagatacctacacataaaacgtcttgtgttagctttttttaatcatctataggatgctcgggagaaattgtttttctacctgttataacacgaagctatgagattttaaactatcacaatggaggattatcatgtattatgttggagttgatattgctaaggataagcattatgtttgtattttagatgaatctaaagagttagcttgcaaacctttttggattcatagtgacattttaggattaagagaattactaaaacgattagctgatttatcacttgacaatgatgattttattattggaatagaatcaactggagcattcagtgaaaatttttattcttaccttactgatgctaattataaggtaatcttactaaattcttatcaaacagctaagtatagagatttctctacacttaaaaagattaaaaatgattcgatcgatgcttatgttatagctgaactattagcaactggaaaatataaagctagttatattagcaatgaagcttatcataatttaaaagttttaaatagactaaaaaaatctttagatgataagattaaaactattaaaagagaaatatctacagttgtagcaactgttaatcctgagattgaaaaagtatttccaaatatctttaccaaaactgcaatagcaatcattaaggcctatcctactgcaatggatattcaaaaagctacgccagcaaagctaaccaagatatttcgtcacatcaaaggtaataactttagtcttgaaaaagcaaagtacttgatagaactggcttattcgtctatttattcaggtcgtgcttatgaatcaagggccttaatgatcagaactaatattaagatattagagctttacattcaagaaaaagaagatattgaaaaacaaattcaagatttaattgataatcaattggatgaggattcaagtaatattgaaaatactaaatctattcctggagttgccaataaaaccattgctgctattcttggtgaatgtggagacttacgaagatttgaatctgctaaagccttcattggctttttaggactctatccaactttatatcaatctggtaaatctttatccactggaacattagcaaaaagaggaataccaatagctaaacatgcattatatctcgcagctgtatcagctgtaagacataatactgaacttcataagctttatcgcgataagcgttcctctggtaaatcaacaaaagaagctttaataattgttgctaagaaattagcatcaattatttattcactttttaagtataaccaagcatataatccaaacagagtacttatccaacatagaagataaacttgttagtttaacacttgtgagaacaatgagtttttatagaactttgacctaataaatgtatcaattttttatttgatcatttgaacactttgttaaaaaatgctcaaaaaatcaaaccataaagcacacccataaaaaatagctagtcgtttaagctattctttataggatgg

SEQ ID NO: 7872 - DNA, 1376 bp, unidentified
  source 1..1376: mol_type = unassigned DNA; note = element_c40de00
  misc_feature 1..3: note = core
  misc_feature 4..84: note = LE
  misc_feature 85..1113: note = CDS
  misc_feature 1114..1376: note = RE
  misc_feature 1087..1363: note = bridgeRNA
tgatggagtggatgccccctcccgacggcatcgagtgtgccagagtgatgtttgcaacaacgtcacattgaggaggtggcatccatgaatgaggttagcattatcggcctggacctcgcaaaacgggtcttccagcttcacggcgcgcatcccgacgggagcgtggcctttcgccggaagctttcgcgccatcatctgctgacattcctgtccaaccagccccgttgtgtggtggcgatggaagcctgcgcgacggctcactattgggcccgggagattggcgcgctcggtcatgaggtccgcctcattcctccggcctacgtcaagcctttcgtcaagcgccagaagaacgacgccgccgatgccgaagcaatcgcggaggcggccagcaggccaacgatgcgtttcgtggtagctaagacgaccgcgcagcaggccggtgccatggttttccggacacgggacctcttcgtccgtcaacgcacccagttgatcaatgccttgcgcgggcagctcgctgagcatggcgttatcgcgccacagggcgtgctcaacgtgaaggcccttgccgacatcgtcgaagacacagcgtccggcctcgacctgctgattgtagaaaccgctcggctctatctggaacagatagtgctcttgtcgctgaggatcgccacgctcgagaaggcacttcgagatgaagctgcgcaagccaccaccacgtcccggctgatgaccatgcccggaatcgggcccgtgacagccatggccatcgaggcgtttgcaccggcgatgacgacattcaagcgcggccgggatttcgccgcctggctcgggctggtgccgaggcagaactccagtggtggcaagcaggtgctcggcagcatatcgaagatgggccagcgcgatatccggcgcctgctcatcattggcgccatggctgtgctccgatcggtcagccgcaaggggctccccgatggttcctggcttgccggcatgctgtcgcgcaaaccgcgcaagcttgtggccattgccctggcgaacaagatggcccgagccgcatgggccatgctgtcgaggaatgaggattacagggcaccagtcgctgttccggcctgatcggcaacgatccaggttggcaacgtcggcgtgtgggaaggtcaacgcatagtaagggcaacgtgatcggtcagagcgatctggaaaagcatgcgggtcagtgagccactcaagctcgcagaagtgatttgcaccagatctgcacatctccataccggccggcggtcaataactggccgcaccaaaggcctgatacatgaccgtatccgatcacgcgccggcgctgagcaaggacctcttgcacgaacgggggcatccataca

SEQ ID NO: 7873 - DNA, 1627 bp, unidentified
  source 1..1627: mol_type = unassigned DNA; note = element_c413ec8
  misc_feature 1..2: note = core
  misc_feature 3..283: note = LE
  misc_feature 284..1495: note = CDS
  misc_feature 1496..1627: note = RE
  misc_feature 12..306: note = bridgeRNA
ctactataatatatttggatgaagaaccaggcatccagccgggtcttcttccatccttatgccaaagctgttagaatgagaagtgcaatcggtgtgacgtcttctttcttgggccaatgcccgctccaaagtccgtcagccggcttctcattcacagccattcgatttaagcagattgaactgccgtacccggtacgttcggatcatatcccagtagatggaatcggcaatgaggaaaaaccggattgccgttgctactattaatgtcaggaggatgtttttcatgatgaacgcggtcggtattgatgtttccaagggcaggagcatggtcgctgttgcccgtcctggcgaagtggtcgccagaccttttatcgtttcccatacacaaagcggcatccatgagttgattgatcagcttagctcgctggatggcgaaacccggattgtcatggagcatacaggccggtattacgaaccgatggcgcagaggctttcagatgccggcttctttgtttctgccgtcaatcctaaactcatcaaggattatggtcataattctttgcgcaaggtaaaaacggataaggccgatgcgaagaaaatcgcctgttatacccttgacaattggcttgatttgcgccaatatacgggtatggatactttacgtaaacaactcaaaaccatgaacacccagcttgatttcttcacgaagcagaagacggctgccaagaataatctgatcgcccttttggatcagacttatcctggcgtgaacgccttcttcaacagcccggtacgcagtgatggcagtcagaagtgggttgattttgccaaatctttctggcatgtggattgtgtccgtacgctgagcgccgcttcttttatgcagcgttaccaaaaatggtgccatcggcacggatacaatcatcaaccggataaggcaaaagcaatcttcgatacttccactgagctgattgccatgcttcctaagaatgccatgaacaagatgctcgtcatgcaggggattgatcaattgaatgccgtctccgccatcatcgaacagctcaaggcggagatgaataccctggccagtgatcttccggaatattcggtcgtcatggccatgcccggggttggtccctcccttgggccccagatcatggccgaaatcggtgatatctcacgatttcctcacaaaagtgccctgacggctttcgccggggtcgatccgggagcgaatcaatccggtgatttcgaagcgaagagtaatcacgcttcgaagcgcggttccccgcgactccgaaaagcgcttttcatggtcatggactgtctgattaaaacctcaccgccaaatgacccggtctactgctttatggataagaagcgctctgaagggaagccttatcttgtctatatgacggcaggggccaataagttcctgcgaatctattatggacgggtgaaggcataccttgcttcgctttcgcctgctgaatgattctgctctttcatacttttttcaccggctggcgtgtatgcggtggcttatttgtgatgctttttttcgaatcaccctctctactttctttgacaattattttcaatttttacttgactttttattagcaga

SEQ ID NO: 7874 - DNA, 1462 bp, unidentified
  source 1..1462: mol_type = unassigned DNA; note = element_c41a67a
  misc_feature 1..2: note = core
  misc_feature 3..228: note = LE
  misc_feature 229..1446: note = CDS
  misc_feature 1447..1462: note = RE
  misc_feature 1..211: note = bridgeRNA
ccttaccttgttgggcagctctgatccgtcaggattggggttggtgctcggcagtgcgggcagggctctgtgcccctgtcacatgatggcctggggggtgttgccacccgtgctgtccgggtgcggctgacctctgacagggacatgctcttttgggctgattcgtaaggtggttgatggcggccgtgccgttcgagcatcaccaactggaccagtcagaggagaagcatgaagttcgattatcggagtatcgaggtgttcgtcggcgtcgacatggccaaggaacatcactacgcgcaagtagtcacgaccgccggaacggaggtgttccatcggccagtgctgaacgaccagacggcgatcggaaaattgatcgttgatgccagcaagcacggtcgtgtggcgttggtgatcgacatgccgtcatcgcccgcgcagctgcttcttgcggttgctcgtgaacacgacgttccggttgcgtatgtgaccgggttgcagatgcgacgcgccgcggagttgtacgcggggcaggccaagaccgacccgcgtgacgcgtgggtcctggccgatttcgctcgccgtcatgcggatcagttggcgtggatcgaagtgaccgaagatctcctcgcgaagctacgcattctgaacggccgagacgtcgatcttgccgaggatgccaatcgcgcttcgaaccgttgccgcgacgctctggtgagcgtttcgccggctctggaaagggttttagggtcacagctgagtctcggcggagtccgggatctgctggccgcgtgcccgacaccgacgtcgttatggcgggccggggccgatgcgatcaaccagctcgtcagggctcgctcaccgcgtgtcgctgaccggatctcgaccgccgtcataaaggcgctcgaggcccagacggtgacgttgccgggcgaggacacctggggtgaaatcatcgccggtctggtcgctgatctggaacggatcttcgagcaacgcaaacaactcagagcacagatcgagcaggtgttcctcgagcaccctctcggacaggtcctggtaaccctgtgcgggttcgggcccaggaccggagcacgaaccctcgctgaaatcggtgaccccacccggttcaaagacggcggccggctcgccgcgtacgccgggctcgccccggtcgacagacgctccggtaagagcatcaacaacgccgcagcgtcacggcgcgggaaccaccgattgaagaacgccatgttcctcgccgcgttcgtcgccacgcagcacgacccgaacgcgaaggcgtactaccaacgcaaacgcgccgagggcaaaggccacaacgccgccgtgatctgcgtcgcccgccgacgctgcgacctcatccacgccatgctcaccaccggtcaggcctacgacccccaccgatcagaaaaccaggcaaaagccgcttgacaaaaagacagggaca

SEQ ID NO: 7875 - DNA, 1170 bp, unidentified
  source 1..1170: mol_type = unassigned DNA; note = element_c41dc81
  misc_feature 1..2: note = core
  misc_feature 3..216: note = LE
  misc_feature 217..1167: note = CDS
  misc_feature 1168..1170: note = RE
  misc_feature 16..191: note = bridgeRNA
cttgtatggcgttagggtaggagcctgtcgggggtggagggacaaagtccgcttctgcaagccagacggtgggagacttcccccatccacgcgctcacgacaagcgccgataaggaatccatcggattgagtggctgctcataccgacaataccggcaagcctgcgccattgtgagccccgacaggtgatcttcatcttccccgtcggagagcgccatgacaagccaagttgcagttatcggaatcgatgtggccaaggagacgctgagcgtctgcgatacgcggtctggtgaggtgttcgagctagccaatgaccgtcgcacgatcaaggcctggctcaagactctacctgggtgctgcgccatcgctatcgaagccacaggcatctaccacatggatgttgcgaccctggctcataccaaggggcaccggatttacgtcattaacggcttccgcctgagcaactatcgcaagggcattggtgggcgaaacaaggacgaccgtagcgacgcccaactgttggcccgttacctgtctcatgagcagactcaactggatccctggcaaccgccgagcaaggcgtactgccgcttgcagacgttgttacatcgtcgggcaacgctcgttcgtagcgcgacatcgctgcgtcagagcttctctcaggaccgcacactggccaatgcactgaagccggtcctcaagcgtatggccgtcctggagcggcgtttggagaaggcgattcagacaactctggacgaggccggcctgaaggaacagagcaagcgctgccaagccatcgagggtattgggcctctgactgctgcagcgctgaacctggcgtttctgcgagggtactttcgcaacagcgacgccttcatcgcatttctgggactggacgtgcggctcaaggagtctggccgttacagcggtcgacggaagctgaccaagcaaggtgatccggagatccgccggctactgcacaacgccgccatgtctgcagcccgcaccaaacgatggaaggaaatctatctgggctatctagcacgcggactgaagaaaaccgaagctttgaccatcctggcccgcaaactcgcccgaattgcctttgccctcatgcagacgcagacggcctaccaaccacaggaggtgaggccgtcgttgacatagaat

SEQ ID NO: 7876 - DNA, 1571 bp, unidentified
  source 1..1571: mol_type = unassigned DNA; note = element_c41dfda
  misc_feature 1..4: note = core
  misc_feature 5..337: note = LE
  misc_feature 338..1546: note = CDS
  misc_feature 1547..1571: note = RE
ctcactaggctaccctcgcctcggagatggtcgaagagagtcctgttcgaggggatcgatcgtcgatcctaggggcaatgcgcgatcgtatttcttgggcgctgcccgtgagacctcgcatcctggggaacgtggacctggacgggttcggggagagccacgtgcgcttgccgctcgacggccactgtgagacctgctcccccgaatcaaacgacgagaggcccagaccggccacagggtgttgcgccaagggcacctgaagcccggagcgcctgatagtgagcgaccggcaggacctctcaccgcgcagtgtctcgccgtctccgagaggagcgcaatgaatttcttcgtcggcctcgactgggcgagtcaggcgcacgccgtgtgcgtcctcgacgccacgggtcaggtgcgctggcagggcagcgtgccgcactcggccgaaggcttggcggagctgcggcgccagctggcgcgcttcggcccgcccgcctccatccccatcgccctcgaacgtccctcgggcctcgtcgtcgataccctcttggatgccggccacccggtcgtccccatccaccccaacgccctcaaggcgagccgcccccggtactccgctgcaggaggcaagagtgatccgggggatgccttcatcctcggcgatctgctccgcactgacggccatcgcttccgtccccttcagccgctggcggacgacacgcgcgcgctccgagccctggtgcgcagccgcgacgatctcgtcgtgcagcgcgtcgccctcgccaatcagctgcgggcgctgctcgaccgcttctggcccggagccgccgcgatcttcgccgacatcgattcgcccatcgccctcgccttcctcagccgctatcccaccccgcacagcgccgagcggctcggcgagaaacgcctcgcgcgctttctcgggcagcacgcctactgcggccggcgcccggtccccgagctcctcgcgcggttgcgctcggcgcctctctcgcagacgggcgagctcgaggcggaagccagcggggagatcgtccgcgcgctcgtggccgtgctgctcccgctcgtggcccagatccagcagctctcggcggccattgccgctgccctgccgcagcactccgacggccccctcctgcaatccctgccgcgcagcggtagcgtgaacgccgcccagatcctggccgagcttggcgatgatcgcacccgcttccccaccgacgagcagctcgcggctgaggcgggcgtcgcgccggtcacccgcgaatccggcaagcaccgcgccgtcagcttccgctgggcctgcaacaaacgcctgcggcaggcgctcacgaccttcgccgacaactcgcgccatgcctcgccctgggcgagggccacctatgccgacgcgcggcgccggggctgcgatcatccccatgcgatccgcatcctggcccgcgcgtgggtgcgcgtcctgtggcgctgctggcaagatcgccgtccttacgacgtcacccttcaccgtgccgcccagcgcgtggccgccgcgtgaccactcgcgggttgacacagggtgt

SEQ ID NO: 7877 - DNA, 1197 bp, unidentified
  source 1..1197: mol_type = unassigned DNA; note = element_c424d5a
  misc_feature 1..2: note = core
  misc_feature 3..208: note = LE
  misc_feature 209..1147: note = CDS
  misc_feature 1148..1197: note = RE
  misc_feature 50..207: note = bridgeRNA
cttgtatgttcaatttccggcagacttggcatcgtaaggtctgcaatcggttgtgcgttgatgtcgacgcaccgagcgcggcaggccgctttcgccctggtgccaaacaccggtcctcagcaaggtcgccgcgctcgtttcctcgaagagcccgtacggttggaagggttcaaacccgcatgatgcaaggatgggcgtggaggacaagatgaacgagttcataggtattgatgtaagcaagtcacagctggacgttcgtgcgcatgtcagcgaagcgacgatggtagtggagaacgcacaggccgggctcgaggagcttatcgagtggctgaaggctgtggaaccggagctggtcgtcatggaagccagtggcggctacgagcgactgtgtgcggcgatgctcacgcaagcggggtttgctgttgctgtagtcaacgcgcggcaggtacgggcgtttgcgttggcctcgggcgtgttggccaagaccgatcgggtcgatgcgcgtgtgttggcgcactttgcggcagcgattcgcccggcggggcaacccttggctgatgagcagcggcagctgctcgacgagctgatggggcggcgtcgtcagcttgtgggcatgatggtgatggagaagaaccgtctggggcaggcgcgcgaccgccgagtgcggcgcgacattaagagcctgatcgagattctcgagaagcgcatcggcgtgtgtgacggtgaactgcagcagctcatccaggcctcgccggtgtggcgtgctcaggaggatctgctgcgttcgttcaaaggcattggcccggtaaatgcgcgcacgctgctcattgagctgccggagctcggcaagcttaatcgcaagaagatcgcggctttggtcgggctcgcgccgattgcacatgactccggtaaacaccgaggccggcgcatgatcgccggcggacgtggccaagtgcgttgcgcgctctatatggctgcgatttccgcgatccaggccaattcgatcattcgcgcgttctacgagcgactgcgggcagccggtaaaccaggcaaggtggcaattaccgcctgcatgcacaagatgctgacgattctgaacgccatgatgcgcaatcagactcgttggcaagaacccaaaatcgcctaactcagacacggttggcaagaacccaaaatcgcctaactcagacacggttg

SEQ ID NO: 7878 - DNA, 1541 bp, unidentified
  source 1..1541: mol_type = unassigned DNA; note = element_c42742a
  misc_feature 1: note = core
  misc_feature 2..127: note = LE
  misc_feature 128..1258: note = CDS
  misc_feature 1259..1541: note = RE
  misc_feature 1290..1488: note = bridgeRNA
agtcagtatgactcccgcggggcaaaggctggcctgccgtgaggaatcaagcgcgggttagcattgctgccagagccgcacggtgcggacagggccgcacctggcgatttccggcacggaggccagcatggaacacgatagcacgctgtacgtcgggctcgatgtccataaggagtcgatcacggccgcctatgcgttcggcatgggcgaggttgaactgctcggcaaggttggcaccacgaagacggatatcgatcgcttatgcaagcgcctgcaatcgaaggcgtcgcgtatctgtattgtctatgaggcgggcccatgtggttacggactttaccgtcaacttcagcagaagggaatcgactgcatggtgtgtgcaccgtctctgattccaaggaagccgggggaacgcgtaaagaccgatcggcgtgacgcgatcaaactggtgcgttctctcagggctggcgacctgtcggaggtctttgtccctaccgtcgaagacgaagcctttcgcgatctggcacgggcatgggtgagtgccaaggatgatctgaagcgtgcgcggcagcggctgaagtcctttctgctttcgcatggggtcagctataccggccgcgccgactggagggcagcacaccggcgctggctgagcacgtttgcgttcgacagcacatggcagcagttagcgttcgaagagcatcgacgcgcgatcgaggatcgtcttgcgcaatgcgatcgactggaagctgcgctgcgcgaggccgtggttgcctggcgtttttatccggcagtactgggtctgcaaacgatgcgcggcatgcagttcaccacggcggtcggcatgcttgctgagttgggtgatctgtcacgcttcactcatccgcgccagttgatggcgtggctgggggtaacaccgagcgaacactcgtcgggcgagaaacgccgtcagggcagcatcaccaagaacggcaacagttacgcgagaaagctgctcgtcgaatcggcatggagttatcggcatccggcgcgcgtgagtcccgagattcagcgccgccacgaagggattcctaaacccatcgtggatcgatcttgggatgcgcaggtgcgcctgtgtcgacgctatcgaacgcttgtggcacgcggtaaacagaagaacatcgccgtggtcgcggtcgcccgcgaactaagcgggtttatctgggacattagccaactcgccatgtcacttgcgttgcaaccgcagaagcacgcggcttgagcaggcgagcgagagtctttacccatcaatcaaggagtttcctgagggcggcgtagcccggcacacgagtaacccgcgccacggctacgcaacggatccaattcgatttgcgtccctagatagcggcaggctcatcaggcggacctctgtaatgcggtagccaacccgcggatatcagcgtgatccaccgtcgagacgtactgctgcgccgccctcaggaaatttgaacaataacgcgtggaaaacccgaacaccaatcccgattgacagcgggagtcatatc

SEQ ID NO: 7879 - DNA, 1316 bp, unidentified
  source 1..1316: mol_type = unassigned DNA; note = element_c42a596
  misc_feature 1..2: note = core
  misc_feature 3..70: note = LE
  misc_feature 71..1102: note = CDS
  misc_feature 1103..1316: note = RE
  misc_feature 1089..1310: note = bridgeRNA
ttaattagatggtccgcctcaccttaatcgctatgattaaggttgaggttaactaaagaggcgaaccatcatgtcaattaaagtcattggaatcgatttaggcaagtccatttttcatctggttgcacacgatcagtttggaaaaatcgaatttcgtaaaaaactctcccgacaaaagctgaaagaattcctcagcaatcacccgctcaccacgatcgcatttgaggcctgtggcggtgctcactggcttggtcgttactgccagcaagttggccatcgcgttaaactgattccaccgcagtatgttcgtccctatgtgaaaggcaataaaaatgacttcattgatgctgatgcaatcgctgaagcgtctggacgaccttcgatgcggtttgttgaggtaaagtcagagtcagcccaagtcattaatgctattcatcgtattcgaagtgcttacatcaaagagcgaacagcctgtatgtcaaggataggcgcgctattactcgagtttgggatgagtttgccaaaagggcatgcttcaatgaagcgattatttgcgtggttggccacgcaacgtcagtcactgccgcctctgctaatggatgaattgctcagtatacatgaacactacacggggctctgtacccgcattaggcaacaagatgacaagttgcttcgcctagtcgccgatcatccgaatggccgtttactcaagtcgatacccagtgtgggcgatatgaccgccagccagtgtttggcggacttaggctccgttaagcagtttaaaaatggccgcaacctggccgcctggctagggctggtgccccgtcagcattcgacgggtggcaaacacaccttattgggcatcagtaagcgagggaataaacacctcagaacgctgtttattcatggtgcgcgtgccattttatctaagcctgataagacaggcgttccctttggcgattggttaatccggttgcgaaaggaaaagcccttcaatgttgcctgtgtggcattagccaataagttggcgcgcattgcgtgggcggtattacattatcaacaaccctttaacgcagccatgctgcactccgagtctgcttgagcaaataggtgatgacacaaacggtaaaaccaccggattaaaacctggcataaaaaacagcagtccatgctttgggctttttgaggataatccggcgcggaactcattgtggagcgggaatgcgaaggcgtcccaacaaggactccggatacattagcgcagacccactcccgtcatcaaaaattgttcttgcaacaacggggcggaccataca

SEQ ID NO: 7880 - DNA, 1361 bp, unidentified
  source 1..1361: mol_type = unassigned DNA; note = element_c42f49e
  misc_feature 1..2: note = core
  misc_feature 3..78: note = LE
  misc_feature 79..1104: note = CDS
  misc_feature 1105..1361: note = RE
  misc_feature 1080..1348: note = bridgeRNA
tgatggggtggacgccccccaacggccttggtgtgccaaagtggaggtgttgatgagcaccacttgagggaggcgtccatgggagaggttagcacaatcggtttggatcttgcgaagaatgtctttcaagcgcacggagctgatgcctccggagcggtcctgttccgcaataagctgcggcggcatcaggttctggcgttcttcgcagcgcagccgtcctgcaccgtggcgatggaggcctgcggcagctcacatcattgggcgcgcgagatcggcaggctgggtcacacggtccggctgatcccgccggcttacgtgaagcctttcgtcaagcgccagaagaacgatgcggcggatgcggaagcgatctgcgaggcggcccagcgcccgaccatgcgctttgtagcgcctaagagcgagcaggcccaagccgccaccctcgtgttccgggcccgcgatctcctggtcaggcagcgaacccagatcatcaacgccctacgtgggcacctgaccgagttcggcatcgtggtggccaaaggcccggctcatgtgcatcagctcgtgcgggctgttgaggatccggacgaacccatccctgagattgcccgaccgatcctccagatgctgatcgagacgctccatcgcctggatgagaagattgcaggcttggaccaagaggtcgcccgacgagcgaaagagaacgagacagcgcggcggctgatgactatcccgggcgtcggtccagtgaccgcggtggctctggcggcgctggcaccaccggctgagaccttcaagcgcgggcgggactttgccgcctgggtggggctcacacccttgcagcattcgaccggcggcaagcagaagctgggcgcgacctccaagatgggcgagcggaccttgcgtcgcctgctgatcatcggcgccggtgccgtcgtccggtgggtggctcgcaacggggctcccgcgggctcgtggatggcgcgcatggtcgcgcgtaagccgccgatgctggtgcgggtggcgttggccaacaagatggcccgcattatctgggctctcatggcgagaggcggggtttatcaggctccagtcgcggcggcataagtcatcgcggcgggggggctgctggggcgtgggaagatcgaaggagagagatggcgcaacggtcaacgagacgggatcaggaaaaccagctttgcgacaggtgcttcaagcacgtggttctgatttggacctgatccgcgaactcccatccgggcccgcggcatgtgagccgcatcaaaggccgaacacatgtcagccctgaccacgcgctgcaccgatccaaagattcttcttgcgtcacacggggcgtccacaca

SEQ ID NO: 7881 - DNA, 1399 bp, unidentified
  source 1..1399: mol_type = unassigned DNA; note = element_c43d05d
  misc_feature 1..2: note = core
  misc_feature 3..165: note = LE
  misc_feature 166..1032: note = CDS
  misc_feature 1033..1399: note = RE
  misc_feature 1149..1374: note = bridgeRNA
tgatgaggtggaacggcccgcttcgacagcatcttgtgctaaaaagtggtcgttgctcgaacgccacaaaggagggaccgttccatcaagcaagttagcaccatcgggctggatttgaccaaacacgttttccaagttcacggcgccgacaatgaaggttcgcccatgttcaatcgaaagctgcgtcgcgccgaagtattgcgtttcttcgaaaggctgcctccatgtctgattggcatggaggcatgcggtggcgctcactattgggcgcgggagatcgctaaacttggtcatgatgtacgcctcattccgccagcgtacgtcaaacctttcgtcaagcgcggcaaaacggacgcggccgatgcagaagccatcagcgaggcggtgatccgcaagaccatgcgcttcgtccctatcaagtccgccgaacagcaagcagaggcgatggtgctgaaaacacgggctcttctggtgcaacagaggacgcagtcggttaacgccttacgagcgcatttcgccgaactgggtatcatcgcggccggtggccttcccaacgtcgcggcgttggtggccatcgttcggggagtagaagatgctcggctacccgcagcggcccgcttcgccctcacggcgattgtcgaccaaatcgacgccttggccgaacagatcgacctgctcgaacgtaccatcgttacggaatcgaagcgcgatgaaagcatgcgccgactgatgacggttcccggggttggtcccatcaccgcggcgacgataaaggccttagttcctgatccagccgggtttaagtcggggcgccacttcgccgcctgggtaggactgacacccaggcctcattcagcggaggcaaggagcgattgggtggaatctctaaaatgggtaatcccgaacttcgtgttctactcgttctcggagcaacagccgttctgcggattgcccggaaggatgatcgggcacgaccttggctgcaagcgctactcgccaggcgtccgttcaaggtggccgctgtcgcgttagccaacaagatggcgcggatcatctgggcccttttgaacaagggaggcatctacacccctgctgagccatcctcaaatgctgcggcaatctgaagagccttgggactgataaactgatctaaccggcgtcggccggtagatgcaaggtgcaattgcaaacgatgaacctatgggacgaaattccggaacgagtgaagccgccaacctcactgcacttaaagtgcgtggatgtgatttagctcctcgtttcgcggatctcatcgaggccagcggtcatgtaccgcacgcaaaggccgtacatatgaacgcaccgtcctcgtgtgtgaaaacgattgcgaagccccttgcaccgcgggccgttccacata

SEQ ID NO: 7882 - DNA, 1407 bp, unidentified
  source 1..1407: mol_type = unassigned DNA; note = element_c442036
  misc_feature 1..2: note = core
  misc_feature 3..80: note = LE
  misc_feature 81..1124: note = CDS
  misc_feature 1125..1407: note = RE
  misc_feature 1124..1394: note = bridgeRNA
tgttgggttggacggcccccgaaacggcatctaaatgtgccagagtgagctgttaaggatctcaaacgaaggagccgtccgtggagcagattatccgtattggcatggatacgtcaaagcatgtctttcaattgcatggtgtgagcgccgccgagctaccgatcctgcgcaagaagatgcgccgaagggagatggtggatttctttgcgaagtgcccaccgaccgtgattggaattgaagcctgtgccgcttcgcatcactgggcgcggttgctaaggggattcggacatgaggtaaagttgatcgcgccacaattggtgaagccctacgtcaagcgcggcaagaatgatgcggccgatgccgaagcgctatgcgaggcgatgagccgcccgacgatgcggtttgttccggtgaagagtgtggatcagcaagctgcgctgatgttggtgggcctgcgtgagcgcgctgtcacggcacagacgcagattgccaatacgattcgtggctatgcagctgagttcgggctgaccgcggcccagggtatgtctcatattccactccttctggagcgcatgatgattaatgacagtatctcggctttggcgcgtgagctgttcgcatcactcgctgaggaatttgcgcagttgggtgagcgcctgaaagaggtagaggcaaaggtgatggcttggtatcgcaacaatgagcgctgtcgccgccttgcaaagattcctggcgtcggaccaattggcgctatcttgctggtgatgaaagcaccggcgccggaacagttctcatcaggaaggcagtttgccgcctggataggcctgacgcccaaggaccattcgactgcgggtaaagtcaggctcggtgttattacccgggccggcgatgaaacattgcgtaagacactggttgtgggcgcaacctcatcgcttcgacaggtgagagcgggacgaggcaggaacgcttcatcgtggcttgtcgagttgctcaagcgcaaaccgccaaaactcgccgctatcgcgctggccaacaaggttgccaggatcgcctggaaaatgatggtaaccggcgaggattacaagggcgatgctgcgcgaccggctctggcctgcgcgacgtgacgagatcagtctatcaccgtgagcaggatacagacgctaccgtgctgagctgatgcgtgaacttgcatgaaacgaatagatggtgtgatcgatcgatccgagacgtggtgcactccgcagatgccaatggcccaacgaggccgaacaagtgtttggaacccacgttgcggaacccatcttggccagcgttcatgtgtgagcgcaccaacaggccggacatatgaacgcaagcgatccgatcaaattatcaaagagttcttgcaaggagggggccgtccacata

SEQ ID NO: 7883 - DNA, 1455 bp, unidentified
  source 1..1455: mol_type = unassigned DNA; note = element_c4454a5
  misc_feature 1: note = core
  misc_feature 2..232: note = LE
  misc_feature 233..1438: note = CDS
  misc_feature 1439..1455: note = RE
  misc_feature 1..227: note = bridgeRNA
cgttatcttcttgatggtccccgtcggggactgcctggtcgctgggctcggtatgacttactgcccctgtcatcaatgatccggggggtgttgtcgccgggcctggtggcgccgttcgaccgctcatagggacctggccaccttcgggttggcctctccataacgtggctgccggcggtcggcgccgtaccagcggccggggatgccaccccatggcatggcaaggaagaacgtgcacaacagcgactacgcggtgttcctcggcttggacgttggtaagggtgaacaccacgcggtggggctggccccggacggcaggcggctgcacgacgcgccgctgcccaacaccgaggcccagctgaaagccttgtacggcaaactgtcacgccacggtcaggtgctggtggtggtcgaccagcccgcctcgatcggggcactgccggtcgccgtcgcccgggtggccgggtgcgaggtggcctacctgcccgggctggcgatgcgccggctagccgatctgcaccccggcaccgcgaagaccgacgcccgtgacgcctacgtcatcgccgatgccgcccgcacgctgccgcacaccctgcgccgcgtcgacgccggcgacgaagccctcgccgagctgggcgtgctggtcggcttcgacgacgacctggccggcgaggccaccagactgaccaaccgcatccgcggcctgctcacccacatccacccagccctggaacgggtcaccggcccgaagaccgcccaccccgcagtgctggaactgctctcgcgctgcggcggcccgaccgggctggcccaggccggccgacgcaagctgaccagcatcgcggtcaagcacgccccgcggatgggtcagcgtctggccgcggccatcatgaccgcactggccgagcagagcgtggtcgtgcctggcaccgccgcggccgagaccgtcctgccacggctggccgactccctgcgcgaggtcctgcgccagcgtgaccaggtcgcggccgaggtcgaacggatgcttgatgcccaccctcttgccgaggtcctgatctcgatgcccggcgtcggggtcaggaccggagcaagaatcctgctggaagtcggcgacgcccaagcgttcccgacctccgcacacctggccgcctacgccggcctggccccggtcacccgccgctcgggcagctcgatccgtggcgagcacccacccaagggcggcaacaagcaactcaaacgggcgtgcttcctcgccgcgttcgccgccctgcacgaccccgactcgcgcgcctactacgaccgcaagagggccgaaggtaagaaacacaacgccgccctcatctgcctcgcccgacgccgcgtcgacgtcctccacgccatgctccgcaacaaagccccctaccagcgacgcgcccaggaactcgcccgcgccgcttgacaaagtccatagggaca

SEQ ID NO: 7884 - DNA, 1167 bp, unidentified
  source 1..1167: mol_type = unassigned DNA; note = element_c448881
  misc_feature 1..2: note = core
  misc_feature 3..177: note = LE
  misc_feature 178..1146: note = CDS
  misc_feature 1147..1167: note = RE
  misc_feature 34..198: note = bridgeRNA
cttgtatcttgaaatctggttactatggcaatgaacggatttggcgcagtgtatgtagtccgatgaccccttgggttttaagcccgtctaatagcgaatgacacatacactgagccactcatctgaaacccgaacagttgtccgtactccataacgcatttgcaaggatgggtaataatgagtctgccaggtccactctgtgtaggtattgatatttcaaaagcaacgctggatattgccgccagcagcgcaattgcgcagttttcggttgccaatgatgctgacggctttgattccatcattgctgagctgaggaagcactccgttgcgcttgttctgatggaagccaccggaggtcttgaagctgctgtcgcttgtgcacttcaggccgaaggttttgaggtcgcagtggtcaatacccggcaggctcgtgactttgcccgtgccatgggatacctggcaaaaaccgacagtattgatgcgagagctcttgcgcagatggctgaggttatcaatcgtcacccggaacgagaccgctttatccgggcgttgccggatgcagaacgcttggttctcaacgcaattgtagttcgcagacggcagttgatctctatgctggttgctgaacgaaacaggttgtacccggctcacccgcaaagcagaaaaagccttaatatcatcatcaaagcgctggaagacgagcttgcgcggatcgatgacgatatgaataaccatatccgaagccacttcaaagcgctctctgagcgattgagtagcattaagggcgtcggtactatgactgtagccgcactgctggcagaggttcctgaattgggtcgtctctcgagacgagaaattagcgcgctcgtgggagttgccccagtaaaccgggattctggcacgatgagaggccgacgaactatctttggtggtcgggctggagtgcgaaccgcgttgtacatgtccgcactcgtagcaactcgcttcaatccagttataaaagagttttatacccggcttgttgctgcagggaaacccaaaaaagtcgcgctagttgcctgtatgcgcaagctgctgaccattctgaatgcgatgctcagaaagaacgaagaatggaatgagtcgtaccatcatgtagttccataattttatcgttcaagacagttg

SEQ ID NO: 7885 - DNA, 1598 bp, unidentified
  source 1..1598: mol_type = unassigned DNA; note = element_c44da85
  misc_feature 1..2: note = core
  misc_feature 3..264: note = LE
  misc_feature 265..1476: note = CDS
  misc_feature 1477..1598: note = RE
  misc_feature 12..284: note = bridgeRNA
ctattacaataaatttggacaggaaagccgggcagccagtccggctttctttccatctcatgcctaagctacaataaggggagcaactggctgaccaatacctccttgggcttccatgtccgatacagagactgtcagccatccccttattgcagcgttcgatttgagcaggttgagccatagagttcgcgtcacccaatagattgaatcggcaatgagaaaaagatggattccggttgcgattcgcagattggaggaatgtaaatgaactctgttggcatcgacatttccaaaggcagaagcacggttgccgtcatgcgccccttcggagaggtcgtcatctcgccctttgaagtccatcacaccgatagtgaactgagcgcactggcaaggcggctcaaaagcctgaacggtgagactcgcgtggtcatggaggccacaggaaattaccacgcgccggtggcaaagctgcttcacgacgcagggctatatgtttccgtcgtcaatgcgaagctggtgcatggctacgggaacaacgagttaaggcgtgtcaagaccgataaaaaggacgctgtcaagctggcaaactacggtcttgaccgctggctcactctgccgagatatgtcccggaagaaggtgcccggttgctgttgaagaactgctaccgccagtaccggcagtattccaaggtgcagacggttctgaagaacaatctgatctcattgctggatacagtgtttccaaacgtcaaccgcctgttttcaagcccgatccgcggggacgggagtgaaaagtgggtggattttgtggctgaattctggcattgccgctgcgtcagtgagaaatccgaaaaggcattcgcaaacaaataccaacgttggtgcaaaaagcatggttacaatttcagcgtggcaaaagcacacaccattcacgccgaagccagtggacatattggcgtcatgccaaagtccgaaacgacaaagctgctcgtggaacaggctgttgcgcagctcagagcaacctctgttgcccttaccgctctcaaacgcgaaatgctcaccttggccgcacaactgccggaatatcctgtcgtcatgggtatgtttggcgtggggccgacgctcggcccgcagctcatagcggaaattggcgatgtgcgacgtttttattccaagaaagcactcgtggcctacgccggccttgatgctccgccgaatgactctggagacgtgactggcaaacacaaatccatgagcaaaattggcgcgtcatctctgcgacggacactgttccttgttatgagtgtctatttgcggagtgcgccgctggatgaatcggtctaccagttcatggacagaaaacgcgccgagggcaagccctaccacgtctacatgatggcttcggcaaacaagttcctgcggatctactacgccactgtgaaagcctatctggagtcgctggaacacaccacctgatctttccataaagtattggctggctgccgtttcaaatttgagacgcgaagcggcttggtttggtgcagtctttttgcgcactgcattaccttgaaatttctacttgacttttcttagcaggt

SEQ ID NO: 7886 - DNA, 1328 bp, unidentified
  source 1..1328: mol_type = unassigned DNA; note = element_c44de6f
  misc_feature 1: note = core
  misc_feature 2..499: note = LE
  misc_feature 500..1312: note = CDS
  misc_feature 1313..1328: note = RE
  misc_feature 17..245: note = bridgeRNA
cagtgaagatggcggtggtccctgatgatggggctggtcctgccgggtggtctgaccctgaaccgccctgaccgtggtgtcatcccgggagctgtcggcctgcccgacggggccgcgtggaggtgcacgcgaccggacgggcttgtgtgacctgatacgagcttgtgcgaccaagccttgtcactggtgtgtccgcccgcccggccggtgcgtgcctgtcctggctcgtgcccgagcggaaaggcggtaccagcatgcccaagcgcactcgcgttgtcatcggcggcgttgacacccatggccgcactcaccacgccgccgccatcgaccagcaaggacggctcctgggcgaccgggagttccccgctgacagcggcggctaccgacaactgcttggctggctgcgtcgccacgggaacccagacacggtcggagtcgaaggcaccggcagctacggcgccggcctgacccggttgctgctggaccatgggtcaacgtcgtggaggtcgaccggccggaccgacgcacccgccgccagcgtggcaagtcggatccgatcgacgccgaggccgccgctcgcgcggtccttgccggggtggccaccgcgccggccaagcgacgcgacggcatcgtcgaggcgatccgggcgctgcgggcggcgcgcagcggtgccatcaaggccccgactgccgcgatcaaccagctcaaaggcctgctggtcactgcgccggcatcgctgcgggaggcgctggacggccgctccactccagtgttggtcgccgcctgcgcccggttgcgcccagacgagaccgccctggccgatccggtcaacgccaccaaggcggcgctgcgcgtggtcgcttgccgcatccaccagctcgaggaggagatcggcgtggccgatcaacggctggccaagctggtcggccgcgccgcacccaggctgctgaagctccaggcgatcggcatcgatcacgccgggcagctgctggtgactgccgggcagcaccccgagcggctacgtggtgaagccgccttcgcgcacctgtgcggagccgcgccgatccccgccagctcgggcaagacccaccggcaccggctgcaccgtggcggtgaccgcggcgccaaccgggcgcttcacctggccgtggtcgttcgcatgcgctggtgtccacgcacccgcggctatgccgagcagcgcaccaagcaagggcgctccaagccggagatcatgcgctgcatcaaacgctacctcgcccgcgaggtgtaccacgctctcgtcgccgacttcgaggcactcaacgcgacttgacgatctatacgagcat

SEQ ID NO: 7887 - DNA, 1372 bp, unidentified
  source 1..1372: mol_type = unassigned DNA; note = element_c46bf72
  misc_feature 1..2: note = core
  misc_feature 3..89: note = LE
  misc_feature 90..1112: note = CDS
  misc_feature 1113..1372: note = RE
  misc_feature 1136..1358: note = bridgeRNA
gatggggtggatggctcctgctccaccagcgtcgtgatgcgccataatgcagctgtcattgatatctgcgaacgataggagccacccagatgcaagttaccacaatcggcattgatttagcgaagtctgtttttcaagttcacggcgttacggccaacggcgaggttgttttcaaccgagcattgcggcgcgctcaggttttaatgttctttgcaaaactcgagctctgcgtcgtcggcatggaagcgtgcggcacaagccattattgggcgcgtgaactgagcaaacttggccatgaggtgcgcctaatgccacctgcctatgtaaagccttatgtcaaacgtggaaagacggatgcagcagacgccgaagctatctgcgaagcggtcatgcgtccaacgatgcgcttcgtgccgattaagacgccggaacagcaagcactcttgtgtcagcatcgagcacgtcagttgatgatcggccagcgcacacaactttcgaacatgatccgaggactgattggtgagttcggccatgtagttgcaaaaggactgcaccatatcaccgcctttgctgaggaggttggcggccgcaacgactccgatcttccagaagcagcccgaaacgtcatcgtttccctttgcgagcagctattgaaggttcatcatcggataaaggcgttggaggtcgagatcttcgcggcgtcccaaaaggatcgtcgtattaagctgctgaaaacgatcccaggcattggtcctgtaacggcttccgcgatcgcagcaactgttggctcgcccgaacagttccgatccggtcgagagtttgctgcctggttgggattgaccccactcaaccgttcaagcggcggtaaggagcgccttggccgaatatccaagatgggcgatcgatacttgcgacagttgcttgtcaacggcatgacatcgtgcgtgcgtgtcgcgcgaatgcatcctgatcgcaccgagccgtggctggcttccttgcttgaacgaaaaccgacgcgtttagcgacagttgccatggcgaacaaaacagcgcgcattatctgggccgtcctcactcgagatgagccctataaacaaacagccgccgcatagttggggcctgaaaagaaggaaacaccagattgcaaggacgatgagacgtgatggcgaaccgggtcagaccggggatcgagacaacccgcctaatgtccaggacatagattgtccgaaaaccagaatgggacttgatccgcggaatccatcatggccagcggcaataacgtcgcatcaacaggccggacacaagactgtacctgactactgctcgcttaaaacttcaaaaagtacttgcaacgcaggagccatccacacag

SEQ ID NO: 7888 - DNA, 1613 bp, unidentified
  source 1..1613: mol_type = unassigned DNA; note = element_c46f838
  misc_feature 1..2: note = core
  misc_feature 3..274: note = LE
  misc_feature 275..1492: note = CDS
  misc_feature 1493..1613: note = RE
  misc_feature 14..294: note = bridgeRNA
ctactacaatatatttatggttaataccccttacagccagtaaggaattacccgtcttgttgcttaagctgttagaatgagtaaggcaataggtctggccgtcacctcctggaactttacgtccgtttttaagtcagccaaccagccctcattcgcagcattcgttttacgcaggttgaaccaaaaggcgttcgtgtgatacccagtagattgaacaggcaatgagtaaatctggtattaaccattgccaatacattgcaaaggagtatctgttatgaacgctgttggtattgatgtttccaaaggcaggagcactgtcactatccgcagacccggtgatatcgttatcatgcctccccgtgacattccacacacgcagtctgaaatcaacgccctgatcgaacagatccgggggcttgacggggagacaaaggtctgcatggagcacaccggaaggtactacgagccggtcgccacatggctttccgatgccggcatctttgtcagcgcggtaaatcccatcctcatcaaagacttcggggatgattcccttcgcactcccaaaaccgacaaggctgattctaaaaaaatcgcccgttatacccttgaccgatgggcaaaactgccgcaatatggaagcatggataaagcacgcaaccaactaaagacaatgaaccggcagttcggcttctacatggcacaaaagactgccacgaagaacaacctcattgccctgctcgaccagacttacccgggtgccaatgacttctttgacagcccggcccgcagcgacggcagccagaagtgggttgattttatagctacctactggcatgtggactgtgtctgctcgaaatccttaaaggcctttaccgagcattatcagaactggtgcaggcgtaaaggctataacttcagtgcggacaaggcggagaaaatctaccgtctctcatctgacctgattgctgtattcccaaaagataacaacacaaagatgctgatacggcaggctgtaacgatgctggacactgcatcccaaaccgtggaatccctccgccttgaaatggatgagattgccgccaccctgccagaatacccggttgtcatggcaatgaatggtgtcggccccacgcttggtccacagcttatggctgagatcggggatgttacacgcttcacgcaccgcggggcgctgacggcttttgcaggtgtcgatcccggaagggatgaatccgggcagcgtgtccgtaaaagtgtgcctaccacaaagaaaggctctccttatcttcgcaagaccctcttccagatcatggacgggcttatcaagcgttctcccgctgatgatgccgtttacgcctttatggataagaaacgggcacagggcaaaccttactacgtctacatgactgccggggcaaacaagttcctccgcatttattacggccgggtaaaagaataccttgccacgctcgcagactcagaagaaacttaaataaatatttcctctttccatcagaccggcgttctgcgacggtctttttgtggtacttatttttcaacctgtataaatttttcaaagttcacaaatttctgcttgactttttatttgcaga

SEQ ID NO: 7889 - DNA, 1543 bp, unidentified
  source 1..1543: mol_type = unassigned DNA; note = element_c4706e7
  misc_feature 1..2: note = core
  misc_feature 3..249: note = LE
  misc_feature 250..1422: note = CDS
  misc_feature 1423..1543: note = RE
  misc_feature 9..222: note = bridgeRNA
ctcgtattatatagtcatacccattctttaccttctctataggtatcgggtatgctgttgaagatgctgtggattggtttttatgcccctaccgcatagacggtttcggataggctccaaccacagcctctttgtcataatgttaatcagttagataccgcatgacggtttatgtagaacgaggttacatcagcaaagagccctgtggatcaacagcagcatcaaatactttaaaggaggatcatgtgtatgatctatgttggcattgacgttgcaaaggataagcacgattgctgtatcctcggttcagatggtgaaatcctgctttctccattcactatccagaacacgttacagggatttgacgatctgtatgagaagatctggtcattaacccaagatcttcatgaaataaaagtaggtctcgaggctaccggacactatcatctcaatctgctacgttcgctccttgataacggcctggccagctatgttatcaacccgttacatacaaatcttttcagaaaaggtcagagccttagaaagactaaaacggataaagtcgatgctgcttcgattgctatgatgctattgaccgataggactctcaagccctactcagacacatcataccacaacgaagaattaaagtctctcaccagatatcggttcgacaaggtccaagagcgtgccaagctcaaaacatccgtctccagacttgtcagcattcttttccctgaattggaaaaactggttccctcacttcacatggctaccatttacgctttgctctccgagttccccggagcttcatttgttgccacagcacatctgacccgcctaaaacatcttctctatgaagcgtccaaggggcattacggacgcgatgaagcaatcctcatccgagatgccgccatttcttcagtaggaacggtaatgccctcaaaatccatggaactaaagcacactatctatctcattgaagtgctaaccgaagagattaccgagattgaaacggcaatcaattccatcatggaaacattgaactctccaatcactactgttcctggaattaaaaatcgaatgggcgccatgatccttgcagagataggcgatttctcacgctttgaaaatgcagaccagatacttgcctacgcaggactatctccttctacatatcaatccggacaaatgacttcatcctatgcccatatggagaaacgtggctctcgctatctgcgatatgccctgttcaatgccacaatatacgtctgcaattgggatccaatttataatgcttatcttgccaaaaagagagcggaaggcaagcattactatgttgccatttcacatgcttgtaagaagcttgtcaggatgatttatcgaatgcaacttactggcgaaccttatcgggcagcataagacatccctttccttttctgtcggggcatcctatcggatgctctgtttgtcatgcagttttcaaggtacttatctatctgatctaattacttcgtttcagtcttgacatttaatagttagt

SEQ ID NO: 7890 - DNA, 1812 bp, unidentified
  source 1..1812: mol_type = unassigned DNA; note = element_c478a65
  misc_feature 1..2: note = core
  misc_feature 3..78: note = LE
  misc_feature 79..1236: note = CDS
  misc_feature 1237..1812: note = RE
  misc_feature 1300..1520: note = bridgeRNA
agattctatggggcaggcaggcggcgagggatatggcaccatcgctgtcgtgtaaaaccagctgatggagatcgccccatgcaacggaacgatatgagccgctccctcgtcgcctttgatcagaatagcacggttgttgccgtggtcgaactgagtctgagcacatggttggttgcgggtgtcgtgcccggcctgaagcgccagccgctcaagaagctgtcggctgatgcggataagctggttgcgctgcttgagcgctggcgcgatgaagcgatcaaggccggccaggtgatcaaccggatggtggtggcgtttgaggcggggcgcgacggtttttggctggcgcggctgctgcgggaccgtggcatcgaggcctatgtgatccatgcgtccagcattgcggtgtcgcgcgagcatcgccgcgcgaagtcggatcggattgacacgcaaaggctgatgcgcagcttgctcggctggctgcgcggcgaagcggaacactgccggatggcggcgatcccgacgctggcgcaggaggatgccaagcgtccgaaccgcgagcatgaatgcctggtcgcggaccgcacccgcctggtgaaccggatgaaggcggcgctgatccggctcggcatccgcaacttcaacatcaagctgcgcaaggcggctgaaggtcttgctgctctgcgcacccccgaaggggagccgcttccgcccaacacgctggcggagctggggcgcgagctggagcggctcgccttgatccgggcgcagatccgggcgatcgagcaggcgcggctgcaacgtctcaaagcggcgccgcagcaagcgacccatccgatgatcctgatgctggccaaggtcatgggcgtcggcgtcgagaccgccgacatgctggtgcatgaggtgctgtcgcggccgttgcgcgatcaccgcgcggtggggcgctatgccggcctcaccgggtccccggacgagagcggcagcagccggcgcgagcagggattggccaaggccggcaatgcgcgcgtgcgccgaggcatgctgcagctggcgtggcgctggctcatgcaccagaaggacagtgccttgacgcaatggtatcgctcgcgcaccgccgacggccgcaaggatacccgcaagaccatgatcgtggcacttgcccgcaagctcctgattgcgctgtggcgctatgtgacgaccggcgaggtgccccaaggcgtcgtgctgaaggccgcctgatgatgccaagcacaatgatccccgcaaccgaccgaggaggagagttatagagtagagttcggcgcccatcggccgtgccggtgtcgcgcccagatgatccgaggtggcggtgagccgatgcccaccctggcctttgtgccgctttcgtagaatggacccgccgccgaggagcctgccgccgatgcgcatgactgcatcatggtcgaatcttccaagattcaccgaatacaaggttgtgaggcgacgttcacctcaccgaccgcaggctcccctcagatcgacgggcgcaaccccgcgctgccgcgcgccaggacgatcaatgttcgaggtcccgaccaggaccagcgtgacaccgtgctcgccaccgtcaaggcgtggcctggcgacgatggagttcgtggcacctgcacggcgacggccatccttgacggcgtctgcgcgcggcgtcactggacggatgtaggtcgggacgaagaaacggccctcaggtcgaacaaagaaactgaccaagataggaagaaagcaaaaagcaggaacaccacatcgaaaagtgcttgacaaaaagagccccataca

SEQ ID NO: 7891 - DNA, 1369 bp, unidentified
  source 1..1369: mol_type = unassigned DNA; note = element_c47d168
  misc_feature 1..2: note = core
  misc_feature 3..231: note = LE
  misc_feature 232..1272: note = CDS
  misc_feature 1273..1369: note = RE
  misc_feature 7..212: note = bridgeRNA
ctcctatgtttacatctaatattattgtaatgattttatgagtgaaaagagtgagagcacagcaatcccaaacagccttgagcatgttgagcgttagatatagcctcactcctttacttttttgagtttgaacagaatgtaaggaatacgaccaggcagtatatccaggataaccaacaggaggaaaaacgaagaaaggttttcacttataacagttaaaaactttgatcaatggcaagcagattattaaaacaagtagtaggtattgatgtggctcaaaaagagctggtggtttctatcggcaagatggatgagcaggcagttataacagtttatgcgaacaagatttttccaaacaatgaaaaaggatttgcaaacctggaagtatggataaacaagcaaagcatcccccaatatccattaagatatgtaatggaggccacaggtgtataccacgagcgccttgcttattatctggccggcaaagggtatgctgtaagtattgtcatgcccaacaagatctcaaacttcttcaagacactggagatcaaaacaattaccgataaatcaatgtcttttgccatagccatgttcggacttgaaaagaaactggataactgggtacaacccaaaagggtgttcaggaccctgcggcagataacccgtgaaagagaacaacttattgcagaaagaaccatgatcaagaaccagctacatgctgaacagtccgaagcttttccgggggaagatactatccgcagaatgatggacaggataaagatgattggtgaacaacttaaagaaatacttactgagattagaacagctgtagcacaggacaaacatttaaaacaaacactggctaccattaccactattcctggagtcggcttattaacggccactgtgatcatagccgaaacaaacggctttgagctgatcaggagtaaaaagcagctgaccagttacgccgggctggatgtcagggaaaaagaatccggctcatccgttaagggcaaacccaagatatctaaaagggggaacaagcatttacgaaaagccatgcacttacctgcattagcggccataagacattcagaaagatataaagctatatttgtccggatcgtatcccgaaatagcgtgaaaatgaaagctactgtagcagtacaaagaaaattattggagatggtatacactatatacaaaaccaacaaaccattcgaaaaagactaccttcaacagaatgcacacatatccgaaaatagttagagcagtcgcttcaattgaaggactgccctaaacaggctaacataaagctgcctaagactcaaaaataaaaaataacttttgcatatcaacacagaat

SEQ ID NO: 7892 - DNA, 1541 bp, unidentified
  source 1..1541: mol_type = unassigned DNA; note = element_c47f0d9
  misc_feature 1..3: note = core
  misc_feature 4..241: note = LE
  misc_feature 242..1420: note = CDS
  misc_feature 1421..1541: note = RE
  misc_feature 19..218: note = bridgeRNA
cttgtattatagagtagtagttattaggccccctctccaagggctgtgctacactataagggatgctgtggattggtgcaacacccttaccacgagatggttcacgaaaggttccaaccacagccccttacaattttgttgatcagttaaataccgccagacggtttatgtggaacaaggctacaaaagtaaggtgcactgtggatgcagcatcacatatttatcgttggaggtatttgttatggtggtttctgttggcgtcgatgtctcaaaagataagcacgattgctttatcgtcagttccgagggcgaagtcctggcggatgtattcacgatccccaacaccatggacgggttccactaccttttacagcgaatccggcattgtaccgcaccgcaggataaaataaaagtagggcttgaggctaccggacattacagctacaatctgctcgggtttcttcttgacaacggtctgaccacctatgtcctgaatcccttgcgcacaaacctttaccgaaagagccttagcctgagaaagaccaagactgaccgggtggatgcacgaacgattgcttctatgctgttatccgatgcgggcctcaaaccctacacagatacagcataccacaacgaggagctaaagtcactgaccagataccgttttgacaaggtaaaagagcgtgccaagctgaaaagttctatcgcccggctggtctgcattctgtttccggaattggaaaaactcgtcccttctctgcatattgcttctgtctacgccctgctggaagagttccctggggccaaacaggttgccgcagcccatttaacgaggctgaaagcattgctcgaaaccgcctctaaaggccgctacaaacgggatatggctttaaaaatccgggatgccgccagaaactctattggctctcgaatgcctgctaagtctcttgaacttcagcacaccatccgcctcatccgtgaactggatgctgaaatcgcggaaaccgaagaacagatccagtctattttggatgaacttcattctcccattactaccatccccggattgggcttccgtatggctgctatgatcctggcagaggtgggcgacttcgctcggtttgactccccggacaagctgttggcttatgccgggatgtccccctccacttaccagtccggacagctcaaaaattgctacccgcacatggaaaagcgtggctcccgatacttacgctacgcactttacaatgcaaccaagtatgtctgtcactgggacccagcttttgctgattatctcgccaaaaagcgggcggagggaaaacactacaatattgccatctctcacgctgctaagaaattggtacgtttaatttttgctatggagaaatccagacagccatattgctcagcagcttaagtgcagttacttgaatagccagcaggggtctgtcaagacctcagctttgctataccttttttgaactgtctcttttttcaccaccaccattcattttgggggttgacttttaatagttaat

SEQ ID NO: 7893 - DNA, 1490 bp, unidentified
  source 1..1490: mol_type = unassigned DNA; note = element_c482139
  misc_feature 1..2: note = core
  misc_feature 3..246: note = LE
  misc_feature 247..1470: note = CDS
  misc_feature 1471..1490: note = RE
  misc_feature 8..228: note = bridgeRNA
ctaatggggtcgtagccaggttgtcgcattgggcaggctggtgtccgagccgctggatgggtgagcactgtgaagggcagggcttcgagctctggggctagaccgtgcccccgtcgggttgtgaggaggagtcgacgactggtgggatggcgtgccagtgcgagcactgatccattagcccgtgcgcgtgcctcctcgacggcttgagtccgtgtccgtgacggcttccccgacaggagagagaccgtggtcttcgttgggatcgactgggcggaggagcaccacgacgtctgtgtgatgagcgtcgacggccaaccgttgggccgcgcccgcgtggccgagggcgtcgacggcgtcgcgcggttgcacgcgctggtcgccgaccacgccgacgaccccgccgaggtggtcgtgggcatcgagaccgaccgtgggctgctggtcacgtcgctggtcgcgacgggctatcaggtgtacgcggtcaacccgcgggcggtggaccgctaccgcgaccgccacgcggtgtcgggcgcgaagtccgacggcggcgacgccaaggtgctggccgacctggtgcgcaccgaccgccacaaccaccgtcaggtcgccggcgatagcgtcctggtcgaggcggtcaaggtgaccgcccggacgcatcagagcctgatctggacgcgtcagcggcaggtcaaccagctgcgcagcgcgttacgggagtactaccccggcgcgctggcgaccttcggcaccgacctggcgcacccagacgcgctcgccgtgctggccacggcgccgacacccgagctgggcaggcgtctgtcgagcgcgcggatcgcctcggcgctgcgccgcgccggccgggtccgcaacatcgacgcgcgcgccgcggcgatccgcgacggcctgcgcgtcccgcagttggccgcacccaccgtggtggccgacgcctacggcgacaccgccaaggcgctgatcaacgtgatcgccgccctgaccgtccagatcgccgagttggagtcggcgctggccgaccgttttgagcagcacccggacgccgacatcctgcgcagcctgcctggactcgcggtcatcctcggcgcccgggtgctcggcgagctcggggacgacccgaaccgctacgccaatgctaaagcccgccgcaactacgccggcagctcacccatcaccaagcagtccggcagccgcaagatcgccctggcccgctacgtgcgcaaccgtcggctggccgacgcgatcacctggtgggcgttctgctcgctgcagtcctcacccggcgcaagggcgttctacgaccgccgccgcgccgccggcgacacccaccacaaggcgctacgcgccctgtccaaccgctgggtcggcatcctccacggctgcctgcgccaccacaccccctacgacgaggcgaccgcctggggccacctcaccgaaagtcacgcggccgccgcttgacacctacgaccgtgggatgt

SEQ ID NO: 7894 - DNA, 1385 bp, unidentified
  source 1..1385: mol_type = unassigned DNA; note = element_c483ebe
  misc_feature 1: note = core
  misc_feature 2..74: note = LE
  misc_feature 75..1100: note = CDS
  misc_feature 1101..1385: note = RE
  misc_feature 1151..1382: note = bridgeRNA
tactgagatggaccctgcgccgccccgactgcaaacttggcggctcaccaaccgctgttgtccggaggttcatcatgcagatcgagattctcggcatcgatttggccaagcgcgtcttccagcttcacggggccgatcgccagggccgcacggtctacaccgccaaggtgatgcgcgccgcattcctggagacggttcgcgagttgcatgcgcgcatcattgcaatggaggcgtgcggctcggcgcatcactgggcgcgatgcttccgtgccatgggcatggaggtccgtctgatcagcccgcagtacgtcaccccgttcgtgaagaccaacaagaacgaccgcaacgacgcacaagcgattgtcgaggccgcgagccgcccgacaatgaccttcgtgcctgtgaaatctctcgagcaacaggatattcaggccgtacatcgggtgcgcgagttgctggtccagcagcgcaccgcactgatcaaccaggccagaggcctgttggccgaacgaggcgtatcgatggcccagtcgcgcgaagcattcaagcgtgaggttccgaagatcgtgggggcatgcgaaggtgaggtaacgagcgtgtgccaggccatgatgctggagatctcgcagcagattcacgcattggaggaacgcatcaagcgcgccgagacctggctccggtcattcatgaagcaatcggcgctgtgcaagaagatcgctgccattgacggcgtcggtacgatcacggcgacagccatggttgcctcggtcggcgaggccaaggaattcaagaacggccgacatttgtcggcttggcttgggttggtgccgcgacagcattcgtcaggcggcaaatcgcagctcaggggcatcagcaagcgaggcgacaagtaccttcgaaccttgctgattcacggcgcgcggtcagtgctgcgctacgcggtcggcaagaccgatgcgcagagtcgatggctgcaggacctgatcgcgcgacgcggctacaaccgcgcggccgtcgcgctggccaacaagaatgcgcgggtgatccaggcgctgttgagcagcgacacaccataccgcccgaccgccgcggcgcactgaatatcatcggcaagcatcacattcatacgggaggtgaatcacacccagcactggtttgcgaagctttcggaagtgatgacaaaactggttggaccaacgcccacaagcctgatttacgtgccggctgtaccttcaggctcaagccgtcaatctactgaggacagggcgtgcggatctcatcgaggctgcgggcatgtttcgacgcgcccactggcaagccgtatacatgcatgcagaccgtttgatgtcaccgaaaaaggcttgcaaaggcgcagggtccataca

SEQ ID NO: 7895 - DNA, 1503 bp, unidentified
  source 1..1503: mol_type = unassigned DNA; note = element_c4860c4
  misc_feature 1..2: note = core
  misc_feature 3..121: note = LE
  misc_feature 122..1204: note = CDS
  misc_feature 1205..1503: note = RE
  misc_feature 1223..1475: note = bridgeRNA
agacggtatgaagtgaccgcctcgtgttgagggggttgcgggtcggggcctctctgcgcatgttcgtgggttaccgagtaggaggcacctgctcggcctatccacagcgtaggaggccccggtgtttgttgagcgtacgagtgttgggcttgatgtgcacgcacgatcggtcgtggcgaccggtctggactcgatgacgggcgaggtgttcaagaccaggctcgtcccagcccacgaggaagtgattacgtggctgcggcagctgcccggtccagtcgcaacgacctatgaggccgggcctaccgggttcggtctctaccgggcgttgaccgcggccgggatccgttgcgaggtcgtcgcaccgtcgaagttgaccaggccgtcgggtgatcgggtcaagaccgacgccaaggacgctctgctgctcgcgcaactgctgcaggtcggacagatcaccggcattcgggtgccgaccgtgagccaagaagccgcccgtgacctggtccgtgctcgcgaggacgtccgcggggacctgatgcgggcccgccaccgggtctccaaactgctgctgcgccacggccacgtctactacggcggcaaggcatggagcggcgaccacgcggcatggctgcgtcggatccgattcgaccagtccggcacccgtactgcctacgaagccgacctcgaagccgtcgagttcgccattgcccgaaggaaccggctggacgctgcgatcgctgcaatggccgctgactgcgagttcaccgcgaccgtgcgcaagctgtgctgtctgcgtgggatctcaacgctgaccgggttcgcgctcgcggtcgagatcggcgactgggaacgattcaccggttcgagcatcggcgcctacctcggcttggttcccagcgagtactccagcggccagtcccgacgccaaggcggcatcaccaaagcaggcaactcccacgtccgccgactgcttgtcgaagcagcctggcaccacaagcccacctaccgcgtcgggaaggtcctgcaagcccgctgggaccaggcccccgccgcagcacgcacccgcgcccatgccgggaaccagcgattgcatcgccgctgggcgagctacaccgccaggaagaagaagcacaccaccgcgaccaccgcgatcgcccgcgaactcgccggctggtgctggtcgctggctaccctgcccgactaacagggcagcccatggtcctgaccgggaccacctcggacgccggcagcaacgtgcggagccgacccgcgattcgactgtgagccaccagcacccgctcgtgacgctcgacctcagatgaagcgcagagctcccgccgaacaccgtcctgcggtaaccaacccgcgcatatcagtctcgaccacgtgcgtcgcaagacccgctcaccgcacccgagaccccggccagaacagaagcgccgccacgacaaccagccgtgacggcgcttcgccccgcctcttgacaggagggacttacatatc

SEQ ID NO: 7896 - DNA, 1450 bp, unidentified
  source 1..1450: mol_type = unassigned DNA; note = element_c489cd1
  misc_feature 1: note = core
  misc_feature 2..109: note = LE
  misc_feature 110..1135: note = CDS
  misc_feature 1136..1450: note = RE
  misc_feature 1179..1390: note = bridgeRNA
gaatgaaagggacttcccagtcccgaggctgccgcggaagccgcaatcggcagcaacgtgccatgatgaagtttcgaacgttcatcaacacccacaagaggggaaatccatgcctattgtcactgtcggaatcgatcttgccaagaacgtcttcgcggttcacggagtggatgaagccggcaaggcggtattgatcaaaccgcgtgtctcacgcgatcaattggtcgcgctgatcgcccagctaccgccctgtctcatcggtatggaagcttgctcgggtgcgcaccactggtcgcgggtgttccagcagtacggccacacggtgaagctgatggcgccgaaactcgtggcgccgtaccggatgtcaggcaagcgtggcaagaacgacgccgccgatgcggcagccatctgcgaagcggtgactcgcccgagcatgcgtttcgtgccactgaaggacgaacaccagcaagccacgctctgcctgcatcggacgcggcagggttttatcgaggaacggaccgcgatatacaaccggatacgtggcctgctgtccgaattcggcgtagtgttgccgcaaagtccggaacgcttgcgaagagagatcccaacccatctggatgccttgcccggctgggccagacgatgcatcagcgatctgctcgagcacgccggtagcatcgaggaccgactgaccgaatacgaccgcgcgattagggagatcgcgcgtgaggacgaacgcagcaagcgactcatgctactgcgcggcatcggcccgaccaccgcaagcgcattgcttgcgagcatcggtgccggacacgatttcaggaacggtcgccaggtggctgcatggcttggactgacgcctggccagcacagcagcggcggcaaggcgcggctgggtagcatcacaaaggccggtgacgcctacctgcgcagcctgctagtgctcggggcgcgcgccgtgatcgccagtctgggcgagaagcaggatcggttcagccgctgggtacgcagccttatggaacgccgcggctactggcgtgcggcagttgcgattgcggccaagaatgcgagaatggcttgggcaatgctaagttacggcgacgatttcaagcacgaaccggccgcagcgtgaagtcgtcgggcctgaccaaacaccgacgatcaatgatagtcatcatgagcggataaacgatcactttgcactgccagcggtgatgtgaagcgggttggacccgcgcaaggcatacctgccagcgagacggggatttctatcccgtccaacgaatgaggtccttgcgcgcgtctttcatcagggtccgggccacggctcaacatgaccggttgtagtacagcagtccttcaccttctcacgcgcgccgacgtggcattgcagcatgtattaacgcggacttcgattgagcttgcgcttaacggggaagcccttgta

SEQ ID NO: 7897 - DNA, 1364 bp, unidentified
  source 1..1364: mol_type = unassigned DNA; note = element_c4942c4
  misc_feature 1: note = core
  misc_feature 2..67: note = LE
  misc_feature 68..1108: note = CDS
  misc_feature 1109..1364: note = RE
  misc_feature 1112..1354: note = bridgeRNA
tatggaatggcccgccactccttccggcgttataggctcgccggaaggtcaaacggagggatgaatcatgatgaatattcgcgtgctcggcattgatcttggaaagaatgtttgcagcctggtcggtcttgatggggctggcgcggttgtcttgcgccgcggggccaaacgggagaccctgatagccttggctgccaaacttcctccctgcattatcggcatggaggcctgctgcggcgcgcatcatctgggtcgtctattcacaaaccaggggcacgaggttcgtctcatgtcgccagaatatgtgcgaccctacatcaaagcccaaaagaatgatgatcgcgacgccgaggggatcgcggaagcggcgacgcgtccgaccatgcggttcgtcgatgtgaaaagccaggaacagctcgacatgcagatgctacatcgatctcgcgaccgactggtcgccgaacggaccgccttgatcaatcagatgcgcgggattctgctggagcgcggaatcattgtgcctcaggacaagcgcgcactcgaacagcatctggccgccttggtggaggagagcgacgatgcgagcggcctgagtccgcgcatgcgcgtgttgatcatcgacgctcgcgcgcaatggctggagcttgatcgacggatcgccgctttcgactctgaattctccgccttcgtgaaagaaagcgaggaggcaaaacggttagtgacgatccccggcgtcggcgtgacgatcgcttcggctttgatcgcggcaatcggaaatgccgaggctttcgagcatggccgcgatctggcggcctggctgggcctggttccacgccaatcaacgacgggaggcaagccaaagcttctcggcattagcaaacgtggcaacaaatatctacgcaagttgctgatccacggcgcacgagcggcgctgccccatgtcgccgggcgcgatacgcctttgggccgctgggccaagggcctgcttgctcgcgctcatcacaacgtcgtcgtggttgcgctcgccaacaaactggcgcggatcgcttgggcagtcttgcgaagcggggacaaattcgacgtcgtgggttcgcccgtggcggcataagagttggttggtcggcgcatgatgcgctgatcggccaaagatgtttgcgggtggtgataacgagatggcctgacagtcgaacggcgttctggaaacccggttccaaaaacggcgctcgacgccgaacgatttatggggaccggaacgcgcgtatctccatcttggctgggaggatcctccgaagccggatacgttgaagcagactgatcattcggcgctctcgataaaatcacttgcagacggggcgggccatacg

SEQ ID NO: 7898 - DNA, 1604 bp, unidentified
  source 1..1604: mol_type = unassigned DNA; note = element_c49b7c0
  misc_feature 1..4: note = core
  misc_feature 5..217: note = LE
  misc_feature 218..1432: note = CDS
  misc_feature 1433..1604: note = RE
ctcactggtcatcctttgtgttggcgacggtcgtcgggagagcgccacagtcgcttgcccgtgcagagggccacgatgagaccagcgcctcccggcgatccgtcgaggtgccctgagcggctacagggagttgcgccgtcagagcgccatcagtgagcaacggcgaaggtacctcgccgtcggcagcagtcaagatcgacgatggaaggaagtagttatggaaggttgttttgccggcgtggattgggccagcgaggagcacgcgtgctgcgtggtcgacggcgatggtcggatcgtggagggtcgccgctatcggcatgacgagcgcgggatcaccgcgctgtgccggcggctgctcgacctgggcgtggagctggtggcgctggagcggccggacgggttgctgatcgagcggctgctcgacgcgggccttcaggtgatcgcgattcaccccaaccgggtcgcggcgatgcgaccccggttctccgcaagcggtgggaagagcgacggcttcgacagcttcgtgctcgccgagctcgcgcgcactgacagccaccgctaccggatcctggtggcggattgcgatcagaccaaggcgctcagggcgctgacccgcgcccgtgaggacctggtcaagacacgggtcgggctggccaacgagctgcgcgctcaactcgagtgcttctggcccgcggtcatcggcgtgttcgccgacatcgacagcccgatcgcgctggcgttcatcaagcgctaccccagccccgcagacgcccgcgggctcggtgagcagcgcctggcccggtttctcgcccgtcacgcctacagcggccggcgcacccccgccgagctgctctcgcgtctgaagggcgcagccgacggccgtgccgccgcgctggagaccgaagccaggcgccagatcgtgctcgctctcatcagcgcgctcgagccgatcgtggcccggatcggcgagctcacctcggagatccgcggcgcgctggccgatcacgccgacggcgacacgttccggtcgctgttcaaggaccccaacagcgtcatcaccgccgccacgatgctcgccgagatgggcgactgccgcgcgcgctatcccacctacaaggccctgtcggccgatggcgggcaatcccccgtcgctgtggagtccggcaagtccaagcgcgcccggtttcgctgggcctgcgaccaccgcctcagagacgccatcgccacgctcgcggacagcagccgacaccacaacccctgggccaaagacatctaccagcgcgccatcgcccgcggcgccacgcacccccaccccatccgcatcctcggccgcgcctggtgcggggtgatctggcgcatctggcaagacaacgacgtctacgaccccgcccgccacaccgccctgcagcagctgctcgccaccaccagctgacaacaacccgggatctccgatcccggcacagccgcccccacagcgacggcgaacgccgccgtcaccgaaggctgcccgcagggcagagcgcgcagcgcttgacggcaagaccgacgtcgctaccacacccaccccgcacatcaatttcaccccaggggttgacacagggagt

SEQ ID NO: 7899 - DNA, 1285 bp, unidentified
  source 1..1285: mol_type = unassigned DNA; note = element_c4a2d97
  misc_feature 1..2: note = core
  misc_feature 3..226: note = LE
  misc_feature 227..1273: note = CDS
  misc_feature 1274..1285: note = RE
  misc_feature 17..241: note = bridgeRNA
ctgacttgtctaatgaggtcagacgcgaggggtctgcagcccgtagcgtccagggcgccggttcggtactggctcgcaaaccccttgccgccctatcgggttggctcatcgagagcgtgccaccgccgaccggcgcccggccgtggcgtggctcgacagaggcgtgcgcaagggattcttgaagtcaggctgcccgccacggcatctcccacttgttgattcacgaatggatgctgccgtgatcacgatcggaatcgatccgcacaaggcgtcgttgaccgccgtcgcgcttgaccccactggacgtcacctggccacccgacgcgtcgccgtcaacgccggcgcataccagacgctgatgaactggaccgtgcggtggccgcagcggcgcttcgctgtggaaggcgctaccggactcggccgcggtatcgcccaactccttgccgcccacggcgaagatgtcgtcgacgtacccgccacattgtccgcccgggcccgactgctggataccggcggcacccgcaaaaccgacccggctgacgccgccagcgtcgcccacgccgcgatgcgccacaaacggctgcggccggtcgttgccgaagaccacaccacccagctgcggctgctcgccgaacgccgcgacgacctggccgtgcaacgcgtccgtgtcctcaaccgtctgcacgtcctgctgcgcgacctcatccccggaggtgcgccaggcgacctcaccgccgccaaggccaccgtcctcatgcgcggcctacggccgctgaccgccaccgacgcctgccgccgcgatctggcccgcgacctcctcaacgacgtacgccgcctggaccgccaactctcggccaacgaggcccagacccggcaggcccttgccgcgacccgatccacgctcaccgacatccacggcgtcggacacatcatcgccgggaagatcctcggccacataggcgacatcagccgcttcccgacccccgaccacctcgccagctacaccggcaccagcccgctggaagcatccagcggcgaccgacaacgccaccgcctcaacaccaccggcaaccgccggctcaacgccgccgtccacaccatcgcggtctgccaagcccgcgaccccggacccggacgcgtctactacctacgaaaaatcgctgaaggcaaaacaccggccgaagccagacgagcactcaaaagacggctaaccaacatcctctaccgacacatcctcaaagatcaacaacatcgacctgcgcgcaccacttgacacacagaggcg

SEQ ID NO: 7900 - DNA, 1366 bp, unidentified
  source 1..1366: mol_type = unassigned DNA; note = element_c4a7cdd
  misc_feature 1..2: note = core
  misc_feature 3..74: note = LE
  misc_feature 75..1112: note = CDS
  misc_feature 1113..1366: note = RE
  misc_feature 1129..1351: note = bridgeRNA
agatgtatggactcccacccaataattggagtacggttttaattcgaccaaaaactaaaccaaggagaccatacatgagttatcgtaatatacttgctattgatttggcaaaagaagtttttcaagtttgtaaaactgaccataatgggaaagttatttacaacaaagctgttagccggaggaaattacaagaaattttacgcaaagaaaaagcaagcctagccgctatggagtcatgcgctacttcacattattggtgtcgttacgccatggaatgtggccatgcggtaaaacccatgcatgcgcgcactgttaaagcctttctaacaaagcaaaaaaccgacaaaaatgatgcgttagcaattagtattgcagccttacagcctcatgttcccagcacgcgcattcttaacactgaagagcaagcactacagtcggttgaccgaatgcgtgaacttgcagtatctcaacgccgttcatgttcaaatcaaataagaagtctcttaagtgagtttggcattaccatagcaaaagggattgctcatttaaaagcgaagttacccgatatattagaagatgctgaaaatggcttgccaggaatgtttaggcagtccatagcgatggcatttgaaatgctaaaaacacatattgaatacatagccgatctcgataaaaagctagaagccgaggttaaaaataatgaaacgtgccaaaaattaatgatgctagaaggtgtggggccattaagcgctataggcttaaccataaggctagggcaacctgctatatttaaaaatggtcgcgctgcatctgccagtatcggcttaacaccaaaacagcacagctctggtggtaaagaagtcattggtcatatagccaaatacagtgcggataaacgattgcggagtacgttataccaaggtgcattagcggtcattgcgagggtagataaacgtgaggctaggacgcaaaaagaggtatggctaaaagggataatacaaaggcggggtaaaaaagtagcggctatagcgctggcaaacaaaaatgtaagaacaacctatgcgttaatcaaaaataatacaaattacaaagcaaccgcaatagcggcatagaaaagagccataacggataacagaattaaaagaataggcaatcaataagagcgatgtaaaacaggttagaccgaccagcaacaactagttttaaccttaggcagctttacgtatgccgcgtcaaagaattagtttgctggtgcgaaaacatcaaagaggcagaggtagctcctcaataatagcccgtatataagtgcgcatctaaaccttgttatgtacagaatgtttattgattactttagggagtccatata

SEQ ID NO: 7901 - DNA, 1631 bp, unidentified
  source 1..1631: mol_type = unassigned DNA; note = element_c4ab12c
  misc_feature 1..4: note = core
  misc_feature 5..276: note = LE
  misc_feature 277..1500: note = CDS
  misc_feature 1501..1631: note = RE
  misc_feature 12..296: note = bridgeRNA
ctcctacaatatagttgcggaaaaaggcacggcagccagccgtgtcttttaccatctcaaagctgaagctgttagaatgggagagtaaatggcctgacacctcattccatgggctaacacgcccgcaacggagtccgtcagccgcctctctcattcgcagcattcgatttacgcagattgtaccaccgggctttcggtgcgttcgtgtcactgaggagattgaacaagcaatgagtaaaagcgggatgccatatccaatcacacaggagggaaattatgaatgctgttggaattgatgtgtccaagggaaaaagcatggtggcggcactgcgtccaatgggtgaagttgctctgctacccaaagaatatccacactccgaggcggggttggagcaaatggctcgcgccattattgctttaggagaggatacgcgggtagtcatggaagctaccgggcgctaccatgagccggtggcagcagctttgcatgagtacgggatctatgtcaccgttttgaatccgctgttcatacagcgcagcggtggtggttccatccgcaaggtcaagaccgacaaagcagacgccatgaagatcgccaagtacgggcttgacaactggatagatctgcgggaatatactcccatggaagcagtcaggcaacaactgaagctgtgctcacgccagtacaatctgtacatgaaaactatcgtggcgctgcaaaacaatctcatttccctgaccgataagacttttccgggggtgaacgagctgttcaccagcccggagcgtgcggacggccaccagaaatgggtggactttgtcatgtccttttggcactgtgaatgcgtctgccgcattagtgaaaaggcgttcacggagcgttaccgcaaatggtgcaagcgcaaaggctacaacttcagtgagagcaaggcacttgatctttacgctgacagctgcagccacatcacgacactgccgaagaatgacaatgccaaactgctcatcaccacggcggcgcaacagctcattgctgcaaggactacccttgttgccatacgcaccgagatgctacggctggcaaagctgctgccggaatacgataccgtccgtgccatgtacggcgtcggtgacatcactgccgcacagctcatggctgaaattggcgacgtgcgccgttacccgcaccgcagttcgctggtggcctttgcgggcgttgatcccgctgtgaaccagtccggcaaacacgaagctcggagcaaccctacaacaaaacgtgggtctccacatctgcgtaaaaccctgtaccagattatttgcacttacctgaagaactcccccaccgatgagccagtgtaccagttcattgacaagaaacgtagcgagggcaagccttatttcgtctacatgactgccggagccaacaagttcctgcgcatctactacgcacgggtaaaggagtgcttggccgcgctcgatacctctccttcttctctgaattaacccccttttttcatctgcctgcaccagaccggcgaaaaacatttcttctccggcctgttttggtgtgccctttttccctcacacattttgtgagagtttttcatttaggggcttgactttttatttgcaga

SEQ ID NO: 7902 - DNA, 1231 bp, unidentified
  source 1..1231: mol_type = unassigned DNA; note = element_c4b26ee
  misc_feature 1..3: note = core
  misc_feature 4..188: note = LE
  misc_feature 189..1196: note = CDS
  misc_feature 1197..1231: note = RE
  misc_feature 36..200: note = bridgeRNA
gttgtataattagaattgttattattatctttgcatcatcaaaacatcaaggtcatggaataaggccgatttaggggtagtctataagactgtgtttaacgttccgcccccatgcctttacatcggaaactggatagctcattgggtttctgaccccgcattcgcaacgatagttcatagatgtatagatgtttgttgttgatgttctaaatgtttatattatgacgtacattggcattgacgtaagcaaggacacgctggaggtcgctttcccctcaaaggacggctacaggaaccagacgttcgggaacaccccgaaaggcattcacagcctcattcagaaactctcccgtgaggagcatcactgcgtgatggaggcgacgggcaactacagtgccctgctcatctacatgctttccagggctggcatcatgacaagcatggagaacccgctcaaggtgaagaatttcagccgtgtcatgctctccatgacaaagacggacaaggctgatgcccgcctccttgcgctctacggcgagaagatgaatcccgctctctacaggctcaagtccgactccctgctcatcctcaggcagaagaggatggtcatccgccagctacagaagcagctcaccgcaagcaggaacctgctgcattcgctggaagtcctgcctatcgtagattctgccagcaagagcgccatccttaaggtcataaagtccttggagaagcaggttggcaagctcgaaggggaactcacccaccttaccaagtccgagtatgaccggcagatgaaagccctcacatccatcaaggggattggtgccagccttgccgccgcactcatcatcagcacgggaggattcacttacttcgacaatgcgaagcagatctccagattcctcggcctctgtcccacctatcagcagtcgggtacatcagttaatgtcaaaggccatatcaatcgcaatggagactcatgtctccgggcgcaactctacgtcgcttcgtggagtgcgagccagcacaacgctgcgtgcagggagtgctatctgaggctgcgagagagaggcaagccgggaaaggtcgccatgattgccgttgcaaacaaactcatcaggcaggccttcgccgtcgtcacacagaatcaactctacatcgatggattcgagtcaaccctgatacataagtcttaaatatctctaattttattcatttttcaatatagctc

SEQ ID NO: 7903 - DNA, 1184 bp, unidentified
  source 1..1184: mol_type = unassigned DNA; note = element_c4ba3b8
  misc_feature 1..2: note = core
  misc_feature 3..209: note = LE
  misc_feature 210..1169: note = CDS
  misc_feature 1170..1184: note = RE
  misc_feature 6..214: note = bridgeRNA
cttgtatcttccagccagaccagcacggtagagtctgacggccgatgaggtggccagaccggcccgtgtagtttggtacccgcttgggcgttcgagcccgtctctgagtagagagcgcacggtcgccgtgctggtcttcctgtatcccgaacggttacgagcgccggggtccgccgagcgcgcatgcacaagcacgggagtcgaagaccatgtctgtttcctctgtggtgggcatcgatgtcgccaaggcgcatgtcgatgtattcgtgctgggggccgagttcaagccccggcgttttgacaacgatgcggagggccattcggccttggcggccgcattggcgctgttggaggtgcgcctggtcgtcatggaagccacggggggctatgaagccgctttggcgtgctcactacaagccgccggcttggctgtggcggtggtcaaccccaagcaggcgcgcgacttcgccaagggcatgggctatctcgccaagaccgacgccatcgatgcccaagcgttggcagcatttgccgatgcgctggctcgtcagccggacttggccagctatatccgcccactcgccgacgaggcgcagcgcgacttggcagcgctggtcacgcggcgacggcagttgctggccatgatgctgtccgagcgtcagcgcatgcagttggccgtggccaaggtgcgccccagcatcgaggcgatgatcgcagccatcaaggcccagctcgatgacgtcgaaggccagatggtcggtcacgtccaggcgcacttcggcaagcttgacgctctgctgcgttcgacaaagggcatcggtcccgttgccagcgccacgttgatcgcggagctgccggaactgggcaagctcaatcgccgccagatcgctgcgctcgttggcgtcgcacctatggccaacgattctggcaactccaaaggccgtcgacgcgtcgtaggcgggcgtttcgaagtgcggcgcacgctgtacatggccacactgaccgccacgcgtcacaacccggccattgcagctttctatgctcgcttgctcgccgcaggcaagctacccaaggtcgcgctcattgcctgcatgcgcaagctcctgaccacgctcaatgccatggccaaacatggtttgccttgggaccccgacttcaaaaacacttgactcggaacacggtta

SEQ ID NO: 7904 - DNA, 1586 bp, unidentified
  source 1..1586: mol_type = unassigned DNA; note = element_c4ba9f3
  misc_feature 1..3: note = core
  misc_feature 4..433: note = LE
  misc_feature 434..1468: note = CDS
  misc_feature 1469..1586: note = RE
tttggtactataaaagtgtaagaagtagatctaatagttaggttgaaaattacacttctttttattatgattgtagtaggattggttaacgtatagtaattggagttaaagtactcgacctacaaagtgttaactaacctctacattcaatattcgattaagcaagttgaggatgaaataatactcgtgtaaagaaccaaactgagagattgtagaagtgttagaaccaatcgtaattaaaggaataggaaggattatgaaatgaagtatggagttggaattgatgtatctaaaggaaaaagcacaatatcaatattaagtattgaaggagaagtaattgaaatgccttttgatattaatcatgatgttgaaaatttagaaaagttagataaaaaattacaaatgttttctaaagaagatttaaaaatagttcttgagcaaacaggaacatattcatttaccaatattaatttatttgttagataaaggatattgtgtaattgcagagaatgctttaaagattaaaaagtatttagatagaagtttaagaaaagcaaaaacagataaaaaagattcattgaaattagcagaatatgcttgtgataattggtataaattaaaagcaaatttcgttgaagaagaaaagtataaggaattgagatttttatcaagacaatatttttcattaaattctatgaaagtacaacaaaaagtagatttttctgatttatcagatatgttatttcctggatattatcaattattagaagaatgtaattttatagttggattaaaaatatttgaaaagtttagtgatccaaaaattattagaaaaaagaaattagaaacatttttaaatgatatagaaaagattgcacaaaaaataggacaaaaaagagctggcagaaatttagctataaaagtttatgaactagctaaaaaatcagttccttcctgtccatcaaattcaagtacacaacttatattaaataagcgtgtggttgctttaatcaatttgattgaaacaactaatgaaattatagcaaagatgaatgaaattgccaagactatggatgaatataaagaagttagaaatatgaaaggtgtcggagatagattagcaccacttttaattgcagaaattggagatataagaagatttaagaatgcaggcagtctaattgcttatgcaggaatagattctccaccatatcaatcaggaaagtatgaagcaacaaataggcatatttctaaacgaggtaataaatatttaaggaaaacagggtttgaagtaatgcagtcaataaaatcattttgtagaattgattgtgaaatttatgattatatagttaaaaaggaatcggaaggcaaatgtaagaaatcagcaaaaatagcaggattaaataagtttttaaggcaatattatggtattctaaagaagaaatatattgaattaggtacttggtaggtcttaaactaaactgtcaaaaaaagacctaacaataggtctgcgttagcatatccaaatttatgaattttaaaaaaacataaaaatttagaaaaagtacttgatttatattagcaag

SEQ ID NO: 7905 - DNA, 1353 bp, unidentified
  source 1..1353: mol_type = unassigned DNA; note = element_c4bc288
  misc_feature 1..2: note = core
  misc_feature 3..74: note = LE
  misc_feature 75..1100: note = CDS
  misc_feature 1101..1353: note = RE
  misc_feature 1103..1342: note = bridgeRNA
ttatggatggctcgccccttaactaggcgttgttgtcttacggcagcaggtcgtttgaggaaggagcaagggtcatggacatatcggttctcgggattgatctgggcaagaacagctgcagcgtggtcgggctggatgcgacgggcaaggtcgttgtgcgacggcggatgcgacgcgagacggttatcacctatgctgcgagcctgccggcctgcgccgtggcaatggaggcttgctgcggcgctcatcacatcggccgggcgctggcacgacaaggccatgccgtgcggttgatgtcgccggaatatgtccgcccttacgtcaaggcgcagaagaacgatgatcgcgatgccgaggggattgcggaagcggcgacacgcccgacgatgcggtttgtggagctgaagaccgaggagcaactcgacatgcagacgttgcaccgcattcgcgatcagctcgtcggtgaccgtacctcgctgatgaaccagataagaagcattctcttcgaacgtggctatatcgttccgcaagggcgtgcaaagcttgccgctcgcctcggtgagatgctggatggcgacgagccagtgcttagtcctcgcatccaccggctcgtctgcgacatgcgtctgcgctggattgcccttgatgagcggattgcagatctcgatgccgagttcaccgaggctgctcactcagatgagcggatgcggcggctgctgaccatccccggtatcggtgcactcaacgcgaccgcgctggtggcagcggtcggagatgcccgatcattcggccgtggtcgggatcttgctgcctggctggggttggtaccgcgccaggcgactaccgggggcaagccgcgactgctcggcatcactaaacgcgggagccgctatctgcgcaagaacctgatccagggcgcccgttcgtcgctgccaacgatgagcaagagtgatacgcgactgggcgcctggctgcggggattgctggcgcgctcccaccccaataccgtcgtggtggcgctggcagccaagatggcgcgcatcgtttgggcgctgctgcgtcacgaacgcacctacgaaccagtcgcactagcggcgtgaacgagatcggccgatgcggcgtgcaccggccagatgatgtctgcgggaggtgagtgacagatggcctgacagtcgaccggtgtcctggaaccctacggcgtaaaatggcacccgatgccggcccctttatgaggaccaggacgcgcggatctccatcttggccaacagcagcatgctgaaaggccggatacgttttcgcagactgatcagatcgtcagacacaaaccgcttgccgacggggcgagccatacgt

SEQ ID NO: 7906 - DNA, 1353 bp, unidentified
  source 1..1353: mol_type = unassigned DNA; note = element_c4c1de5
  misc_feature 1..2: note = core
  misc_feature 3..80: note = LE
  misc_feature 81..1103: note = CDS
  misc_feature 1104..1353: note = RE
  misc_feature 1124..1340: note = bridgeRNA
tgatgaggtggacggcctccgcacccggcatcgttgtgccatactgtggctgtcaaaggtcacaatcgggagaaccgtccatgatggaagttatcatagtcggcttggatatcgccaagcacgtttttcaggtccacggcgtcgatcaaggtggtaacgctgttcttcgaaggaagctccggcgagcagaggtcgtcagttttttcgatcagttaccaccttgtctaattggaatagaggcgtgcgccactgctcatcattgggctcgagttctcatcaatctcgggcatgaggttcggctgatgccggcttcctacgtaaaaccgtatgtgaagcggcagaagaacgatgcgacagacgcagaagcaatttgtgaggcggtcactcgaccaacgatgcgcttcgtgcccgtaaagagcgaagagcaacaaagcgtgttgatgctacatcgcgccagggagctgctcgtgcgacagcgcacaatgctgatcaatgctttgcgggcacatttcgcggaacttggcatcgtcatgcgtcaaggttctgcgggcgtcagcacgctcatcgccctaatcgaggacgatgagcacgatctcgttcccgacttcacccgtcgagctttgattccgctcgcagaacagctgagagagttgtatcgacgaattgcggagctggaccaagagattatccgctggcaccgaacaagcgagttgagccgccgtctagaaacaattccgggcgtggggccggtcaccgcgagtgcgctctctgcgacaatcgctgatgcatcactcttcaaatcggggcggcaaatggcggcatggcttggtcttgtcccacgacagaattcgagtggcggtaaggagaggttgggacggatcagtaaacagggtgatccttatgtccgcaaacttctcgtcgtcggcgctcatgctgtattgcgcttcagtcgcaaagaaggaacggggccgaagaagtgggccgccgatatgctggctcgcaagccgcacaacgtcgtcgcagtcgcgttagcgaacaagatggctaggatagcttgggcaataatggtttcaggagagcggtatcgatcaatcccgacctgatacgggaagcttgagcctttggagattggtgaggtgcaaatggtgtgatgcgaacggtcgaaccggggtctggaagcccgacattggggtgatgtgctcaatagctcgttggagtgtatgggaccagatctgcggaattcatcagggccagcggcatcgaacggccgcaatcaaaggccgtatacatgcctgcacccgaccaagtcgctgccacaccaaaagtccttgccaagcggaggccgtccataca

SEQ ID NO: 7907 - DNA, 1325 bp, unidentified
  source 1..1325: mol_type = unassigned DNA; note = element_c4c29b5
  misc_feature 1..2: note = core
  misc_feature 3..252: note = LE
  misc_feature 253..1290: note = CDS
  misc_feature 1291..1325: note = RE
  misc_feature 31..202: note = bridgeRNA
cttgtatgatgaattttaacaaccgatggcgcagaaaaaccgattaagctgtcattgttcattgggaggccgtcccaccctgaggactggtagtttaccagagcctgtctagtagattggcccccgccctattcacccataccgtggagtatccgaggcttagcgcctgcatacacaaggatggtaggtgcatgtgcagggtcgggaaccgttgaatagtgtacttccctttaactgtattcaaaaacgattatgaccaatagccccgtcaacaccgccactcaatccacttctcgcctgtttgccggcgtggatgtgggggccgatgaattggtattggtgatccgcaagaacggcaagccgttcgatccgcaaaaatatgccaatacccgtagcggccgtactcgtctggtgaataaactgatcaaattatccggcatcaaggtctgcctggaagccaccggcatttaccatttcgatctggcgattgcgctgcatgacgccggtattccggtgatggtggtcaatcccaaggcctcgcataacttcgccaaggtgttgatgaaaaacagtaaaaccgacgccgtcgatgccaacaccctggccgaatacgtcgagcgtatggatttcgtcgcctggactcgtccttcgaatcaatcgctggctttgcgcggctatgctcgccgtatcgacgcactgaccggtcagaaagccgccgcgaaaaatcatctgcatgcgctgagtgcgacagaggaaactccgaaggccttgctgcgcgatgccaagctggcgatcagtcaattggaaaaacgcatcgataccctggctgccgaagcgatgcacttgatcaacgatcatcagacgctcaaacgggtttttgaattactgaccggcatcaagggcattgcccaaaccagcaccattgccttgatgggcgagctgctgttattgccgcccaatctgtcgcatcgcgaatgggtcaaatttgccggactcgatcccaaggcgtttgaatccggcaaaagcgtacacaagaaaatgcggctatccaaggccggcaaccggcatattcgctccgcgttgtatatgccggctttgagcgccaaacagcatgatccgcatgtgcgggcgtatttccagcacctgatcgacaacggcaagaaacctttgcaagccgtctgcgccgtcatgcgtaaattactgcatgcgatccatggcatgttgacgcacgatcaaccgttcgataacacacggttttatgccatccctgaatcgatcatcgctgagtaaaagatgatgaaatttgttgcttttgaacagagtat

SEQ ID NO: 7908 - DNA, 1740 bp, unidentified
  source 1..1740: mol_type = unassigned DNA; note = element_c4dd1ce
  misc_feature 1..2: note = core
  misc_feature 3..308: note = LE
  misc_feature 309..1601: note = CDS
  misc_feature 1602..1740: note = RE
  misc_feature 29..276: note = bridgeRNA
cttgtataatatgtttaggctgtagagcagatagacatataatctatctctctatcagtcatattaaaaatactaatatattgcttcctgagagaaggcaagagaaagcttactcctccttgggagggagtagaaatgctcttatccctcaagatagactgcttctcctgccttctacctgaaacacctttaactaagttgagagtgccttttgaggtacatctcttttttaaaacaaggctgtgttggtaggagtgctggagaaaatgccttactctttggaagaaagagaaaggagataaaagcatatggagaaagaagttaagaaagtaatgttcgtaggtattgatgtgggaaagaggaaacacgaggcctgttttgttgagagtaatgggagagttgtgaggtatatgccatttaataacagaatacaaggattcaaaaggttcttttctcttatcgagcagatgaggaaagatgaggttagcataaccatagctcttgaagcaactggacactacttccttaatctctattccttcttgagaggacatggtatagatgtaactgttgtcaatccaattcaaacggatagttttaggaatgtattcatcagaaagacaaaaagtgacagaagagattccttcgttattgcagaacttgcaagattgggaagggcgaggaaatccaacatagataacgaaggaagcaagatctctaatctcaagatgcttacaagattcagagcagattatgctcacaaagcttctaatatgaagaagaagctttcttccgatgttcttagagtattcccagaattttttgatgtattcaagggatttaataccagaacttccctcatgatattgagaaactaccctacaccaagaaaacttctcaaggaagatagaactatactctatactcttgtaaagaactggagcaaaggaaggataggagagaaagttgttgatgaactcataagtcttgctgaagattctgttgggtctcccatcgacattgatgcaatagaggttgaaattccctttatcgtagatgagatatttttccttgaagataaagtgaaagaggtggagagctatatcgaggaacaatctttggaaattgaagaagttgaacttctcaagacaatcccagggataagtacagttagtgctgcatccatcgtaggagagatcgcaaacatcgacaggtttgattccgttaagaaactcagggcatacgcaggttttgacccatctcttaaagagtctggagactctgtaacggggagaagtactatctctaagagaggctccccgtatttgagaagagccctctattatgctgccaatgtcagtaggcgattctctcctacctttaaagaatactacaaaaggaaacttattcaacatccaaacagggaaagatatgctatcgtatccgttgccaataaacttattactgttatctactatatgcttaaaagcaaaaaaccttttgacccactctatgaattgaatcttaaaagaaatccatttgaaaaaactcctgttacccaaaacttggaagaaaggagtgcagatgatatcttccattaatatgcaccctctttttgaggcgaagatacataacttttcctcttcttatttaaattccctcttcctcttaatctccttaaactttcttttaaaatctctttcattttttccttcagggtattgactcattatactaagt

SEQ ID NO: 7909 - DNA, 1236 bp, unidentified
  source 1..1236: mol_type = unassigned DNA; note = element_c4de7a6
  misc_feature 1..2: note = core
  misc_feature 3..258: note = LE
  misc_feature 259..1218: note = CDS
  misc_feature 1219..1236: note = RE
  misc_feature 6..213: note = bridgeRNA
cttaaatctcgattctgatctcaaaaagatgcagaatccccgactgatcatcgggagagcggtggagaagacgtgcacatcctgaggcttgaaagcctgcgccatagatagttctctccatcgctcgcacttacatcaaagttcgaacggtattcttagggcttggcttgccttgaccctgtatttataaggctgaacttcgtgagtgtccattgtgatccagtgtgtttttatcattattacaaatagttagaatctatgtcccaaatcaccatcggtatcgacattgccaaacttaagttcgacgttgctcgactcgctgaaggcaaatacaaacatgccaaatttgccaatatcgccgagggctttgccgagttcgtcgcttggttgtgcgactttggcgatacggaccagcgtctttgcatggaagccactggggcttacggcgtacccttggcggaatttctagtcgagcagggttatctcgtcagtgtggtaaatcccgcccagattcatgctttcggcaagagcgaactgagccgagccaagaccgacaaagccgacgccaaactgattgctcgctatgctctgcaagccagcatgaccgcatggaaaccgctccccacaaatatccgcgtcctacaagcgctgactcgtcgcgtggaacacctcttggagatgcagcgcatggaacggaaccgactggagacggcagactcgacgattacctcctcgatcaataccgtactctccatcttggacgccgagttgaaagccactcgccaagccattcatgatcatattgaccacgaccccgatctcaagcggcaaagcgatctactgatgtctattcccggcatcggctccgccacgatcacctatttgctcgtggccttaagttctcaccacggctataccaacgctaaacaagtcgtcgctcaagcgggacttgctcctgccattgcacagtctggacaatggcaggggaaaacccgcatcgccaaaacaggcgacgccagattgcgtaaagcgctttatcttccggctttggtcgcttggcggcataacccggtcattcgatgccagtgtgagcgtctcaaagccaatgggaagaacggcaagctgattgcctgcgccgctatgcgtaaactgatccatctagccttcgctatcttgaaatccggcaagccttttgatccaactttttcgcttgcgtagactgatttaagacggtat

SEQ ID NO: 7910 - DNA, 1368 bp, unidentified
  source 1..1368: mol_type = unassigned DNA; note = element_c4e62c9
  misc_feature 1..3: note = core
  misc_feature 4..321: note = LE
  misc_feature 322..1284: note = CDS
  misc_feature 1285..1368: note = RE
  misc_feature 34..239: note = bridgeRNA
tctcctatgtttgcgaagttattgattagatattaaaaagtcaataaatttgaaatctaaaatgaaaaaggatgagagcgaattagcgtataaatgactcaagaagtacattctcgcagagagacagcctcattcttttttatcttttagagtctgaacagaatgtaaggagtcgaacatgcttcggtatccagaatatccaaccaggagaaaagacgaaggaagattcatcactttattaatcaaatttagagttatgaaagaaaacatgtattaggagttgatgttgctcagaaagaattagttgtgacattaggcaaaatgtacgaagatttttcaatcaatttatatgcctataaggtttttagaaattccgaatcaggctttgtggctcttacaaattggattaaacgactgttgaaagatcaagctagagaagtccattatgtaatggaagcaacaggggtttatcatcaaaagtttgcttattatttagatgacaatcaatcaaaagtcagtgtagttttgcctaacaggataagtaactacattcgaactttggagttgaaaaccatcacagataaaacttgttctgaagctataacaagatttggactagagaggaaattaaattattggaaaagacccaaagatgtatatagagagttggaacaattaaccagagaacgggatcagattgtaaatgaaagagttgttgtaaaaaatcaattacacgcagaacaaaccgaggcaaaacccaatttaagaagtttggaaagattagaatcccgaatcaaatttttaaatggtcaggaaaaagagattaaggtagatatagcagagattgtaaaagttaattccgaattaaaaaccgaaatagaaagaatgatttcaattccgggaattggagcgctaacagctgtcattattttggctgaaacaaacggttttgaattgatacgaaataaaaaacaacttgttagttatgtagggctagatgttaaagaaaaacaatcagggacatcagtaaaagtaaaacctaaaatatcaaaaagaggaaataaaagcattagaaaagcaatgcattttccggcattagtagctgttaaacatgatgataattatagagattcgtatgcacggttggtatctaaacacggaataaaaatgaaagcattggtatccattcaacgaaaattacttgaattgacatacatattgtataagaataaaacaacttacaataaagaatacaaaaatagcgtgcaaacacaaatggtttaacacgctatagagtctagttcttgactgacttgataagacaaaactaaaaaaaaatatagattaaattttgaaatcaacacagaa

SEQ ID NO: 7911 - DNA, 1312 bp, unidentified
  source 1..1312: mol_type = unassigned DNA; note = element_c4e984c
  misc_feature 1..2: note = core
  misc_feature 3..192: note = LE
  misc_feature 193..1149: note = CDS
  misc_feature 1150..1312: note = RE
  misc_feature 28..202: note = bridgeRNA
cttgtgtccggtgaatgtgggaggttcggcgaacgggcggctgctggagcaaccgcccgtcgccggttctgagcccgtgaccccccaaggcggaaccctgtgaagggagcgagggacaggtctggcgtcttccttaaacccgaacagttgcatgggcgtgagagcccgcacgagcaaggaagggagtggaggatgccacaaaagacgcgatttgtcggcctcgatgtcgcaaagagcaaagtcgacgcctgcattcgttcggagggactgcgcatgtcggcgccgagcacgccggaaggccgggccgagctggtggcgtgggtgcgggcgaaccgggtcggccgggcggtgatggaggcgagcggcggttacgagcgcggctgggcggaggctctgcgcgccgctggcgtagaagtccggatcgtcgatccgaaaagggttcgccacttcgccaaggcggccggacggctggccaagaacgatccgatcgacgccgacacgatcgcccggttcgccgaggcgtttcccgacggcgaggctcaaccgcacgatcccgcgcgtgacgagatcgaccggctggttgcggcccggacagccttgaaagacgtggaagatcggatcaagcaacagggcgagcatggcccgccacccatcgtcgccaaggcgctggccgcgatcgccaagacgacccgggccgagctgcgcaggctcgaagccgcgatcgccgccaaaatcaaagccaacccgggattcgcgcgacgggccgaaatcgtcacgagcgtgccgggcctcgccggtcagaccgccgccggcgtaatcgcctggctgcccgagctcgggcgcatccgcaacgaagccgccgccgccctcatcggcgctgcgccctacgacgacgacagcggtgggcgcaaaggccagcgccacatcaagggcggacgccgcaagctccgcaacctcctctttatgccggtcatgggcgccgccacccagcacaacccggtgctcaaggcctactaccagcgcctgcgcgccaggggcaaggaagccaaggtcgccctcatcgcctgcatgcgcaagctgatcgtcatcctcaacaccatgctcgcgcgcgatgagacctgggacccgccggctcgagccggcgcatgagcgcggctgcgcgtggccgccgggcggcgcatcgcgccgaccgcatgcatgccaaagagcccggtgagcggacggggtcaaggccgaagccgccggaggcgggggcgcgaagcgccagccttgagcccggccgagcaccgggctattccgatcatcacagttg

SEQ ID NO: 7912 - DNA, 1388 bp, unidentified
  source 1..1388: mol_type = unassigned DNA; note = element_c4eeee7
  misc_feature 1..2: note = core
  misc_feature 3..88: note = LE
  misc_feature 89..1117: note = CDS
  misc_feature 1118..1388: note = RE
  misc_feature 1088..1375: note = bridgeRNA
agatggagtggttgccgccctccctagacagcatcgcaatgtgccaaggtcgtggtgtttaacgccacgcgcaaaggaggacggcgagatgaagaatatgatgattggggtcgatctggcaaaggcagtttttcaagttcatggtgcccttcgaacgggggaggtccagttccgcaagaagctgactcggaagcaattccccgcattcatggcgcagcaagagcccagcatggtaattttcgaggcatgcggcagcgcgcatttttgggcccgtgagatggaagctttggggcacgaggtaaagcttatcgcaccgcaatacgtgcacccctttgtgaagcggcagaaaaatgatgcggctgatgccgaggcgattgtcattgcggcacgccagcctgagatgcgtttcgtggagcccaagacagtcgagcagcagtcttgcgcggccgttttccgtgcccgggaacgcctggtgcatcagcggaccgcagatgtgaatgcgttgcgggcgctcctttatgagcatggccatgtgtttccaatcggcatgtcccacctcgctcgcatgacggcgtttgtgcaggatgagaccggcgacttgcatgcactgatccgggaagagtgcttggacttactcgtgcagatcgcagagaaaaccgcgcgtatcattgcgcgcaccacgaagctcaaggcgctggctgcccagtcagacagagcacgccggctccagacgatgccgggtgttggaccgctgacggctgttgcagtcgaagcgttcggtcccgacatggcggactttaaaactgggcgcaactttgcggcttggttgggccttgttcctcggcaacattcctccggaggcaaggagcgccttggtcgcatgaccaaggctggtcaggccgatatccggcgcctgttgatcatcggcgcaatgtcgcgactgaactggcttggacagcgcaccattgtagagggtagctggctgtcacgcatgttgatgcgcaaacccaagatgctggtcgcgatcgcgctcgccaataagatggcccgccagatctgggcgatgctgacaaagaacaaagattacagagatccggcgatggcggtcgtggcatgatgctcatgtcgaaccgctagagccggtgccgagggagtgtgagaagacgacgacctgaatgggcaaaatgatcgaacagatctggattgggaaaaccagttagtcactacgagcattgagatcgaaagtcagatttggacccaatctgctgatcaccatcccggcccgcggcttctggaaacgccgcatcatgaaggcctaacagaagttcgcactcgatcacgcgctaatagggttaaaagcttcttgcactacgggcggcaaccacaga

SEQ ID NO: 7913 - DNA, 1414 bp, unidentified
  source 1..1414: mol_type = unassigned DNA; note = element_c4f835f
  misc_feature 1..2: note = core
  misc_feature 3..86: note = LE
  misc_feature 87..1139: note = CDS
  misc_feature 1140..1414: note = RE
  misc_feature 1155..1401: note = bridgeRNA
tgatgtggtggacgacgcccgctcccggcatcgatgtgccatagggtgatcgttagagacagaatcacattgagggggccgaccacatgcaggttatcacgatcggcattgatcttgccaaacacgtgttccaagttcacggcgtcgacgccaatgacaaggtggtcttcaacaagccgctgcggcgctcacaagtgctccccttcttcgccaaactcgcgccatgtctcatcggcatggaagcttgtgcgtcggcccactactgggcgcgcgagctcaagaagctcggccacgatgtccgcctgatgccggccaaagatgtgaaggcgtacgtcaagcgcaacaagaacgattcggtggatgctgcagcgtgcggtgaggcggtccggcgaccgacggtccgaaccgtgccggtgaagacgcccgagcagcaagcagagctcatgcagcaccgcgtgcgcgacctgctggtgcggcaacgcacacaagccatcaatgcgttgcgctcgcatttggctgagctcggcatcgtcgctgcacaaggctatgacggtctgaaggtgctgcttgcggtcatcgccgactgcagcgatgtccgcctgcccgagaatgcacgcgctagcctctcggcgcttatggcgcagattgcctcttgccaggccgagattggtgccatcgagaagcgccttctcgctcagcatcgcaaaaacgcggacagcaaacggcttgagaccattcctggcattggcgtcgtcggcgcgagtgccattgtcgccacggttccggatgcttcgatcttcaagacggggcgcgacttcgcggcctggatcggcatcgtctcgcgcgaggattcgaccggcggcaagcagcggctaggacccatctccaagcaaggcgatcgatacttgcggcgcatcctgattgtcggggcgtttgccgtgatcaagcaggcgcgcgcccatcccgagaagtacccttggctgacgcagctattggcgcgcaagccggcgaaggttgctgcagtcgcgttggccaacaagatggcgcgcatcgcctgggccgtgctgaccaagaaagagatataccgtgtcacgtcccatcaccgcgacacctgcgtcgttgggaggttgaagaagtaagaggcttagcaatgaagtagtgcatagaccatgtaaacatgcgttctcggattgcaggggtgaatacgacgtgatgcgaaacggtcgagccgttcgattgggagaacccgttgagtgccatgcgctcaaagcgcgggctactgattgggacccgatccgcggatcacatcatggccagcggccaaagtggctgcaacagcaggccgaatacatgaccgcacccgacattcgcggaaacgtcagattcctcttgcatcgcgggcgtcgtccataca

SEQ ID NO: 7914 - DNA, 1499 bp, unidentified
  source 1..1499: mol_type = unassigned DNA; note = element_c5048f7
  misc_feature 1..2: note = core
  misc_feature 3..243: note = LE
  misc_feature 244..1479: note = CDS
  misc_feature 1480..1499: note = RE
  misc_feature 6..232: note = bridgeRNA
ctaatgggatctaccgggcctgcatacggcagactcggtgcctggtagccgtcggcaggtgagcactttttgctccagggccttgagccctgcgggaagacagtgcccctgccggctggccgggagagttgatcgctgctgggatgtcgtgcgcgcctgctggcgtgagcactgtttcattagggcgctgattgttctcccgcaggctgctgaccggattcggcgtggcggacgggagatttcgtgcggttgttcgtgggcgatgactgggctgaggatcatcacgatgtggagctgatggacgaggccgggcgggtgctggccaggaggcggctgccggagggcgtggcggggatggcccggctgcacgccctgatcgggcagcagctgggcgatgacggcgacgatgcggaggtggtgatcgggaccgagaccgaccggggcccgtgggtcgccgcgctggtcgcggccgggtacacggtgtacggggtgaacccgctgcaggcctcccggtaccgggaacggcacggcgtgtccggtgccaagagcgataccggcgacgcgcacatgctgaccgacatggtgcgcaccgactcccatcagctgcgggtcgtggcgggcgacagcccggacgccggcgcggtcaaggtggcagcccggatgcacaagacgctgatctgggagcggacccggcaggtgcagcggctgcggtaccagctgctcggctacttccccggcgcgctggaggccttcgacgacctggacgcccccgacgccctggagctgctgggcaaggcgccggacccggcccgggccgcacggctgacccgcgcgcaggtgtccgcggcgctcaagcgcgcccgccgccgcgacatccccggcaaggcgaccgcgatcctggccgcgctgcgcagcgcccagctgggccagccgccggccgtcaccgccgcctacgccgtcaccgtccgggcgctgatcgcgctgatcacggtcctgaacgagcaggtcacagtcctcgaagagcaggtgggggcacattttggccgtcacccggacgctgagatctacctgtcccagcccggaatcgggctggttctcggcgcccgggtcctcggcgagttcggcgacgacccggaccggtacgccagcggcaaggcccgcaagaactatgccgctacctcccccatcacccgcgcgtcggggaagaagaaggtcgtggccgcccggttcatccgcaaccagcggctcaccgacgcgctgatggcccaggccctgagcgccctgaccgcctcgcccggagcccgcgccctctacgacgccgaacgtgcccgcggcaccgagcacaaccctgccctccgcaagctcgccaaccgccgcgtcggcatcctccacggctgcctcacgacccgcaccccctacgacgaggcaaccgcctggccccagcaggaaaacatccatcaatctgacctcgcagcttgacatctaagcccctgggatgt

SEQ ID NO: 7915 - DNA, 1383 bp, unidentified
  source 1..1383: mol_type = unassigned DNA; note = element_c514021
  misc_feature 1..2: note = core
  misc_feature 3..80: note = LE
  misc_feature 81..1121: note = CDS
  misc_feature 1122..1383: note = RE
  misc_feature 1121..1370: note = bridgeRNA
tgatggtgtggacggccccctacggcatcgctttgtgccagattgaggttgttgcaaaacttcaaacaagggagccgtccgtgaaccagattatccgcgttggaatggatacgtctaaacatttctttcagctgcacggggttgatgccaccgagcaaccggtgttgcgtaagaagctgcgacgcaaggagatgttggtcttttttgccaagctgccgccgacagtgatcgggatcgaggcctgcggcgcgtcgcactacctggcacgagagttggagcgcttcggccacaccgtgaagcttttggcgccgcagcacgtcaagccttacgtcaagcgcaacaagaacgacgggcgcgatgccgaggcgctgtgcgaggcgatgagccgcccgacgatggacttcgtgccggtcaaaaccgcagagcagcaggcggggctgatgctgatgggcgtccggcagcaactgatcgcgcggcgcacccaactgagcaacgcgatccgcggctatgcggcggaattcggcctgatctcgccgcgagggctcgacaagatcgagccgctgctgttgcggatcgcgcaggacaacaccgtgccggtgctggcgcgcgagctgttcgccgtgcaaggcgcagactacgcgcgtctgcaggacgaactgaaggtgatcgatgccaagctgttggcctggcatcgcgctgacgcctgcagccggcggctttcgcagattcccggtgtggggccgatcggcgccagcgcgctggtgatgaagacgccggcgccgcaggccttcgcctcggcccggggctttgcggcatggctcggcttgacgccgaaggaccattccaccgccggcaagcttcggcttggcaagatcacgcgcgccggcgacgaactgctgcgcagcctgttggtggcgggagcgaccgcggtgatccagcaggttcggcgcggccgcggccgggcgtcgccgtggctggtcgcgctgctggcgcgaaagccgcccaagctcgcggcggtggcgctcgccaacaaggtcgcccggatcgcctggaagctgatggtgacgggagagagctacgacggcgcgcggatgctgaaggcatcgccgcacgccgcctgagagatcggccggcaggcgacaatcgcctggcggccgggccggagctgcaagaggagatagatggcgcgatcgatcgatccgagatgcgagacagtccgtggaatccattggcacgtaaaggtcatggctatgtgtggagctcgcgttgcggaaaccatcttggtcagcggtccaaagcgaccgcgtaaacaggccggacatatggatgcaagcgatccgatcagacatcaaaagctcttgtggctcgggggccgtccacata

SEQ ID NO: 7916 - DNA, 1403 bp, unidentified
  source 1..1403: mol_type = unassigned DNA; note = element_c518264
  misc_feature 1: note = core
  misc_feature 2..226: note = LE
  misc_feature 227..1390: note = CDS
  misc_feature 1391..1403: note = RE
  misc_feature 14..238: note = bridgeRNA
ctacttagagacttggtgtaggaccgggctccggccagactcggtccaggtgttcggcgagacgctctctcattgcggctgcccatcggtgtcattggtgtggctctctcatggcgtgcggtctcgtcggacgccgcgcgaggagaggctcgaaaggggtttgctctgctcgaagtagcggtgccctccttgctgataactacacgttcagccaagggaggtaccgatgacggtgatcatcggaatggacccgcacaagcgctcggccaccatcgaagtcatcgacgaacgaggccgagctctggcggtcggccggtacggcacggacaaggccggctacgctgagatgcttgctgctggccgccggttcaccgatcgagtctgggcgatcgagggctgcaacggcatcggcaagcacatcgcccaccggctggtgcacgacggtgaaaccgtgctggacgtgccgccgaagctgtccgcccaggtccgggtgttcgctaccggtaatggccgcaagtccgacccggtggatgcgcattcggtggccatggtcgccctgcggaccccgaacctcgtgcaggttcaggtcgatcccgacctggtggtgatgggcatgctcgccgaccggcgcgatgaactcggccgtgcgaggacgaacacggtcaaccggctgcatggggtgttgctcgagctttgtcccggtggggccaagccattcctgtccgctgctcaggcgcgtgcgctgatttccacgatcaagccgcgtgatttggttggcaagacccgccgccggttggcggccgagctcatcggcgagctggccggcatcgataaaaagatcaaggccgcggagaaggaactcaccgaactcgtgcgcgcccgcggttgcaccctgatggagctgactggtatcggcccgtccggtgcggcccggctgctggccgacgtcggcgacattcgccgtttccgtgaccgcaaccggttcgcctcctacaacggcaccgcgcccttggatgcctcatccggccagcagcaacgtcaccgcctgtcccgcgccggcaaccgccgcatcaaccgaacactgcacatcatggccatcgtgcagctgcgcaacccaaccaagggccgcgcctatttcgacacgaagaaagccgccgggaaaacctcgatggaagccatgcgcgcgctgaaacgacggctgtccaatgtggtctacacccgcatgatcgccgaccagaaacggcgtgaggcggcggacccgggagggcactcggggacgactctgcaatccagcgtgaccgacctgaccccggacatcggcccttcggacaagccacttcccgaatccgccaccaaccaccctaagccctcactcccaaccgcgtcttgacacaaaggggagc

SEQ ID NO: 7917 - DNA, 1086 bp, unidentified
  source 1..1086: mol_type = unassigned DNA; note = element_c51b6e8
  misc_feature 1..2: note = core
  misc_feature 3..227: note = LE
  misc_feature 228..1037: note = CDS
  misc_feature 1038..1086: note = RE
  misc_feature 30..187: note = bridgeRNA
cttgtatctccgttttcgggctcagaccttcatagtgtaggtgaggagggcgttccgggaaggccgggtcacctagaagccatgagcttgttcgttagattggccccccgccctcttcgcctatgccgtggagtatccaaggccaggagcctgcatccacaagagcggtaggcgcaaggtgcagggtcggggggcccggagcgtaagactaggattggagggggcggatgcgcaaggagacggaggcagggatcgatgtgagcaaggacgtgctcgacgtggccgcgcgccgcgatgagcggcagctcgagacggcacgcttcggcaacgacgccgccgggcagttcacgggggcgctgatgcagcgctcgaagaccgacctgacggccgccgtcgcgctgcgggagttcgcgatccgcatgcccttcgtggcctggcagccgcccgccgcgcacgttctggagctgcgaggaatcgcgcgtcggatcgccacgctcgtcgtcgagcgcacccgcgagcgcaatcgcctccacgccttgtgcgctacggccgagcggtcggcggtggtctgcaacgacatcgaggtgaacgtccgccatctcgaccgacgcatcgagctcctcaccgaacaggccatcgccctgatcgccgaccatgccgacctgcgcgaagcgttcgagcgcttggtctcggtcccgggcattgcggcgcacagcgccgtgcagctgctgcccgagctgctggtcctgccccccggcatgaccgtgcgccaatgggttgcccatgccggtctcgatcctcgtgcgcatcagtcgggcacgtccgtcgacaagcccgcgcgaatctcgaaggtcggcaaccgcccacatccggcgggtcctctacatgcccgcgctcgtcgcggtgcagcacaatcggcacgtgcgggcgttcttcgacaagctcgtggcgcgcggcaagactcccctccaagcgtacgtcgccgtcatgcggaagctccttcacgcgatctatggaatgctctcgacacgcactaacttcgtgggggcgaagttccacgcggccgcttgacgacggagagagtat

SEQ ID NO: 7918 - DNA, 1624 bp, unidentified
  source 1..1624: mol_type = unassigned DNA; note = element_c55feb2
  misc_feature 1..2: note = core
  misc_feature 3..239: note = LE
  misc_feature 240..1508: note = CDS
  misc_feature 1509..1624: note = RE
  misc_feature 17..304: note = bridgeRNA
ctcctaatatatagattgtaggtattgagtatcctaacagccagttaggccttatacctctcattgtttaagctgtatgatagataagcattggtgtgaccacgccctcctaggaccattaggtgtccgtacgaaagccagtcagccagcttatcatccgcagccgttcgatttacgtaggttggactgctatacgcatgtccgcttgataacccaggagattgaataagcaatgaggaatgctggataccatgcaaattcaatctatggaggtatttatcatgtacaacgcagtaggtattgatgtttcaaagggcaagagcactgtcaccattatcagacccaatggtgtggtaatacgtaagccctttgatgtaatccattcagtaaaagaactgaggaatcttacaggctacatagcctcgctggatggggaaacgagggctgtatgtgaatgcacagggcgataccacgaacccgtattgaaggcattctcagaagccaacatctttatttccgccgttaatcccaagcttattaagggtatgggtgaaaataccctccgtaagatcaaaaccgatcctgctgattccagaaagattgccaagtatgctcttgacaactgggctgaactgcgacagtattcaagcatggacgatacacatgaacaactaaaggcattaaactcgcagtacagtttcatactcaagcagcgcaccgcagcgaaggctaacctcatatctcttctggacaacacctaccccggagtgaacaagttattcgacagtccggtacgtgatgacggatctgagaaatgggttgattacgcatactcattctggcacgctgattgtgtccgtaagataggtcttaaagccttcacagagcgctacaatgcgttttgtaagaagcatcactactgtgtcaggaagaacaaggcacaggagctttttgaggcttctaaggaactcgtaacagtctttccgaaggacagtacctataagcttctaatacagcaacagatcaatcaggtaaatctgttgtcaagccagcttgctgccatacgcaaggagatgaatgcactagcttctaccttgccggaatacaccaccgtgatgggaatgtacggtataggtgaaacctatggtccgcagcttatagccgaaatcggagacatcacacgcttccatcatcgtgaagcacttacagcttatgccggtgttgatccgggtgctaaccagtccggatcccgtgatcagaagagcaataaggcctctaaaatcggctcgtcgaagttccgtaagactttattccagataatgacaacgctacttcaaaacaggccagaaaacgaacctgtatatcagttcctcgataagaagcgttccgaaggaaaaccttatcttgtgtacatgacggcaggcgccaacaagtttctgcgaatctactacggcaaggtcaaagctcatcttcgggaactggaacaagatcaggagtctgctgagtaaaacaaaccatcaccatcatccctctgaaaccggcatccatctggcggtttatttgttgtacataattctcaatgttcaaatattttcaaattacctcttgactttttattagtagg

SEQ ID NO: 7919 - DNA, 1362 bp, unidentified
  source 1..1362: mol_type = unassigned DNA; note = element_c56c4b3
  misc_feature 1..2: note = core
  misc_feature 3..74: note = LE
  misc_feature 75..1103: note = CDS
  misc_feature 1104..1362: note = RE
  misc_feature 1079..1350: note = bridgeRNA
tgatgatgtgaccgccccccgacggcatgtgtgtgccaaggtgggtctgcgaggatccacataggagagcggtcatgtcggagattaccactgtcggactcgatctggcgaagaatgtgttccaggcacatggggctgctgcctctggccacgtgctttttcgcaagaagctgaggcgggaccaggtgctggcgttcttcagccagttgcagccttgcgttgtcgccatggaagcctgcggaggcgcgcacttctggggccgggagatcggcaaactcggccacgaggtgcggctgatcccgccggcctacgtgaagcccttcgttaagcgccagaagaatgatgctgccgatgccgaggctatctgcgaggcggcagcgcgtccaacgatgcgctttgtgccggtgaagagcgctgagacccaaggggcggcaatggttttccgcatccgggagcttctgatccgacagcgcacacaggccatcaacgctctgcgcggccacctcaccgagtttgggcagatcgtgccacagggtgcggccaatgcggctcggctgatcgctatcgtggaagatccggacaatggcctgcccgccgacgctgttgccactttgacggttctggtcgcagcgctttcgcatctcgaggcggagatcggcatgctcaacgccgagatcgagcgccgagccagagaggatgtgatggcccgccggctgatgaccgtgcccggcatcgggccgctgattgccacggctatcgcagtgctggcgccaccgcccgagacattccgcaaggcgcgtgactttgccgcctggcttggcctcgtgccacggcagcattcgacgggcggcaaacagaggcttggggccacgacgaagatgggcgagcgatccctgcggcgcctgctgatcatcggtgccaacagcgtgatcatcaaacgccatgtccatgcttctgcccgaccgggcacatggctcggcggaatgttgacgcgcaagccagcgatgctggtgcgtgtcgcattggcaaacaaaatggcgcggatcgtttgggctctgatggcccgaggtggcgtctacaaggctccggccgcggcggtgtaaatcggccgtcggtcgcgagggcgtcggagcggaagagggcaaggagcagtttggcgcaatcgtcgtgagacgggatcgggagaaccagtgtgcaacagagtgcctatgagcacgcggctttgatctggacccgaccctcggacaccatacgggcccgcagcatgatgacggctgcaaaagaggccggacacatgtcagcacccgatgacgcgccaaaagatgctctgaatatccctcttgcgcaaggggcggttacaca

SEQ ID NO: 7920 - DNA, 1226 bp, unidentified
  source 1..1226: mol_type = unassigned DNA; note = element_c56f9df
  misc_feature 1..2: note = core
  misc_feature 3..239: note = LE
  misc_feature 240..1208: note = CDS
  misc_feature 1209..1226: note = RE
  misc_feature 6..209: note = bridgeRNA
cttatgtcttggaactagtccttgcggattggtacccttcggctgatccccggagcgaggcaagcaagattatcctccccctaaggacgtgatcctgccctgtagatcaatcgcttgcctcacctttgccagcatgttcggacggtatccaaggcctgccctgggcaagagcctgcacctataaggatgaaccggcatagtccgctgatcgccgttatctctaacgaaaggagattggtatgacgcaacccaccttttttgtcggcattgatgtggctaaggccaagtttgatgtggccgtcctgaccccggaaggaaagtatcgcagcaaagcctttcccaataatcccgtgggtcaccagcacttcgtcgattggctgaaccagcacggggctctagaggcccatatatgcctggaggctaccggcgcctatgggcgcggcctagcgcgttttctggcgcaacagcaactcttgatcagtgtggtcaacccggcccagatccatgccttcggcaagacagagctggcccgggccaaaacagataaagccgatgcccgtctcattgcccgctactgccggatgcattgtcccgcaccgtgggtaccgccgaccgatgagatcgtcgtccttcaagctttggtacagcgccgggaagaccttctggcactgcagaacatggagagcaaccgcttggaatccgccgaaggcctggcgcggcagtccattgaggtgcatctggaattcattgaccagcaaatccagatagtgcgcgctcagatcgagatccatatcgacaaccacccaggcctcaagaagcagcaggagctgctgtccagcatccctggcattggggacaacacggccaccaccttgctcgcctttctcagccctctggagcggttccattcggtcaaacaggtagtggcctatgctggactcaatccttccatccgccagtcgggtcaatgggccgggaagacgcccattgccaaggcgggcaatgctttgttacgcaaggctctgtacctgccagccgtggtggcaaaacagcataatcccgtgatcgccgccttctgtgacagactcctgctcaatggcaaacgccccatgcaggtggtggtcgcggcgatgcgcaagctcctgcatctggctttcggcgtactcaaatccgggaaaccttttgaccccaaatttgggattgcgtaatttcgctcaagacggtat

SEQ ID NO: 7921 - DNA, 1290 bp, unidentified
  source 1..1290: mol_type = unassigned DNA; note = element_c5715ba
  misc_feature 1: note = core
  misc_feature 2..216: note = LE
  misc_feature 217..1278: note = CDS
  misc_feature 1279..1290: note = RE
  misc_feature 5..218: note = bridgeRNA
actcagtctaaaatgatgttgaacgttcggcccaatctgacccgtgctgggattggtgttattgcctttgcattgacctgtcggttggcttccggcgttccccgatcatcgggcccattgcttgtgacctaataggagccttgtgctgcaacttgagtgtcttgtcctggcaagtgggactgatgaattgccacaagacgcttagaggaggcctaaatggaggaacaacccgatcaaaatgaagtcatactgggtatcgatacgcacttggatacccatgtcggcgtgataattgactatcgtggaaaatggctcggcactttatcaatagccacgaacccgtcgggttatcatgaattgttgagctgggcccaatcattgggtcatttgcagcgtgcgggtattgaaggcactggaacttatggtgcgggcattgcccaatttcttcatacccatggcgttgaagtctgggagatcaatcggcccgatcgctcccagcgccgcttgcaagggaagtccgatccgactgacgctgaaagtgcggctcgtacggtattatcaggtaaagcgcaggctattcccaaactacagaaaggcgcagccgaagccatgcggacggtatcagtcgccaggcggagtgctgtgaaagccagaacccagaccattaaccaattacgggcactgctgatcagcgctcctgatgacatacgagccaggctctggaaatccaaacccgagcaatgcgtcaaagcgtgcgctcagattctaagtttaggtgatacggtggcgcttcaaacattagcggcgactcttcggctactggctaagcgctggttgtatttaaccacagagctgcgggagcttgatgccaccctggaaagtttaaccaagcaggcagctaaacgattgcgcagccagtttggcgtaggcccgcaaacggcggctaccctgcttgctgtggcgggtgacaaccctgaacgcttgcgtagtgaggccgctctggccgctttatgtggcaccaatccgttaccggcatcatcaggaaaaacagtccgccaccgtctcaaccgcaacggtgatcgaaccgctaacaatgcgttatggacgattgccttagtcagaatgcgcagtgagccgcgaacccgcgcttatgtcgctcgccgaaccgccgaaggtaaatcaaccaaagaaattcagcgttgcttaaaacgttacattgttcgtgagctttacccgcttatcctggctgatctgaaagacgccgctttggtgatttgacataggagcgtc

SEQ ID NO: 7922 - DNA, 1462 bp, unidentified
  source 1..1462: mol_type = unassigned DNA; note = element_c578059
  misc_feature 1..4: note = core
  misc_feature 5..241: note = LE
  misc_feature 242..1438: note = CDS
  misc_feature 1439..1462: note = RE
ctcactggtgcaccatccattcaccgtcgatgatgacggtgcacccctggtgaccgtcggcccatcgcctagttcgcttgcggctcgaccgccacgatgagttctgcgagggccggcggcccaggacgtgccgactggcaatagggctgagcgccccagagcgccgatcagtgagcgaccggctgacacgtccacggaccaccgggtgcttccccactgggacaacagcgaggaggctgacatgaaggatacgtgccgtttcggcggcgtggactgggcgaccgacgcccatgccatcgccgtggtcgacgagggtggaggagtggtcgaccagttcgacgtcgatcacagtgctgcggggttgggcgagctgtgccggcgcctctcgaagctcgaggtgcgccgggtggccatcgaacgccccgacgggccggtggtggacgccctgctcgacagcggcttcgaggtggtggtcgtctcgagccgatcggtcaaggccctgcgcgagcgctatgggacctcggggaacaagtcggaccgctccgacgcctacgtgctggccgattgcctgcgcaccgacgggcatcgctgggccagcctggtgcccgactcgccagccacggtgacgctgcgcagccacgtgcgggccagaaaggacctggtcgagacccgagtggcgttggccaaccagcttcgatcccatctgcgagtggcttttcccggcgccgtcggattgttcagggacatcgacagcccgatcagcctgcgcttcttggaacggttcccctcgggcgcccgggccgcctggctctccgaaaagcgcctggcggcgtggctgggagccaatggctactgcgggcgcaaaacccccgccgagctctaccgtcgcctgactgaggcccctcggggccccggggttgacgacggcgacacccgcggggcagtcgtcgtggccatggtcgaggtcatcaaggcggtgcgcgtccagatcgacgagctgaccagacgcatggccgagcagctggaggcccaccccgatggcgccatcttcacctcgctgccgagggtcggcacggtgcgggcggccaccctcttggccgagatcggtgactgtcgggcccggttccccgacgccgagtccctggccgctctggccggcgtcgtcccctcgacccgggcttcgggacgccatcgagccgtcaccttccgctggagcgccgacaagaagctccgagacgccctgtgtgacttcgccggcgactcgtggcgagagaacgcctgggccgagcagcgctaccgccagctccgggcaagtggcaagcgtcatccccacgccgagcggatcttggctcgctcctggcgcacatcatctggcgctgctggcaggaccacgtgccctatgacccggcccgtcacggtgccgcccagcgcctcttgacggaggtggcttgacatagggcta

SEQ ID NO: 7923 - DNA, 1384 bp, unidentified
  source 1..1384: mol_type = unassigned DNA; note = element_c5af62a
  misc_feature 1..2: note = core
  misc_feature 3..87: note = LE
  misc_feature 88..1116: note = CDS
  misc_feature 1117..1384: note = RE
  misc_feature 1090..1370: note = bridgeRNA
agatggggtggatgccagccttctccgacggcatcgcaatgtgccaagtttgtggtgcttaacgccacaaaatggaaggaggcatccgtgggaaaagttaccatcattgggatcgatctggcaaagaacgtgtttcagctgcatggagcggcggctgacggaactgtcctatttcgcaagaagctgtcgcgcctgcagttttgcaggtttatggagggtcagccggcatgcgtcgtggcgatggaggcgtgcgccggctcccattattgggctcgcgagatggtccagcttggccatcagccgaagctgattgcacctcggtacgtcaaggcgttcatcaagcggcagaaaaacgacgcagcggatgcggaggcgatcgtcgaggcagcgcaacggccaacgatgcgcttcgtcgaaatgaaaaccgaggagcagcagtctcggtccataatgtttcgcacgcgagaacagctggtcaatcaccgcactgagttggccaatgcattgcgtgcgcacctctatgaattcggccacatcgcgccgcagggaattcgttatctgagccgacttgaacgtttcgttgaggacgagaacgccaatttgcctgatctggtccgcgagatctgccgcgatctgctggaccagatctatcagctgactggtcggatcgacgcactgaagaagaagatcgatgccctatcgagggaagccgaggcatctcggcgcttgcaaaccatgcccggcgttggccccatcgccgcactggcgatcgaaactttcgcgccgccgatggagacgttcaaatgcggccgtgacttcgccgcttggcttgggctcgttccgttgcagaagtcgaccggcggcaagcaacgactaggaaaaacctcgaagatgggccaacgcgatattcgacggctgctcatcatcggcgccatggctgtggtccgatgggcatcccggaagggcgcgcccgagagctcctggctcgcccgcatgatggcgaagaagccgcgcatgctggtggccattgcgctggccaacaagatggcgcgtggcatctgggccatgctgacaaaggaagaggattaccggaatccggcaacggtgcctgcatgagcattcagcagcacacctgaagccggtcggtcggggatgtgaggaaggcaagaaccgcatgggcaaatgatcgatcagatcggggtcaggaaaaccagaatgacgcaccgagcctcacgctcgctttctagatttggacctgatccgcgcatcaccataccggcccgcggcacgtcatggccgcaactcaaggcctgacacaagaccgcactcgatcccgtgttcaaaggttcgaaatcttccttgcaaaacggctggcatccacaca

SEQ ID NO: 7924 - DNA, 1197 bp, unidentified
  source 1..1197: mol_type = unassigned DNA; note = element_c5b0e07
  misc_feature 1..2: note = core
  misc_feature 3..184: note = LE
  misc_feature 185..1165: note = CDS
  misc_feature 1166..1197: note = RE
  misc_feature 11..193: note = bridgeRNA
cttgtgtctctccggtggaaggatttgctaccctttcgccactgctggcgggcaacccgtatccgacctgaggccctgagcctgtgatgtagataggtcccgccagcatttctctcaaaacttgaacgatatccgagcccgccgttgaccggatgaggctgcacgaacaaggagaagtggagagatggctaccatcggtattgatgtcagtaagaaaaagctcgatctatgctggttgcgtgatgctcaggccggcaaggtaaaaacccgggtatttcccaatgcccacgatcattatcccgcgctgctgtcatggttgctcaaacaaatcgacgcgtcccccggcgagcttcaggtgtatctggaagcgaccggcatctatcacgaacccctggcgtactggctgcaccaatctggcgtgacggtctacgtgctgaaccctgcccgcgtgagctactacgcccgctccctgggcgatcaaggcaagagtgacaagaaagacagcaaacggattgtgcattttgcgcaggcgaaccctgagctgacgccttggcagcctgagccagaggaagtgcggaccctcaagcagctggccaaacgtctggagacggtacagaaggacattcagcgcgaacagaatcggttagaaaaggcgcagttcaaccgtgacacgcaagcagaacactcgattacgcatgtgctggcattgctgcgacgggaggccaaaaggctgatcaaggaagtggatgatcatattgatcgccatgacggccttaagcgcgacaggcgcttgctggaaagcattccggggatcggcgaggtgctgtcggtgcatttactggtgacgctgcgatcaaggcgcttcaaaagcggccgacaagtggccgccttcatgggtctagtgccggtggagtggacctcgggcagttcggtcaggcacgcaccgcggctctcgaaaaatggagatccagccttgcggcagaagttgtatatgggtgccgttgtggcgatgcggcataaccccagcatccggcggcaatatcaacggctgtgtgctgcaggtaaacgaaaaatgtcagcgctgggcgcggcgatgagaaaactggtgcacattgcttatggcgtgctcgcacaccagaaagaatatgaaccacaacccacttgagaggggttgtggctcattgggagagacggtat

SEQ ID NO: 7925 - DNA, 1616 bp, unidentified
  source 1..1616: mol_type = unassigned DNA; note = element_c5b2ede
  misc_feature 1..2: note = core
  misc_feature 3..81: note = LE
  misc_feature 82..945: note = CDS
  misc_feature 946..1616: note = RE
  misc_feature 1387..1598: note = bridgeRNA
tgatgagatggacgaccccccgtttccggcgcggcagcgccatatgacggacaggacgtttttcatcagggagatggtgcgatgtcggcagcgttcatcggtctcgatctggcgaagtcggtgtttcaggttcacggtgttgatggccagggcaaggtggttgtgacgaagcgtctgcggcgggacgcggtgctggcgttcttcgccaacttggcgccgtgcgtggttgggatggaggcctgtgccgggtcgcatttctgggcacgggaacttacccggctcggtcacacggtgcgcctgatggcgccgcagtacgtcaagccctacgtcaagcgccagaagaatgaccgggccgacgccgaggcgatctgcgaggcggtgcagcggccgagcatgcggttcgtcgcggtcaagagcgaggagcagcaaagcaccctggcgatccaccgggtgcgcgagacgctggtcgcccagaagacgcaactgatcaacgcgctgcgcgctcaccttgccgagttcggcatcatcgcaccccagggcgccggcaaggtcgtgcagctgaccgccgtggtggccgacctggaggacacccgggttcccgttctggcacgaagcgttcttcagagtcttgtcgaccaactgcgcgacaccgaacgccggatcgaggaactggacgcccgactggccgaacaggctcaggcggacgaggtgtgtcagcggctgatgacggttcccgggatcggcccgatcactgcgacagcactgacggcgacagtcggcgacgccacagtcttcgagtccggccgccatctggcggcctggctcggcctggtgccgcgccagaattcgagcggcggcaaggagcgcctgggcggcatctccaaggcgggcgacggttatctgcgccggctgctggtgcatggcgcgcgggcggtaatgcgctagcatggcacgacgtcgcactggcttgccggattgctgaagcggcggcccttcaacgtcgcggcggtggcgctggccaacaagctggcccggattgcctgggcggtgatggcgcgcggcgaggattaccgcaagcctgccgtgacggctgaatcggcttcggcttgaggcggccatgagcgcatccttcacagcggccatcccgaccagcggcagaatagcaccgtgctcgctccggcaaggccaagccgcctccggcggtggccctgacgggccagccttgccgttcgctgcgcgcggcgctcctgaaaaagacaggtcgggacggagaggtggttccgccgatcgaacaaagaggttgggatcaggagaaagaacaggatgagacagcgctgcgggctcggcagccgtcacggcgccgagggcggcacatcaggctctccttcggtttgcgagggcgactgacggcgtgatgacaccacaggtcggaccgggatcggccaaacccgtgtgcaccaatgagccaccgagctcgctgcgttgattgggcgtcgatccgcggatcttcatcagggccagcagcctgaaagctgcacaacaggccggatagatggcagcaaccgactccctacgtctgaacgctgcaggaaacaaggcggggggccgtccataga

SEQ ID NO: 7926 - DNA, 1347 bp, unidentified
  source 1..1347: mol_type = unassigned DNA; note = element_c5be64a
  misc_feature 1: note = core
  misc_feature 2..258: note = LE
  misc_feature 259..1305: note = CDS
  misc_feature 1306..1347: note = RE
  misc_feature 108..267: note = bridgeRNA
cattaagtttgcagcgtgattgcgggcgcagcccgcaactgcaaacaaaaatgttcaaataacttgaagaatgccaggttgttttcttacttttgtcgtatgaaagaagaagtcaaccatccactgaagtaaaataacttgaaagaagagtcttcgagactaaggacggtttaatacttcagtggagcggcatctccaagacgagatagaatgttaggctcggagcctatttaatgtttgagtctggagggccggtggttgacttcattaaaacaccgcaaagttatggaaaaatattttattggcatagacttcgccaaagaaaagtttgacgtggtggtccttcagcagggccgcctgtgtgacaagggtgagcacgggcagttccccaacaacaccaacggggtgggcatgcttgagaagtggctgcgcaagacgtgcggcaaggatgtggcaatgcactcggtcgtgtgcggcgagaacaccggagtttacagcgtgacggccgccaagcgcctggtcatggacggctacacggtgtgcctcgagagcgccctgcgcatcaagcgctcgatggggctcacgcgcggcaagaacgacaaaaaggacgcacgctccatcgccgaatacgccgcgcggcaccgcgacaggctcacgccataccagatcccgtcggaggcctccgaggcgctgaaaacgctgttcacgcagcgacggctgttcgtcaggcagaaaggagacctgcagcgccgcaacagggaactcgccgggctctacaagggaaacccgctgctggacaagatgctgacgtcggacaaaaaggtaatcatggccatcgacgccgaaatcgagaaaatcgagcgacagatgaaggccatcatacacgacaacgccgacatgctacgcgtgtacaacatcctaacctcaatgaagggcgtggcgctggtcaacgccgtggcgctgatcgtgtacaccgacaacttcaggcggttcgacttcgacgcgaggcgaatatgctcgttctggggcgtcgcaccattcgccaaccagtcgggaacctcgctcaactccacgccgcacgtgtcgcgctacgccgactcatacctcaagtcgctgctctcgcaggccgcgctgtgcgccatgaggttctgcccggcgataaaccagtacgcccagcggctgaagcagaaaggaaagcacatcgcaatcatacagaacaactgcaaaaacaagatgctgcacatactcgtggcaatggtcaaaaacgagacatgttacggagaaaacaaaaaaatcacagcataacgaaaaaaaatccgcgttttacttgcacaggaacatagaatg

SEQ ID NO: 7927 - DNA, 1522 bp, unidentified
  source 1..1522: mol_type = unassigned DNA; note = element_c5c1dc5
  misc_feature 1..2: note = core
  misc_feature 3..247: note = LE
  misc_feature 248..1414: note = CDS
  misc_feature 1415..1522: note = RE
  misc_feature 7..226: note = bridgeRNA
cttgtatactcaatactgtaataatagattgagtataacttcctttctttctattgttataattaaattaagcactgtggatttgtgtcatgtttgtatagctttgactattataggagactcttaccacagttcttattttttaatgtcaatcagtaagttagcgctagacgcttcatcacaagactacataaataagaaaactgtgacttacccagtgctcaatatttaaaacggaggtgttcccatgtacttgattggagttgatatttccaagtacaagcatgactgcttcatagctactgaagcagctctgcccatcaaagcatttcgctttgacaacaatcgtttagggtttgatttatttcttgagacactaaaatcattagatcagtcacaagacataagaataggtcttgagtcaacaggacactatggcacaaaccttaaacagttcatttgcatgtcaggttatacttatcttgaatttaacccttacttaacgcacatgttttcgaaggcattatcgttacgtaagacaaagacagataaagttgacgcaaaaaccatttcgagtatgctaggttctgttgactacaagaccttacatacatcattttaccacatcaatgaattaaagaaacttgttagaacacgtcatattaaaatgacagcaagatctaaactcttaattgagataacaaacatcctagataacactttccctgaatttaagtctttttttagagaaagattacctggaacagcactttctattcttaagaagtataaatccagatctagaatcgctaagtttcaaaccaaagattatgattcaatcagacacttttcaatgggtaaatttacttatgtgagatttcaaaaattgaaacaactcgcaaaaggttccattggttatgaaacacaatccgatcttttcttattaaaagaggccattaaatcttatgagtacctttccattttgattcaatctattgaagaaaagattgaaatctatatgaaagatatccctcaaactttaacttcaatcccaggtgtttcaactatctcagcagcgattattatcgctgagcttggagattttaaaaacttcacaaatcctgcacaagtcatatcatttgccggacttgatacatctgtaaatcaatcaggcatgatggaaactagaggtcatctggttaagcgcggttcaggtttacttagaatgactttctggcaaatcacattttccagtttaagattaaatccaatactctatgactactacttgaaaaagcgagctgaaggcaaacaccataaagtagcaatggttcactgtactagaaaacttattcgtacaatttattacttaggtgttaatcaaataccatttgatcaatcactttttagataaccaactaaggaagtagctacctattttggttcatattgactaagtcaggccttttgataggtcttttagtatttaattgaattattagcttgacttcttatagtaagt

SEQ ID NO: 7928 - DNA, 1372 bp, unidentified
  source 1..1372: mol_type = unassigned DNA; note = element_c5c2ab9
  misc_feature 1..2: note = core
  misc_feature 3..80: note = LE
  misc_feature 81..1106: note = CDS
  misc_feature 1107..1372: note = RE
  misc_feature 1145..1362: note = bridgeRNA
tgatgatgtggacggcctcgcccgaacggcatcaagtgccaaggcatgaccggtgcaggtcgcggatagggaagccgtccatgaagacctttatcaggattgggatcgacctggcgaagaactttttccaggtgcatgcaatcgagcgcgagggtgcgcctgcggttacgcgcaagttgagccgaggtaaggtgcttgctttcttcgcccaaacggcgccctgccgcgtcgggatggaggcttgtggatcgtcccattactgggcgcgagagatccgggcgttggggcacgaggtggtcttgattcctcctgcttacacgaaaccctacgtcaagcgcggcaagaacgatgcaaacgatgcggcggcgatctgcgaggccatgtcgcgcccagagatgcggttcgtgccgatcaagagcgcggatcagcaagcggtgttgatgctgcacaagacccgggaattgctggtcaaacagcgaaccatgaccgtcaacgcgctacgcgggcatctctcggaattcggcctgatcgcaccaaagggcatccaacgggttaaggaactgctgaagctcgcgctcgtcgacgagacccttcccgaagaggctaggcaagccacggcgatgctggcttcgcacggcgatggcctcgacgaaaggatcgacgacttggagaaaaaaatcgcccgggccagcgggagaaaccagacaagccggttgctggatgaaatccccgccttcggcccggtgatcgcatcggcgatggtcgctttcaaccccgatcccagcgtcttcaggtcgggatgcgatttcagcgcgtcgctgggcattactccgagccagaactcgagcggcggcaaggacaagctcggcggaatcaccaagaagggcaaccgatatctgcgcaagatgctggtcgtggggtgcacatcggtgttgcgcgtggcccacaaatacaaaggcgccttggccgaatggatcgtcgccataagggccaggaagcccgagcgcgtcgtcgcagtcgccttggccaacaagctggccagaatcgcctgggcgatgatgacgaccggcgaaagcttccgagccgaactgtacaccaaggcctgaagacaggagttttccaagatagacgtttcagtttcgaagagattggcaagcgcaacgacgtgatgaacgacacggtcgcaacgaaagcccaggacaccccgacatccgccacgagccctgagctcgccgtagtgatagggaccaggactgtcgaatatcatcagggccagcggtcctataccgcaccaacaggccggacatatgaccgcagccgaccaaaggcgatcagagcgtcaaaaaccacttgccaagaggccgtccacata

SEQ ID NO: 7929 - DNA, 1318 bp, unidentified
  source 1..1318: mol_type = unassigned DNA; note = element_c5c38da
  misc_feature 1..2: note = core
  misc_feature 3..42: note = LE
  misc_feature 43..1065: note = CDS
  misc_feature 1066..1318: note = RE
  misc_feature 1074..1316: note = bridgeRNA
agatgagatggatgccgccctcttctggacgaggagggtgagatgggaacgaagcgggtggagagagaagcggatcccctggagcccggacggcatcgatgtgccagagtggtgttgttcgacgaccactcgagggacaggagatccgtgatgaacgttacgacgtacgggctggatttggcaaagcgagtttttcaggtgcactgggtagagagcgacaccggtgaggtcaagcgcaagacgctggcacgggcgcaggtccgggggttctttgccggtcgcgccccgggggtggtggcgctggaggcgtgcgggtcggggcatcactggggccgggtgctggtggagctcgggcacgaggtgaagctgattgcggcgcagttcgtgcgcccgtttgtgaagacgaacaagaccgacgcggcggatgcggaggcgatctgggaggcggcgcagcggccggggatgcggtttgtggccttgaagagcgaggagcagcaggcggtgttgggtctgcaccggatccgcgcgcagtgcgtgaagatgcgcacgatgcaggcgcaccaggtgcgcggtctgctctacgaattcggggtcgtggtgccgcagggctggcgggcgttgctggcccagaccgaaccggtgctggccgatgaggcacacggagcggtgccgggcgtcggtcgactgacggcgacggcgctcgtggcgacgattggcgatgcccggacgttccgctctgggcgcgagtttgcggccttcctcgggctcgtgccgcgccaatcggggagcggcggtcgggtgaagctgctggggatcagcaaacgcggggatccgtacctgcgcacactcttgatccacggcgcccggaccgtgctcacgcaacagagtcgtgcggatcgttcgctcgatccgtggttgaaggggctgctctcgcgacgaccgaagaacgtggcgattgtggcgctcgcgaacaagatggctcgcacggtctgggcactgctggcccaccggcgggacttcgatcggggctggcgatcgatcacaccgacgccagcgatgttgtaactcaactggaggggacggccaatcgggttgcgcaggtgatgtgatcgtgatggcaacgggtcggaccgtggggaagcaagcctgtatgtcgcctcggacttcgagtccttcacggagatgaggccttcctcagcggaaatcatcagggccatgcagagcgatgctctgtcgatgtaggccggatataagactgcagccgaacctcgatgccagagcgacgacatcacttgccaatacgggcggcatccatata

SEQ ID NO: 7930 - DNA, 1365 bp, unidentified
  source 1..1365: mol_type = unassigned DNA; note = element_c5c39da
  misc_feature 1..2: note = core
  misc_feature 3..75: note = LE
  misc_feature 76..1122: note = CDS
  misc_feature 1123..1365: note = RE
  misc_feature 1101..1352: note = bridgeRNA
tgttggggtggacggccccgcggcatcttgtgccaaggtctggttgtcgtcatccgaacctgaaggaccgtccgcatgaaccttaagcgcattggcctcgacacgtccaaggccgtgttcaccttgcatggcgtgggccaggacgagaaagccatcctgcgccgcaacatgaggcgggcggagatggaggcgttcttcgccaagctgccgccaacgcatgtggcgcttgaggcatgcggcggctcgcaccattgggggcgtcggctggcggcgatgggccacacggtgcagctgatcccgccgcagtacgtgaagccgttcgtccggcgcggcaagaacgaccgcaacgacgccgaggcaatcagcgaagcggcggcgcggccggacatgccaagcgtgccggtgaagtcggctgagcagcaggccgaggcgatcgtgctctcggcgcgtgagttgctggtccggcagcggacgcagctggtcaacgccgttcgcggtcacgccgccgagttcggcgtgatcgcagccaagaccatcagccagctgccaagtttgctcgaagccgtggctgctgcggaaacggtgccggccacggccaaggagatgctggcctttctgggcgcccaggtggcccagctcgacactcagattgcagagctggagccccgtatgaagcagcagcacaaggccaacccggtcagccagctgctggccgaggtgcccggcatcggcccgatcggggcgctgagcctcgcgctcacgatcgatcccggccggttcacctccgggcggcacttcgccgcttggctcggcctcgtgccgaagcagcactcgacgggcgggcgccaacgcctgggcggcatcagccgggccggcgacgagcggctgcggcagctgctggtgctgggggcaacggcggtgatccgtttcgccaagccggggagcaagagcgcctcggcctggctgctggccttgctggagcgcaagccgcgcaaggtcgcggcggtggctctggccaacaaaatggcccgcatcgtgtgggccatgatggcgaccggggaggcgtatcggggcagcaagaaggtcgccacgccggcggccggggctgccacggccgcctgacccgctcgcaggtgcctgggtgcaaagaaagctgcaggagatgatgatcggtcgagccgacgaatgaggaaccccgtttgttgcacaggcatcccgatgccgcgtccgtgtttggggcttgttcgcggaacccatctgggccagcggtcaccgtgccgcgtcacaggccggacacatgaccgccatcgcaccactcgtcagatcatgcagtacaccccttgcacccaaggggccgtccacaca

SEQ ID NO: 7931 - DNA, 1457 bp, unidentified
  source 1..1457: mol_type = unassigned DNA; note = element_c5c957b
  misc_feature 1..2: note = core
  misc_feature 3..129: note = LE
  misc_feature 130..882: note = CDS
  misc_feature 883..1457: note = RE
  misc_feature 1207..1409: note = bridgeRNA
agatggggtattcggcttgagcctcatcttttggcggggatgccatcaaggtgctgcgcttcgagctgatgataaaacgtggtcggttccctggaaacgccacaagccatcaggaaggacaagcgcagcatgaaacattatgtaggattggacgtctcggtgaaagattccgcaatttgcatcgtcgacgaaacaggcacggtgtgccgcgaggtgaaggtgccgacccatcccgaggatcttgcgcgggtgctcaaggatcccgcctggcggttggaacgcgtcgagcttgaagccggacctttgtcgcaatggctgttcgaaggtcttgccaaggccggcttgccagtggtttgcattgagacgcgtcacgtcaacgcattcctgaaggcgcagccgaacaagaccgaccgcaatgatgcgcgcgggatcgcgcagatgatgcgggtcaatctgttccgcccggtgcatgtaaagaccctgacgagtcagaagcgccgggcgctactgacggcgcgcaagctcttaaaggacaaggcgattgccatcgagaacgacatccgcgggctgttgcgcaacttcgggctcaaagttggcaaggtcggtgcggtcaagtttgaggagcggatccgcgagctcaccgaaggcatgcccgatctggccgagatcgtcgaacagttgctcgacgcgagccgcaagctgcgccagaattatgccgccctgcaccgcaagcttctggcgatcgtacgggatgatgaggtttgccgccggctgatgtcgatccccggtgtcggccccgtcgtgtcgctggcctacaccgcgacgatcgatatccccgcccgcttccgcaactccaaggcgtcggtccgattttgggcttgacgccggcgctccatgaatcgggcgaaagccgccgggtgggcgggatctcgttatgtggcgacggcatgatgcgaacgttgctctacgaggccgcgcagaccctgctcacgcgggtgacgaaatggtcctggctgaaggcctgggcgatgggcgtcgccaagcggcgcggccaggggaaagccatcgttgcgctcgcccaccggctggcggtgatcatgcatcgcatctggagcgacggcacacagttccgctggaccaggacggaaatgacgccggtcgccggctgaacaattgataaacatcgccccccgacgggggacgacaccagttccacccgccggtggaaagctgtccttcgcgggacgaggatgaggtgagttcgtcgactggcttggctcgattgcccatcatcggcaatcaaggcgctcgacagattgttccacccattcttctgaatccccatagagggcagggccagagcgccgatcccggagagaagcaaggccccgcgaaagacgtccaatgccggcaaagcgaaaaagagaggcgcttgacttcaaaccgccgaatagaga

SEQ ID NO: 7932 - DNA, 1662 bp, unidentified
  source 1..1662: mol_type = unassigned DNA; note = element_c5d056e
  misc_feature 1: note = core
  misc_feature 2..312: note = LE
  misc_feature 313..1560: note = CDS
  misc_feature 1561..1662: note = RE
tatccattcctttcgcttcgctcaggcacaaaacgcaatgaaaatgtttccctgagcttattttttctttataattcttcttgtagggaactcggtatactacaaatcacgaggaggtgagtgggctgtccggcttgccggatgaccgtatcattatatgtgtagactgtcttttcaggcacaaataagtgtgacaccaagcacgaaatcttatctctgtttaaacaacttcgtttatggcttagacagtcagtcaattccgtctctccctataatctttagcgaaccgctctggttctgaaaggagtccctatggctttaaaaatcgtgtacaaaatctgttgtggcattgatgtccacaagacttttgtagtcgcctgcattgcttctactgacaagcacggcgttacctcttacgagcgccaccgtttttctacctacacgaaaggtttgaaaaatttgttacaatggctactcgaacataattgcaaggatgtctgtatggaatctactggtaaatactggattcctgtttataacattctcgaaaaagattgttcgattgtccttgctcatccaaagtatgttaaggctatccgtggaaagaaaactgacaagaaagatgccaaatggattgctgacctgtttaagcatgaccttgttgccggtagctttatgcctcctgctgacatccgccagcttcgtgaccttatgcgctaccgtttcaaactgacctgcttcaaatcaagcgaaaagaatcgtttgcagaactgtctcacggtttccaatatccagttgggaaacgttgtttcggacaccttcggcaaatctgctcaggcaatactggataagattttagaaaaccctgaagatacttcctttgaccttgaaccccttgttttcaaaagtttgaaaaagaaacttcccgaactgcgtgatgccattgacggctatatcacaccggaacaagcaggaaaactcaagataatcaaggctcattatgaaagccttgaatcccggaaagcagagcttgaagaactcattcttgcgctcgccgctccctatcagcaggaactcgccattcttcaaaccgctcctggtatcagcagtgacttcactgccatcggaattatttccgaaatcggtaccaatatggaggcttttccttcggcgaaacacttatgctcatgggctggtcttgctccgaccaacaatgaaagcgcagggaagaaaaaatctgtccgggtttccaaagccggatgctatatcaagccgcttttagtacagtgcgcaaacgctgttgttaaaagctcaaagcatcctgaaatgcgtaaccgttatctccgtctcaaaaagcgtcgcggtcacaagaaagcaatcattgccatagcaagaatgcttcttaccgcattataccacatgttgaagaacggcgaaaactataatgcagaactttacaggaaatcagacctgcctccagttgaccgtgaaattacggtagaacaggcaatccttatcgcaagaaatcagggttataaaatcaagtcagcaaccgcataaccttaacttctcaatattcaatttttaaagcagccaccgaaagatggcttatttgtcgtgtgcttaagggaatggataccctctacttctcattttcaatct

SEQ ID NO: 7933 - DNA, 1377 bp, unidentified
  source 1..1377: mol_type = unassigned DNA; note = element_c5d65cf
  misc_feature 1..2: note = core
  misc_feature 3..86: note = LE
  misc_feature 87..1118: note = CDS
  misc_feature 1119..1377: note = RE
  misc_feature 1148..1365: note = bridgeRNA
tgatgctgtggacggctctcccaccggcgcgtaagtgccattgaagtgatcgccgctggggcggtcgcggttatggggagccaagcatgcaagtgatcacgacagtcggtctcgacatcgccaagtcggtgtttcaggtccacggcgttgatgcggcgggaaaggtgctcatccgccgtcagctgaagcgccggcaggttttgccgttctttcagaggctaccggcctgcgtcgtgggcatcgaggcctgcgccacgtcgcatcattggtcgcgccagctcagggcgctggggcataccgtgcggctgatgccgcccgcctatgtgaagccctacgtcaagcggcagaagaacgatgccgccgacgctgaggccatctgtgaagcggtgacgagggcgaacatgcgcttcgtggagaccaagacgcctgagcagcaggcctgcctcatgctccaccggacacgccatctcttcattcgccagcagaccagcgtgatcaacgcgatccgtgcccatatggcggagttcgggatcgtcgcacgggtcggccgcactggcgtcgcggagctgctcgcggtggccggcgatccaagggatcggcgcctgcccgaggtggctcgcacctgcgtggcggcccttggcgtacagcttcggatgctgaaagcgcagatcctggagttcgatcgccggatcggggcctggcaccggtccaaccagacgagccaacggctcgatcagatccccggcatcggaccagccttggcgaccgccctggtcgccagtgtgccggatcccaaggccttccgctcagggcggaacttctctgcctggatcggcctcgtgcccaagcagcactcgagcgggggcaaggacaggctcggcagcatcagcaagcagggcgaccgttatctgcgcggcctgttcaccgctggcgcgctcgccgtcatccgctatgccaaactacacggcaccgagcatcgaccctggctcacggccttgctggctcgccggccgaccaaggtcgcggcgatcgcgctggcgaacaagctcgccagaatggcctgggcggtgatggccaagggtgagcgctacaaggaacccgccgcgctggcagcgtgaacgagatcacgccggcaatcggcgtgatgtgaggttgggagggtgaacagcacgtaatgcagagccggtcgatccggcgatcaggacaacccacaatgtgccatcgcatcatcgaatgcgagcttttgaccgggacctgatccgcggagggcattatggccagcggtcatgtgaaccgcgcaaacaggccgaacacatggccgcaaccgaccagccgcaccgtgaagaaaacccttgccaacggggagccgtccacaca

SEQ ID NO: 7934 - DNA, 1618 bp, unidentified
  source 1..1618: mol_type = unassigned DNA; note = element_c5d6d41
  misc_feature 1: note = core
  misc_feature 2..168: note = LE
  misc_feature 169..1452: note = CDS
  misc_feature 1453..1618: note = RE
tggtatattgttaatgactcatcaaatgagtattaatcgtataccgtttcctttctaccaaggattggtatcccttggatttaaatatttgatagaattgaattgtgaatgtgtatttgctttctttccttgtagcttgactacctttgaaaggatcttgccacttctttgtattcaattaaccatgagtttgatgagtctttgaattcttatgcaccaggttttaatataccttgcaagtgggcacttatcacaatcacatctatagaaaggatgatcattatgattaccattggaattgatattggaaagtttaaccactgtgcttgcgtcttagataatcgaactggcgaattacttgttgaaccttttttctttgaaaataataaagaaggattctatcaatgtcaccaagccatatctccgtataagaatgctctaataggattagaagatacgggacattatggcgacaaccttgtcttctttcttttaaaccatgatttcaaggttgctttaattaaccctattaccactgagtataaacgaaagtcaaagttaaagtctgctaaaaacgataggaaggattccattctcattgctcaagttctcttaaataaagatgaataccgaaacattgatttaaaaacttatcacttacgtgatctaaagaaacttacccgtcatcatcatgatcttaaagaagatttgaatgtctataaaaacagacttcagaaagaaatcgatttggtgtttcctgagtttaattcgctctttatctctaagtatggaattgtctataatcaaatacttaaacagtttggaagtgctaatgtcatagccaacaccgacataagaacgttgcgtaaagcgttcaccgtagcttctcagggaaagagaatttccttaactcctgaacacttaaagcttgtcgctaataatagtgttggagaggatagtatcacttctacaattcaaatcaaacatcttatagtcctcatagaaacactcgaagaacaagtcaaggaagttgataaaaaaatagaagagctcagcacaaacctaaactctcctatcacttcaataccagggattggaatcttctccggtatgtccatcttgtctgaatacggagacatcgatcgttttgattctcctgctaagatggtttcttacgctggagtcgatccttatgtctttcaatcaggtgattttgaagcttcaaaaacagctatcaccaagaaaggtaatccttatcttagaaaaactctctatcaaattgcgttacctgtgataagatttaatcccgtatttcaagaatattataccttaaaaagaagtcaaggtaaatcgcaccgttgtgcgttgggacatgttgtcagaaaactcattcgagtgatttttcacctagtttctaacgacattgaattcgatgtcgcgaagcttgtctaagtaatcatcataaaatcaattacataaaatagccgcgctacatgatagttctttttagtttgtactaaatacaacttattcacatttcaaagatcaaaccagataacttttattcaagttttacattttcaaactatttcataaaatcacttgttttttatatagt

SEQ ID NO: 7935 - DNA, 1397 bp, unidentified
  source 1..1397: mol_type = unassigned DNA; note = element_c5d999f
  misc_feature 1..2: note = core
  misc_feature 3..89: note = LE
  misc_feature 90..1124: note = CDS
  misc_feature 1125..1397: note = RE
  misc_feature 1165..1383: note = bridgeRNA
gatgaggtggatggctcccgctcacggcatctgggtgccaaggtgtgaatgccgtcaggcgttcacgagcaaaatgggagccatccgcaatgaagattaccacgatcggcctcgacttggccaagagcgtttttcaggtccacggtgttgatgcgaacggcgaggttgtggttcggaagtcgcttcggcggtcgcagatgctgccattttttgccaagttgcctgcttgcctggtaggcatcgaagcgtgcggcacgtcgcatcattgggcgcgcgagctgatcaagctcggccatgaggtgcgcctgatgccgccggcttacgtcaaaccgtatgtgaagcgcgggaagaccgacgcggccgatgcggaagcggtttgcgaagcggtgacgcggccgacaatgcggttcgtgcccgttaagtcgcccgagcagcaggcggcgctgtcgatgcaccggacgcgcgatctgctggtcaagcagcgcacgcagctgatcaacatgatccgtggtctgctggccgagtttggtatcgacatccccaagggggtcgaacgggcgctgctgatggcgcgacagatcgtcgatggtaaagcaccagatgtgccgattgaagctgccaagatcgtcggcgcactctcacaacaggcgctcgacactcacgttcggcttcgcgagatcgatcgcgatctgctcgtttggctgcgtggcagcgatgttgcgcgtcgtctcacgaccatccccggcatcgggccgatcggcgcgacggcactcgccgcatcggtcaccgatccgcatcagttccgctcggggcggcagttcgctgcctggttgggtttgacgccacttcagaagtcgagcggtggcaaagagcggctcggtcgtatcagcaagatgggcgacaagtacctgcgcaaactgctcgttgtcggcatgacttcgcttgtgcatcgcgcgaggcacaatcccaagacggtcgatccacgcctggtcgatctgctcgcacgaaagcccaccagggtcgccaccgtcgcgatggcgaacaagaccgcgcggaccatctgggcgatcatggcacgcggcgaaacctatcgtaccggccaccggcccgcgctggccgcataagacaaagagacatggttcagctgaagaggagatcagcttcacgaggttgcgagcgcgatgcgatgtgatggcaaaccggtcagaccgggaacacggacaacccaaccgatgtccaaggcgtcatagcctgatcaacagaatgggaccttgttcgcggactccatcagggccagcagtctcaactgactgcatcaacaggccggacagaagactgcacccgaccaatgccactgcgtcaatttaccccttgcaacgcgggagccatccacagag

SEQ ID NO: 7936 - DNA, 1169 bp, unidentified
  source 1..1169: mol_type = unassigned DNA; note = element_c5eb6c0
  misc_feature 1..2: note = core
  misc_feature 3..209: note = LE
  misc_feature 210..1163: note = CDS
  misc_feature 1164..1169: note = RE
  misc_feature 41..215: note = bridgeRNA
cttgtattagcgcgaatcattacactgggagcgttccgtgaggaacgacccggcccgggtggccacccgggccgggtcgccgatcgtcggatcgtaacccaccgaagtcgcaaggactgctcttcgtagcgggatcgcgatcggctcttcatcggacccggatggttgaaggaaccttgggttcgcatcacaaggaagggtcgaggaagatgagcaagtatagcatgaattgcgctggcatcgacacaggcaagcgtaagctcgatgtggcgctcgacgggcgtgcggagcgattgcaggtcgacaacaatgctgatggccataaggcactgtcggcttggctgcggcggcatcgcgccaagcgggtcgggatcgaggcaagtggtggctacgagcaggccgtcgtggccgagctgcggcgcgaccacttccaggtgatcgtattccaacccgtgcaagtgcgggcctatgccaagtttcacttgcagcgggcgaagaacgacaagatcgatgccgctttgattgcggcctgtacggcagccgccaagaagatctacgccccgccggacccgcgtttagcgccattttccgagcatctgacgatgatcgagcagatcaccgaagacattgcccggttcaagacccgccgcgaatcctgtcgcgacccccggatcgggcaattctgggacgaggaggtcgctcgccttaaacggcggctgaggatcgagctcgagcaactcgtcgcagcaatccgtgagcaccgcgaccttgccgagcggcttgacctgattgccagcgtcgatggcgtcggcgagcgaactgcggtcgccatcctggtgcgcatgccggagatcggcactctctcccgcgagcaagccgccgcgctcgccggccttgctccctatgacgacgacagtggcgaccaggtcggagtgcgacacatcgatgggggtcgcgagcgcctgcgaaaaagcctctacgccgcagccctcgccgcatcgttccgttggaacgctcagctcggcgcaatgtacaggcgcctgctcgcagccggaaaggagcataagctcgcccttgtcgcctgcgcgcgaaagctccttatcttcgtcaacaccgtcgtcgcccgcggcaccccgtggacaaagaaaacagccccggtttaatggttg

SEQ ID NO: 7937 - DNA, 1381 bp, unidentified
  source 1..1381: mol_type = unassigned DNA; note = element_c5ec070
  misc_feature 1..2: note = core
  misc_feature 3..87: note = LE
  misc_feature 88..1119: note = CDS
  misc_feature 1120..1381: note = RE
  misc_feature 1150..1369: note = bridgeRNA
tgatgctgtggacggctcctccacccggcatgtgagtgccatggatgtgggtgctgttaaggctcccacgattcggaggagctagtcatgcaagcagtcacgacaatcggtctcgatattgccaagtcggtatttcaggtccacggcgtcgatagcggtggccaagtggtcctgcgccgtcagctgaagcggcgctacgtcctggctttcttcgagaagctgccgccgtgcctggtcggcatcgaagcctgtgcctcggcgcatcattggtcgcgcgaactgcaatcgcttggccacaccgttcgcctgatgccgccgacctacgtgaagccctatgtgaagcggcataagaacgatgcgattgacgccgaggcgatctgcgaggcggtcaccagaccaaacatgcggtttgtggcgaccaagacacgcgagcaacagagctgcctgacgctgcatcggacccggcacttgttgatccgtcagcagacctcggtgatcaatgccatccgcgcgcatcttgccgagtttggcatcgtcgcgccggtcgggcgcaatggtgtggagcaactgctcggcgtcgtcgccgatgcaagcgacaagcggctgcccgagctcgcccgtgcgtctgtcgctgctctcggcgatcaattgagggcattgaaggctcagatcctacagtttgatcgtctgatcatggcctggcaccgatccagtgaggcaagccggcggctcgacgatataccgggcgtcggtccggccctggccaccgctctggtcgctactgttgccgacccgcaagcgttccgatcaggacgtaatttctcggcctggatcggcctcgtgccaaagcaacactcgagcgggggcaaggaccggctcggcagcatcagtaaacgaggtgaccgctacctgcgcggcctgttcgtcgctggcgcgctcgccgtcatccgctatgccaagatccatggcaccaagcatcggccctggctcacagcattgttggcgcggcggccgacgaagatcgccgccatcgcgctcgcaaacaagatcgcccggatggcctgggcgatgatggccaggggcgaacgctacaaggaacccgtcgcacttgcggcgtaaacgagatcgcgccggacaaccggcgtgatgtgaaggttgggaggacgaacagcacgtaatgcagagccggtcgatccggcgatcaggacaacccaattacccccaagcattgtcgaatgcgggctgttgatcgggacctgatccgcggagggcattatggccagcggtcatgtgagccgcatcgaaaggccgaacacatggccgcaccgaccaaggctgcatgcgcgaagattcttcttgccaactcggagccgtccacaca

SEQ ID NO: 7938 - DNA, 1391 bp, unidentified
  source 1..1391: mol_type = unassigned DNA; note = element_c5f7328
  misc_feature 1..2: note = core
  misc_feature 3..88: note = LE
  misc_feature 89..1126: note = CDS
  misc_feature 1127..1391: note = RE
  misc_feature 1158..1377: note = bridgeRNA
gatggagtggatggctcccgctcccggcatcgcaatgtgccaaagtgtggattccatcaaggaccacgagcaagaggagccatccgccatgcaagttaccaccatcggccttgatctggcgaagaacgtttttcaggttcacggtattgacgacgccggcaccgtgattgtgcggcggtccttacgccggcgccaggtgatgcctttcttcagcaagctggagccctgtctgatcggcatggaagcctgcggcacgagccatttctgggcgcgagaactgcggacgatgggccacgaggcgaagctgatgccgccgatttacgtcaagccctacgtcaagcggggcaagacggacgcggccgatgcggcggcgatctgcgaggcggtggggcggccgacgatgcgcttcgtgccgatcaagtcggccgaacagcagtcggtgctggcgctgcaccgaacacgggacctgctgatcggtcagcgcgcccaactggtcaacatgatccgcgcccagttggccgagttcggcatcgtgctggcgaagggcatcgagcacgccctgcggctggtcgatcaactcgtcgaaggcgtcgcgcccgatatcccctcgctggcctgcacggtcttgatcgccctggccgagccggtcggcgcgcttcagatccggatcgccaggctcgaggacgagatcaaagcaaggctccaagacgacgaggcggccaggcgactggcgaccatacccggggtcggagccatcacggcctccgccctggccgcctcggtcaccgacccgaagcggttcgcgtcggcgcgccagttcgccgcgtcactggggctgacgccgagagccgattgcagcggcggccgcgagcgtatggggcgcatctccaagatgggcgaccgctacctgcgtcgcctgctgatcaacggcatgacgtcgcagctgcaagcggcgcggcgcaagcccgaggtttatccctgggtcgccggcctgctggccaacggcaagcccaacaagctggtcgctgtcgccatggccaacaaggcggcgcggatcgcctgggtcgtcatgacccgtggagagatctaccgctcgaacgggcccgcagcggagggaaccgcatgacgaattgatcgttcgaaagcacaagacctttcatcgatcgcgaggacgatgcgacgtgatggcgaaccggtcggaccggggatcggaacaacccgatcgatgtcctgggcgttcgagcccgctaagcagatagggacccgatccacggataccatcaggaccagcggttcagaaacaccgcgtcaacaggccgcacacaagaccgtacccgatttggccgccatgtcgtcaaaaagtccttgcaacgcgggagccatccacacag

SEQ ID NO: 7939 - DNA, 1579 bp, unidentified
  source 1..1579: mol_type = unassigned DNA; note = element_c5f7a71
  misc_feature 1..2: note = core
  misc_feature 3..263: note = LE
  misc_feature 264..1460: note = CDS
  misc_feature 1461..1579: note = RE
  misc_feature 22..283: note = bridgeRNA
ttggtactgtatatagtgtaaatactacccaagaaataaggttagtatttgcacttattttatttataattaagggagtaattggtctgacgacagctattttggattaataacatccgtttgagaaactgtcagccatcctttattataaaaattcgattaagcaggttgaaaccttagaggctttcgtgtaactaaccaaaatgaattctaataagtgtagatgggtacaattacgaaaaaaatatatctggaggtcacttatgataagtgtaggaattgatgtatcaaaagaaaaaagtacagtatgtatattgaaaccatgcggcgagattgttaaatctccatatgaggttactcatacagaaaatcatctattggaattaacatcattgataaaatgttttaatgaagaagtaagagtcgtaatggaagcgacaggaacttatcatttgccagtacttagttttcttaaagagcatggtatttttgtaactattattaatccactagtaatgaaaaaatatgcaagtatagttcttagaaaaggaaaaacagataagttagatgctataaagattgctagctatggaatagataactggtttcatttagttaactatgaatcaagtgaagatgtttataatgaactacgtcttcttggaagacaatacagtcactacataaaactcagggtagaaagtaaattatcattaacttcaatgcttgaccatacaatgccaggaattaaaaaaatgctacaaaatcgatctgataaacccgaaaaagataaattaaatgatttcgttgaagaatactggcactatgataacattgcagtaaaaagtaaggaacagtttattaatagttataaaaattgggcaaaaaagaagggataccaacaaagcgaagcgaaagccataaagatatatgacttggctcaacaaggaatccctactctatcttccaatgccccatcgaccaaaatgttagtattggaagctgttagagttcttcgtgaagtagataaaactcttgcattgattttatcacaaatgcaagaattagcaaagtctctaaaggagtatgctgttgttcgtgaaatgggtggagtaggtgacattattgcaccaagactaatagcagaaataggcgatatcagaagatttcatagcggaaaagctttaatagcatatgcaggcattgatgcgccaccatatcaatcagggcaatttaacggaacgcgaaggagaatatctaagagaggttctgctacattaagaaaaactggatttgaaataatgaaatatttaaaaattaataaacctgagagtaattcagtatatttatttatactaaaaaaagaggcggaaggaaaagcttcaaaagtagcaaaaattgctggattaaataaatttttaagaatatattatgctagaataaaagaagtatataaatagaatctaatttaataatcggaagcttggaccagaaaaatagctggtctaattagtatgcaataaaatataaaaaataattaaaaaacctgctataaaaagtattgactttcattagcagg

SEQ ID NO: 7940 - DNA, 1394 bp, unidentified
  source 1..1394: mol_type = unassigned DNA; note = element_c605eb6
  misc_feature 1: note = core
  misc_feature 2..92: note = LE
  misc_feature 93..1130: note = CDS
  misc_feature 1131..1394: note = RE
  misc_feature 1161..1386: note = bridgeRNA
taatggaatggacgcccccgtccgaaacggcgtcgccgtgtcaaagtggtgaggctgtcgaaccaccaccttaatcggaggagggcgtcaccatgaacgttactacagtgggcattgacctcgccaagtgcatcttccaaatccacggtgtcgacgagcgcggcaagccggtattgaggaaacaactgaaacggcaccagatggtcgcattctttgcaaacttgccagcctgcctgatcggcatggaagcctgcgccagcgcgcacttctgggctcgcaagctgcaggggcttgggcatacggtacggctgatggctccccagttcgttaaaccttacgtaaagacaaacaagaatgacgtggcagatgccgaagccatctgtgaggctgtggctcgcccgaacatgcgattcgtgcccgtcaagaacgttgaccagcaggcggtgctggcgctgcacagagcccgccaaggcttcgttcgggctcgtaccgcgcaggccaaccagatccgcgggctgctgggggaattcggcctggtggtccctcgggggatcacgagcatcgcccaacatgtaccccagctcatcgaagacgccggcaatgaactgccggggtcattccgtctgttgatgcggcgcctgatagatcacctgaaggaacttgagcggcaggtcgacgagatcgagacgcagatcaaggcgtggcatcacgcgagcgatgccagtcgccgattggcagagattccgggcatcggcccgattacggcgagcgcgctggttgcctcgatcggcgatgccaagtccttcagtaccgctcgacaactggcggcctggctgggtctggtacccaggcagcattcaagcggaggcaagccgacgctgctgggcatcacgaagcgcggtgatacttacctgcgtacgctgatggtgcacggcgcgcgggctgttgttcgctattgcgccaacaaggacgatgcgttctcgggctggcttcagcgtttgctcacacgccgacacaagaacgtcgccgtggtggcggtggcaaacaggaatgcccgaattgcgtgggcactgctcacgcaaggcaccgtgttccgatcggattacccgccgaccgcagtcgccgcgtaatcggatcgggtgtagttaaggctccccccaggaggttgcttgggcaatcgtgacgtgatggcaagataggttggaccgggatcggaatactctgccctcccacaggcgcttcgagcgcgaggtggtgattagagtccgatcagctgattccatcagggacagaggcatcgcagtcgcctcctcaacagtccggatgtatggccgcaatctcaatccgtctgccaatcgcgtacgactgccttgcaaaacgggggcgtccatgta

SEQ ID NO: 7941 - DNA, 1445 bp, unidentified
  source 1..1445: mol_type = unassigned DNA; note = element_c606d54
  misc_feature 1..2: note = core
  misc_feature 3..235: note = LE
  misc_feature 236..1438: note = CDS
  misc_feature 1439..1445: note = RE
ctcctaccatgaattcgtatagaatagtgtataattggttttatggaatgcggtattgttcatgagaaggcaggaggactcctttcttcctgggcgatagagccctcatttcagtatgtcccaagcctctttgagccataataggttggttggatcattgaatccttgtcacgctggaggattggcctggaggctgtattacctgctttagatatttctttgaggaggtgatgcgatgtcaggattaaagggtggttttagtggttttgtcggaattgatgtttcgaaggataagttcgatgtctgtgggattgcaggggatgctgtaaagctttttcagttttcagcgacgatggatcgcaagggttttgagatactaaaggaacatctggcagatatttccatcgcatctggtttgatcgggatggagtctacggcaacctatcatgtcaacctcttttcttacctgctctctgagggttacaacgttattatcatcaatcctctgttgatctccaattacatgaagatgcaactcagaaagacgaaaacggataaaaaggatgctgttgtcatagcccagtttcttcttgccaatggagagactctagttcaacggacggaaccgtccttcattgcggatcttcgggatctttctcgtcaacgggagagcctggttgacgagatgacatctctgaagatcggtattaagcgactcctgaacatgacttttcctgagctagaacatattacggatgtatttacgaagtctatgctgaagcttatacgacaatacccttctgctgttgctcttaaagatgcggaccttggtaaattatcccagacgttgattgcagattcctatgggcacaaacgagaggcatttgctgcggagttaatcaaagcagcgtgttcgtctataggcatcaacagtcccgccaaagaaaccattcttaaacaaaaagtaaccctgctccttcatctggaagatgccctgcaggagataaccagtatattgattgagatgagtcgaaaacagatggaagatgacataaacatcctgacttctataaaaggcattggggataaaaccgccgtgaattttctcattgagatgggtggcagcatcaatcagtttaaccgttccggaaaaataattgccatggctggattagatcctgctgtttaccaatctggtcaacatgaaggaaaaggcagaataacgaaacggggtaatcgtcatctgagaagaatcatctggctgatgacaaccaaagtgatgcattacaacggtatcttcagtgcttattatctcaaacgaagaaaggagggattaccctataagaaggcagtactggccactgcgcacaaattgatccgtgtcatctacgccatgttaacacaacggacaactttttgtccgcaggtaaattcatgatagttga

SEQ ID NO: 7942 - DNA, 1401 bp, unidentified
  source 1..1401: mol_type = unassigned DNA; note = element_c615a81
  misc_feature 1..2: note = core
  misc_feature 3..84: note = LE
  misc_feature 85..1128: note = CDS
  misc_feature 1129..1401: note = RE
  misc_feature 1167..1390: note = bridgeRNA
tgatgaggtggaacggcccgctccgacagcatctagtgctaaaacgtggtcgttgttcgaacgccacaaaggagggaccgttccatgaagtatgttagcaccatcgggctcgatttggccaaacacgttttccaggttcacggtgccgatattgcaggctcgcccctgttcaatcggaaactgcgtcgcggcgaagtgctgcgcttcttcgaaaaactgccttcatgtctggttggcatggaggcatgcggtggcgctcactattgggcgcgcgagatcgcgaacctcggccatgatgtgcgtctcattccaccagcctacgtcaaacctttcgtcaagcgcggtaagacggacgcggccgatgcggaagccatcagcgaggcggtgatccgcaagaccatgcgctttgtccccatcaagaccgccgaacaacaagcagacgcaatggtgctgaaaacgcgggctcttctggtgcagcagagaacgcagtcggtgaacgccttacgtgcacatctcactgaactgggcatcatcgcggccgggggccttcctagcgttgcggcgctgatgaccatcgtgcgggaaggtgaagatagtcgactgcccgcagcggcacgcttcgccctgatggcggttgccgatcagatcgacaccctggctgatcagatcttcaagctcgaacgtgccatcgttacggaggcaaagcgcgacgaagacatgcgccgcctgacgacgatccccggcgtcggcgtcatcaccgctgcgacgataaaggctctggttccggatcccggcggattcaaatcggcgcgccacttcgccgcctgggtgggattgacaccgaggccccattccagcggaggcaaggaacgactcggcgggatctctaaaatgggcaatcccgaacttcgtgttctcctggtcctcggggcgacagccgttctgcggattgcccggaacgatgatcgggcgcgcccctggctgaaagcgctactcgccaggcgcccgttcaaggtggccgcagtcgcgttggccaacaagatggcccggatcatttgggcgcttctgaataagggcgggatttatcatcgccctgagccgctctcgatcgctgcggttgcccgatgagggttatgaccgacaaaccaatctgaccggcgcaaggccggcagatgcaaggtgcaactacagacgatgaacccatgggacgaaatcccggaacgagtgaagccgccaacctcactgcacttaaagtgcgtggatgtgatttagctcctcgtttcgcggatctcatcgaggccagcggtcatgtaccgtgcttcaaggccgtacatatgaacgcaccgtccacgcgggtgaaatcgattgagaagctccttgcaccgcgggccgttccacata

SEQ ID NO: 7943 - DNA, 1785 bp, unidentified
  source 1..1785: mol_type = unassigned DNA; note = element_c61f66d
  misc_feature 1..2: note = core
  misc_feature 3..531: note = LE
  misc_feature 532..1479: note = CDS
  misc_feature 1480..1785: note = RE
  misc_feature 13..295: note = bridgeRNA
ctactataataaaattagtcgttaaatccatgacaagccagccatggtttacacgcacttgttacttaagctataatgaaagcagtgattggaataacgcacatcaccttgggacaccacgcccgtagcggagacagttatccatgctttcgttacagcgttcgattttgcaggtagagccattcgtatgcgctcgcatcaatcagtaggcagaataggtaacgaggaaagtgtggatttatcgatcacaaattcaaccagtaggagagatgattatgaacgcagttggaattgatgtatccaaagggaaaagcactgtggcagtgattcaacccttcggagttgtcatagctgaaccttttgatgtgctccacacagacagcggtttgaaagaattggtgaacttcatcaaatcactgtccggtgaaacgaaagttgtcatggagtacaccggcacatactatgagccgactgcaaatgcactccataatgcgggtatatttgtatccgtagtcaacccgttaatgattgatgactacgaacacaaaccgtgtcagaaaagtcaagacagacagaattgatgccttgaaaatcgcatcgtttgcacttgataaatggatgaaacttcgtgaatatactcctgtcgaaacagtgcgtaaaacgctacagatcatgaacaggcactgcattaagctgaacaagatccttgtaatgcaaaagaacagcctgatcgcactgctggactgctgttttccgaatgccaatacactgttcacttcgccgcgcagagagtcagacggtcatgagaaatgggtggattttgttctgaaatttcctcatgtggattccgtcgcaaagctctccttatctgcattcaagactaaatatcaaagctggtgcaaaaaggatcattacaattacagcgaatccaagtctgaacagattcatgcatatgcaaggacattggtcagcacgctgccgatgacagacgcagtcaagaaaatggtttctgactctgcaaagctcctcaattccacactcgaagcacttgggactcttcattccgaaatggattctcttgcatctcagcttccggaatacgagaccgtcatgaacctattcgctgtcggaaaagtaacctgttcacagctcattgctgaaatcggagatgtcacgaaactgaaaagcggtaaatctctggtagctctggctggcattgatccgccgccaaatcaatccggaaaagaagataaaaagtccagaagcatttccaagcgaggctctcctgcgctgcgaaaaacactgttcctgatcatgacagtctatctccaacggcagcctgccgatgagccggtataccaattccttgacaagaaacgcactgaaggaaagccttacaaagtttacatgatcgctgctgcccgcaaattcctccgcatttattacgcaagagtcaaagaggtaatgccggtgcaatagcatcatctattcattgattctgaaccggaggcaaaacacaggcacggctcagccgcttgaccttgacagaacatcataaaaatgctacaatggccgccccaacggtgactgacttcatctatccatgagttcttcaccgtcggcacgacacacagagcatttttatgatgttctgtcaaggttgccggtcggctaaaacttcatttcgttttttcagaccgcttcggcggtcttattgtcgtgcttttttcttctgtgaaagttatgtgaaactttctttttacctcttgacttttatttgcaggt

SEQ ID NO: 7944 - DNA, 1395 bp, unidentified
  source 1..1395: mol_type = unassigned DNA; note = element_c6213e1
  misc_feature 1..2: note = core
  misc_feature 3..89: note = LE
  misc_feature 90..1118: note = CDS
  misc_feature 1119..1395: note = RE
  misc_feature 1158..1393: note = bridgeRNA
cgatgagatggtctcctccccccttaaaatcggcgtcgcgatgcgccaagatggaagaaacccaccatccatcgaaagaggaggagaccatgagcaagattacgacggttggtatggatttggcaaagaacgtgtttcatgtggtgtgctgtgacgcccgcggcaagatgttacgcaagcggatgctgagacggggccaggttctggcgtactttgcgaagctggagcgggtactggtggggatggaagcctgcgcgggcgcccactactgggcgcgggaactggaggcgctgggccatgaggtgaagctgataccgccgcagtacgtgaagccgtatgtccggggcaacaagcacgattacaacgatgcgctggcgatagccgaagcggtggtgcggccggaaatgcgctttgtgccggtgaagaccccggagcagcaggacatccaggcactgcagcggctgcgggagcgctgtatcgctgaccgcacggccttgagcaaccagatacgtggtctgttgggggaatacgggattgttctgccgcagggggtgcacaccctgcgccgccggctgccgttgattctggaggatgccgaaaacgggctgagcgacttgtttcgtcgcctgttggcggagagctaccggcggctccaggccctggagagtcacattgaatttttcacgaaggaactggagaactacagccgccagaacgaggcggtgcgccgactggaggcgattccgggttatggtccggtggtggcgccggttttctacagccagatcggcgacggacgggcctggcgccgtggacgggatgtgtcggcgtccttgggggtcgttcctcgccaatacagcagcggggggaaggagcggctgcaagggatcagcaagcggggagatggctatttgcgcagcttgctaatccatggtgcgcggtcggtggtgagagcggccgaggggaaggatgaccggctcagccgctgggtcaaccggatccgggcggagcgtggctacaacaaggcggtggtggccatggccaacaagatggcccggattgggtgggcgatattgaggaacaatacggaataccaaccggactatcgtccggtttgatggcgggccgggcccgcgagtgccaatttgaagagttaacctgccgacgattgcgaagacgctgtagcgagcgatgacaaacaggtcagaccggcgtatcgataacctgcgacatccggaggctgaaacaagccgctagcccgatcaggacgatacgcgcagatctcatcgaggccagaggcgcaaaaagcctcacaaacaggccggatatacgagcgcaatcctgtccctgtcggagtttggtacaacgtcttgcaaaacgggaggagaccatata

SEQ ID NO: 7945 - DNA, 1544 bp, unidentified
  source 1..1544: mol_type = unassigned DNA; note = element_c62782f
  misc_feature 1: note = core
  misc_feature 2..501: note = LE
  misc_feature 502..1434: note = CDS
  misc_feature 1435..1544: note = RE
  misc_feature 42..258: note = bridgeRNA
cgtataatagaaaccatctcaaaggggtggttttcattatttctcctttccttgaaaagttatattgcgggagtagctacctgctttataatcagaacaagcactgcggatttgtatctatttttctacggctcagactgtttggaggtgactcaaaccgcagtggcttgtctgaattggtaatcagttgggtaacgcttgacgtttcatttgcgtgaatacatggacaaggcctctgcggaaacagcagtgctaaaatacagaaagaggaggaaaccaattgtactttgtaggaatcgacatttcaaaattcaagcacgactgcgccattgttgatgagcttggcgatgtcatcacaccctcgtggtcgttccagcatgactgcgagggattttctttactcttgatgccctcgatggagaaaagaagattgggcttgaagctaccggccattatgggcaaaacctgaaactgtttctcgaaaacaacggtttctcattcatggagttcaacccgcttctgatcaatcgattcgttcgcagcaaatcgctcagaaagacaaagacggattccatcgacgctctcatgatcgcccaatatctgatgacggtagagtacaagccctatccaccgtcattttacacgcttgaaaggctaaagtcactaacaagatttcgggacaacctgattcggcaacggagcaagcaactggttgagttgacaaacatccttgacaaggtcttccctgaattcaagccttttttcaagggaagattttcggcaacggcactgtatattctttcccattacgcttctccagagaaaatatccaacatgaattccaaatcctacgaaccattgcggcatctatctcgaggaagattctccatggtggattttgttgaactcaagacgctggtcagaaatacggtcggttcaacttgcgactatttgcttcaggaaatggagatcaccatcgatatttacaaccagctccaaagcaaggtggaggaaattgagttgcagatccatgactgtgtccttggtcttgatccttccatgctgactattccgggaatcggtgtagcttccgccgcggttattctttctgaattcggtgatctttccaagttcaacagtccatccaaactgctttcctttgccggaatggagcctggatattttcaatccggcacttcagaaagcactggaaagatggtaaagcacggttcttcccatttgcgctatgccatgatgaactgtgcgcagacagtgattaacaacgaaccgacttttgcggcctactatgctaagaaacgcgccgaggggaaaaaacaccgtgtcgctcttacccatgttgctaaaaagcttttgcaggttatttatacgctccagacaaaggaactgtcctataatccagatttcgttcgctgatctttgtccaccttgtttttgaagtcctcggaagagggcctggttttctgcgccctttttccgcccggtataatcttttcaattcgccctcgacttcttatagttggtca

SEQ ID NO: 7946 - DNA, 1421 bp, unidentified
  source 1..1421: mol_type = unassigned DNA; note = element_c636525
  misc_feature 1..2: note = core
  misc_feature 3..80: note = LE
  misc_feature 81..1112: note = CDS
  misc_feature 1113..1421: note = RE
  misc_feature 1193..1412: note = bridgeRNA
taatgagatggtccgccgcttgattcacccgcggcagcgggtgatcgaggtggcagcatttaagaaggaggatcatcgacatgcagattcactcggttggcatcgatctaggcaagacaacctttcatctcgtagcactcggggttgccggcaaggtgattgtgcggaagaagttcaaccggaagcagcttctggtctataccgcgaacgtcccggcgtctctgattggacttgaggcctgctctggggctcactttctcggacgcgcgctgcgcaagcaaggtcatgatgtccggcttatcccagctcagtttgtaaagccattcgtgaagtcgaacaagaacgacttcatcgatgcagaggcgatcgcggaggccgtcgagcggaagaacatgcgttttgtcccgatcaagaccgatgatcagctggacctgcagggtatccaccgggtccgtgatcgcctgatttgccggcgcaccgcggtgatcaatcagcttcgggcatttctgctcgagcgcgggatggtttttgcgcacaggccagcgaatctcaaggctgccatggcggacattctggagaacgccgaagcggacctgacgccgcagatgcgaagcctgatcaacatgctctgggatgagtggaagctcgttgaagagcagatcaaaaaactcgacctggaactggaacggatctcggccgcggatgccggatgcacgcggatacgtcagatcccagggatcggacccgttgtcgccactgccatcgttgctgccattggcaacggcgccgccttccacaagggccgggacttcgctgcctggctggggatcgtgccacgccagtactcgactggaggtaaagcgaagctgctcggcatcagcaagcgcggcaacatctatttgcgtaagattctgattcacggcgcaccagctgccgtgctacgcatcaagcgcgaccgagcaccgatcgggccctggctcgatgcactcgatgccagagctcccaaaaatgttgttgtggttgcgatggcaaacaagctcgcgcggatcgcatgggctgtgctgtcgagcggagaagactaccggccaatggggaatactgttgccgcatgagatagtgcggaaaagacgcctgcggcttggaagcgctgacgcgctcccactttcccgcactacgacgacggattgaattcacccaccgaggtctgcacaggaacagcgaagacgaacgaacagtcaaaacggcgtgcctgaattctgatgtgacactgtggtcttcacgaccgttcggctagttagaacaggcacgcgcggaactcatcgtggccaggagaataatctccatctgaaggccgaatacatagacgcagactgctcccgtcgtcctcaatgtccccttgcattcatgcggcggaccataca

SEQ ID NO: 7947 - DNA, 1182 bp, unidentified
  source 1..1182: mol_type = unassigned DNA; note = element_c64226a
  misc_feature 1..2: note = core
  misc_feature 3..204: note = LE
  misc_feature 205..1167: note = CDS
  misc_feature 1168..1182: note = RE
  misc_feature 6..209: note = bridgeRNA
cttgtatcttctacctgaccaccgcggtaaagtctgacagcccttgaggcagccagaccggcccgtgcagtttggtagcgacttgggtattcaagcccgtccctgagtacacaacgcacgtgtgccacgctggtcttcattgatcccgaacggttacgcgcgccttcgctgagcgcgcatgtacaagcatgggagttgaagatcatgtctgctttgtcagtgacggtgggcatcgacgtggccaaggcccacgtggatgtctgtgtgctggactccaacggcgctgtccagcggtttgccaacgatgccgatggccactcggcgctggccgctgccttgcagcccttgggcgtagggcttgtggccatggaggccaccggtggctatgaagcagccctggcgtgtgcgctgcaagcctcgggcctgcccgtggcggtgctcaacccgcgccaggcgcgggactttgccaagagcatggggcgcctggccaagaccgatgcggtggatgcgcgcatgctggccgagatggcggcggtgctcgtgcgccgtgaggacctggcgcgctttgttcgccccctggccgatgaatgccagcagtggctgtctgctctggtcacgcgccggcgccagttgctggccatgctgggcagtgagcgccagcgcctgcagatcaccccaagaaagctgcacccgagcatccaggccatcgtcgctgcaatcaaagcgcaactcgatgacttggaggcgcagatggtgggccacgtgggcgagcacttcggcgagctcgaccggctgctgcagtcggccagcgggattgggccggtggccagtgccacgctgattgcgcaattgcccgaactgggccggcttaaccgccgcgagatcgcagctttggtgggcgtagctcccatgtccaacgattcgggcaaccgaaaaggccgccgcagggtgcaaggcgggcgctttgagatacggcgtgtgctgtacatggctacgctgactgctgcgcgctacaaccctgccattcgggctttctacgaacgcctcaagggtgccggcaagctgcccaaggtggccctggtggcatgcatgcgcaagcttctgaccatgctcaacgccatggtcagaacgggcaagccttgggatgcttcgcttcatagggcttgactttgaagacagtta

SEQ ID NO: 7948 - DNA, 1507 bp, unidentified
  source 1..1507: mol_type = unassigned DNA; note = element_c64510a
  misc_feature 1..2: note = core
  misc_feature 3..204: note = LE
  misc_feature 205..1482: note = CDS
  misc_feature 1483..1507: note = RE
  misc_feature 6..204: note = bridgeRNA
ctgatggctctaccctcccctcttgaggtcttccctggggaacgctttcggtgcttgtccctcgaggactgacgtgagacggcgtccccgggggacggcctcggaggtccgacgtccacaagggtgtcgtcctacgaggactggtccatcagcacgacgccgagcctccatcgaccggacttcctcatgacgaagggaggcgatgtgctcggagtcggtatcgactggtccgaggagttccacctcgtcgcgctgggccgtcccggcgatggcgtgatcgaggtcgtgcgcgtggagcacacccccaaagcggtcgacgcgttggtgggcacgatcgcgggcctcgagcccgaccccggtgaggtgcgggtggtgatcgagacccgccacgggctgctcgtcgagcgcctggtcgacgcgggctttgtcgtggtcccggtcaacccggatctcgtggcgcgcaggcgcggaccggccaagaagaaggatgacgccgaggacgcccggatcgcatgcctcatcgcgcttgaccggcacgaacggctgcgcccgctcatcccccacggtgagatcgcaggtgagttgcgcgctatcgcgcgtgatgacgagcgggccgcccgcgacgagcgcaggctctccaaccgcttgcgccaggacctcatctcgaccttccccgcggcacttgagatcggcggcgatgatctgggtgcgctgacgttcctgcggctgctcgagcgctggccgacccacaacgcgcttgcaggagcaccgaggaaggagctcgtggagttcgcccgctcgtgccgccacgggtggccggaacgcttggcggacgaggtcgaggccgcgctcggggacgagcacttcaggcccaaggactacctggtgcgagctaaggccgacaccatccgcctggccgcgacccagctgctgttgatcggtcagcagcgaaggagctgggagcgacgcatgggcgagctcttgctgggtgcacctcggcgagggcgagaccaccagccgaagggagacggactggggaagggctttcctggcggcgagatctacctgagctttccgggcctcggtgaccgcctcgccgccaggatcgccggcgagatcggcgatcatcccgaacagttcgatgagccgaactcgctgcaatgctacgcgggcaaggcgccggtgacgcggcgctcgggcaagtctgagctcgtcgtggcgtgccgcctcgcgcacaaccgctacctcggagatgccgtccagcagtgggccttctgctcgctgaggcgctctggctgggctcggcagttctacgacgcccagcgggcccgaggcaaaggacaccaggcggcgctccgggcgctggggaaccgctggctcgagatcttgtggcactgcgtgcgccacggagtcctctatgacgaagccgtccacgtggccaaccggaaccgtgccttcggaatggcgggcgaggccgcctgagcaggtggtggttgacaaagggtgt

SEQ ID NO: 7949 - DNA, 1227 bp, unidentified
  source 1..1227: mol_type = unassigned DNA; note = element_c6457e1
  misc_feature 1: note = core
  misc_feature 2..224: note = LE
  misc_feature 225..1196: note = CDS
  misc_feature 1197..1227: note = RE
  misc_feature 45..213: note = bridgeRNA
tcttaagttagcattttaataaaaaggttaaattaagcaatataaattagaaagcacagaagagaggattaaggttattatatacggagagactattgatctcgtcaacattgaaaatcccctctcttttctacacagatttcgtacagttttatgaggcttcagacctcgattttaagtcgttgaaacttgcgtaggttgtcctttcgttaaaacattttcttatgaataaagatattaaatattttggaatagacattagtcatttagtatttgatgttacagattcttctggtaattactatcagtttaaaaacaatgtaactggatttaaaaaatttgtaaaacatctagattacaatagtcattgtgtaatggaagctacaggttattaccattacaggttggcttattttttacaggaaaacagtataaaagtttcagtagaaaaccctctgtcggtgaaacgctttatccagatgaagttatcaaaaataaagacagataaaagcgattcaagattgatttgtgagtatgcaaaacaagttgaattaaagttatggcaaggtaattcaaaacatcagttagaatgcttacaaatgacaagacttctttctgtgtatacaaaacagagtactatgttaaaaaacaaaatacatggagaagaagttttgggcaatccaagtaaagtagttacgagctcattaaaaagtagtttgagacaggtaacaaaacaaatagaaaaggtagaagcagcattattaattttagtaagaaagctacatcaagatgttttaacacgcttaaaaacaatacctggaattggaaataaaacagcgctaatgctagttgttttaacagatggatttgatcgttttaaaagcggaagtgaattgtgtagttatgctggattaactcctgtaattagacaaagtggaagtagtataaatggacgagccagaataagtaaaataggcaaccagaagcttcgaaatttattatttatgtgcagttttaatgcttgtaaatacaacaaggcttgtagagaaatttatgaacgaatagttgccaaaggaaagagtaaaaaattagcattaatagcggtgtgtaataaactattaaaacaagcatttgccattgctaaatcaggattaatatatgatgatacttatagaagtactttagtgaatatttaatgagtttttacttgttttttaccacagtact

SEQ ID NO: 7950 - DNA, 1162 bp, unidentified
  source 1..1162: mol_type = unassigned DNA; note = element_c64900f
  misc_feature 1..2: note = core
  misc_feature 3..208: note = LE
  misc_feature 209..1150: note = CDS
  misc_feature 1151..1162: note = RE
  misc_feature 12..214: note = bridgeRNA
cttgtcttatgactttccaggccgtttggtccaataagagatgcccgatctgggatggccatcccagatccggcgggaggggatggatcggagttgtctaggtcgttgaggaccgtcgattagtgtgatcacccctttcttttccatcaggcctgaacggaaaccggggcgtttgggcccggatgacaagaataggacagcggaaaagatgagcgataccctaccacaaaccatcggcatcgatatctcaaaagcaacactcgatgctcatgcctatcctgcaggcagcaaccagcagtttgccaatactgccagcggccataaagcctggattgcatggctggggcgatggtcagtcgaacgcgtggcatatgaggcgactggtgcttaccaccgggaacttgagcaagctctggctgatctgccttgcgtcaagctcaaccccgctcgtgcgcgacgctttgctcaagcagctggaaccttggccaagaccgaccggatcgatgcagtgatgctggcccgcatggctagcacaatgcagccgcccgtgcgcccggctataaaccccgaacaggcaaggctggccgaacttatcagcgcccgcgatggtctgatgcgcgacagaaccgcgcttaaaaaccaggagaaaaacctgacgattccgcttctaaagcgtcagcacaaactacgcctcaatcagatcgatcagcatataatcgctctcgatgccgagctcgcagcaagcattgcggccgatccgcaacttgcccgccggcatgaaattatctccagcatagctggcctcggcccacgcactgccaaccagttggtcgccataatgccatcgcttggatcactcgataacaaacaggccgcatccctggcaggactcgctcccgtcgcccgccaatcagggcaatggaaaggcagaagcttcatccagggtggaagggccaacgttagacgcgcactctacatgcccgctctcgtcgctgcccgctttaaccctgacctcagggaaaagtatcagcacctcattgcatcgggcaaaccagccaaaatcgctatagtcgcggttatgcgcaagctcctggtcaccgccaatgcgctcgtcaaagccgatcgcatctgggtcgaaaaacgtgcttgatcacaacggaaa

SEQ ID NO: 7951 - DNA, 1709 bp, unidentified
  source 1..1709: mol_type = unassigned DNA; note = element_c64f0a5
  misc_feature 1..3: note = core
  misc_feature 4..248: note = LE
  misc_feature 249..1463: note = CDS
  misc_feature 1464..1709: note = RE
cttatacattaaactaagaacaagccctctcgacacagggctggagcaagagtacacttgctcgatgaaacggttgaacgcgtcggggaaagtctatcagttccatacggctcgaccgattgagaaagctcgtactttcccgacgttgttcctgagccgaaccggtcatgagagagtcgcgctttgagcgccacagtataagggcacgggagctcaggaatgtgtgttggtacagaaggagtctttctatgttctatgcgggtatcgattgggcagaccaaaagcatgatgcactggtgcttgacgaagcgaatcgaaagctcggtgcgatccgggtggcccatagtccagaagggcttgccaagctggatgcctggctggcacaactgcttggtcagcagaccaaagatcagatggcctgcatcatcgagacaacacatggcttgctcattgcgtttttgttggagcatgactggccagtctatccggtcaaccctcgcaccgttgatcgaaagcgttcggcctcgggagccaaaacggataccattgacgcctacttgttggccaagacaggacgtgcagatctggccgatttgcaccgtctcacccctgatagcgagcaggtggccgagctgaaactgctcacgcgcgatcaatcggccttgatccagatgcaaacgcgtttggtcaatcagctcaccgcttgtctgaaagcgtattatccggtggccctggagttgtttaccaaagtgcaacaaaagagcaccttgctgttcttgcaaacctacccgacgccccaagcggccatgttggcatcggtagagcagattaccaccacgctcaagcaggccaggcatccgcaagccaagcacgtcgcccagcagattgccgagcggctcaagcagccctacctggtcgccaatgcggtcacgaccagaaccaaatcgcgtttgatgctggtcctggtgagtcaactggtgccactgctcgagcaaattgctcagtacgataaggagatcaacgccctttttttgacccatcctgaccatgcgctctttgagagcttgccacgtgcaggccagcgtttggccccgcgactgctggcggaaatcggggatgatcgcagtcgctaccagcaggccagcagtctgcaagctctgggaggaacttcgcccgtgctctttcaaagtggcatgtactccaaagcgcatcgtcgattgggctgcatcaaaccgttgcgcaatgccttgcagcaatttgcctggcagagcacgcaaagtgagccgtgggccagggactattaccagcgcaaacgagcagaaggaaaaagccataccgtggcggtacgagcattggcgaatgtgtgggtgaggatcatctttgctatgtggcagcatcaccaatgctaccagacggccacctttgagcaagcacaacaccagcatgcacgccgagctgcttagccgcttgtgatggtgctgcatcctttcctggcgagcaaaaaaccctgctgtttttcgcctttcaactcggcatgtctttttttgaccacgcaagccaagccatgtcaagggaagcgaagcggcttgacatggcttggtggcgtggtagactccttcatgccgtgttgaaatcattgccctcccccctgtgttctcagttttttctcctgctccaaattggttcccaaaaggcttgacatagagagt

SEQ ID NO: 7952 - DNA, 1363 bp, unidentified
  source 1..1363: mol_type = unassigned DNA; note = element_c655f51
  misc_feature 1..2: note = core
  misc_feature 3..75: note = LE
  misc_feature 76..1101: note = CDS
  misc_feature 1102..1363: note = RE
  misc_feature 1077..1351: note = bridgeRNA
cgttggggtggacgccccctgacggcattgatgtgccagagtggaggtgttgaagcaccactgcaggaggcgtccatgggtgaggttagcacaatcggcattgatctggccaaatcggttttccaagttcacggcgcggatacgagcggcgcggtcatgatccgcaagaagctgcggcgtgacgatgtcctggcgttcttctcgacgttgccgccgtgcaccgtggcgatggaggcatgtgcaagcgctcattactgggctcgcgagatcgccgcattggggcacgacacgaagctgatcccgccggcgtacgtgaagccgttcgtcaaacggcagaagaacgacatggctgatgcggaggcgatctgcgaggcagcgcagcgcccgacgatgcggttcgtccaaggcaagagcgcggaagcgcaggcatcggcggtggtgttccggacgcgcgacctgctcgtgcgccagcgcacccagctgatcaacgccttgcgcggccatctcaccgagttcggctacatcgttcgccagggtgtcgggcacgtcggcaagctgatcgacatcgtcggcgactctgcatccgacattccggctcaggcgcgtcccatactggtcgtgatcgcgcaaggactgaaagcgcttcagacgcagatcgccctgctcgaccgcgaaattgcgagccgtgcgaaagctgatcccgtagcgaagcggctgatgacgatccccggtgtcggcccggtgattgcaacggcgctggtggcgctggcaccagctgccagcaccttccgtcgcgggcgtgacttcgcggcttggctcggcctcgtaccccgacagcactccagcggcggcaaggagcgcctcgggcggacaacgaagatgggcgagcgtagcttgcgcaggcttctgatcatcggcgcgagctcggtgacgaaggttgcggcgcgcagtcctgataaagccggcgcatggctggccggcatgctggctcgcaagccacgcatgttgatcaccgtcgcgctcgcgaacaaaatggcgaggaccgtttgggcgctgatggcgcacggcggatcgtacagagctccggccgtggcggtatgaccgcccaggcttgaggcgtcagggacgcaaggaaggtcagtagagaggtatggcgcaacggtcagaagacgggatcgggaaaaccagtgaaatgtccgagcgcctcgagcgcgcaacttcggtctggacccggtccgcgatctccatacaggccagcagccgtgatgatggctgcatcaacaggccggacacacggaagcacctgaacccgcgctatcaaatctttcgaacacccccttgtttccgaaggggcgtccacaca

SEQ ID NO: 7953 - DNA, 1588 bp, unidentified
  source 1..1588: mol_type = unassigned DNA; note = element_c65a911
  misc_feature 1..2: note = core
  misc_feature 3..252: note = LE
  misc_feature 253..1425: note = CDS
  misc_feature 1426..1588: note = RE
  misc_feature 3..222: note = bridgeRNA
ctcgtattatatagtcatacccattctttaccttatctacaggtttgggtatgctgttaaagatgctgtggattggtttttttctcctaccactcgatggttcacgaaaggctccaaccacagtctctttgtttaattgttaatcagttagataccgcatgacggtttatgtagaacgaggttacagcatacaaagagccctgtggatcttatagcagctgcatcaaatactatttaaggaggatcacatttatgatctatgttggtatcgatgttgccaaggacaagcacgactgctgtatccttgatgacgaaggcaggaaggtgtatcccgtcttcaccatctcaaatgacaaggtcggttttgatgagttattctccagaatcgagaaagtgacttctgataagacagaaataaaagtaggtcttgaagctaccggtcactattctaacaatcttctggcgtcgctcgttgataaaggtttcccgaccgttgttatcaacccgctacacacgaatctttacagaaaaggtctaagccttagaaagacaaaaacggataaagtcgatgcctcttcaattgctatgatgttgatggccgataggactctcaagccctactcggaaacatcatatcacaacgaagagttgaaatcattaacccgttatcgctttgacaaggttcatgaacgatctaaactcaaggcttcattagctcggcttgtgaacattctctttcctgaattggaaaaacttgttccatcactgcaccttaattccgtctatgtacttttggaagaacttccgggagccacttacattgcaagctgccatctgacccatctcaaaaagcttcttgaggattcctccaagggccgctacggccgtgataaagcgattgaaatcagaaatgctgctatcgattcgattggtgctcctatggctgcaaaatcaatggaattagtacataccatatatctcatacgcatactatccgaagagattgaagaaatcgaagaatccattaaatcgattatggatgaactgcattccccaataatgaccatccccggaataagctaccgtatgggagcaatgatccttgccgaagttggcgacttcaagcgttttgataatgcggataagattcttgcatacgctggtttgtcaccgtctacatatcaatccggtcagctcgattcttcctattctcacatggagaaacgtggctccagatacttacggtatgctctttttaacgccaccaagtttgtctgtaaatgggatgaatccttcggcatctaccttggaagaaagatatccgaagggaaacactataacgtagctgtatcccatgcgacaaagaagttgatccggaccatttacagaatggaacttactggagcaggatactcaccaagataatactctgatataccttttctgtttgagcacccgataggatgctctgtttgtcatgctattttcaaggaactgattgccgggaataagtcccgaccactattcaaatcgcatttctgcgtttggatcaaaaacatcattttctacttgacttctaatagttagt

SEQ ID NO: 7954 - DNA, 1386 bp, unidentified
  source 1..1386: mol_type = unassigned DNA; note = element_c65b6fc
  misc_feature 1..2: note = core
  misc_feature 3..87: note = LE
  misc_feature 88..1116: note = CDS
  misc_feature 1117..1386: note = RE
  misc_feature 1087..1373: note = bridgeRNA
agatggagtggttgccgccctccccaaacggcatcgtaatgtgccaagaaggtggtctaagcgccacaagttaggaaggacggcaatatgagtgatacaataatcggggttgatttggcaaagcgtgtttttcagcttcatgcaacagatctggttggcaatgtaaaattccgtaaaaagttaacgcgagaacagtttcaaaaggtgatgtcggagatgccagcatgcacggttgtgtttgaagcttgcggtagcgcgagttactgggcacgggaaatggaaggtatggggcactgcgccaaattaattgcgccccaatatgtgaagccttttgttaaacgtcagaagaatgacgcggcagacgctgaagccatcgcgattgcagcgcgccagcccgaaatgcgttttgtggccccaaagacagcggagcaacattcgaaagctgtattgtttcgggggcgacaacgccttgttcatcagcgaacggaattggtaaatgccctgcgcgcaacattctatgaatgtggccatattttcccaacaggccttggggcactcaaacggatgggtgagcttgtgaaaggtccaagctgcgatttgcctttgttgatcctatctgaatgcaaggatatgttggctcaaattgatgagacgacgaaaaggattaaagcaaagaactcgaccataaagacgttggctgctgaggcaggcaccgcgcgctgcttgcaaaccatgccaggtgtcgggccgatgacagcgctagctgttgaagcgtttgctcctgacatggggcagttcaaatgcggacgagacttttctgcatggctggggcttgtcccaaagcagcactcatcggggggcaaagaacagcttgggaaaatgtcaaaggctggtcaaaatgatatcaggcggcttttgatcaccggtgcgatgtcgcgcatcgtgggtcgggcgaggcataacattttacccgagagctggatcggccgcatgttggagcgcaagtcactgatgctggtggcgattgcgctggccaataagatggcgcggcagctttgggcgatgttgattaagaatgaagattacagagatccgtcgctggctgttgtggtataaaatacacgcaatgagcaatcagtgacggtaaagggagtgtgagaagacgatgacctgaatgggcaaaatgatcgaacagatctggatgaggaaaaccagtagagcgctccgagcaacgagctcttttgtgagatttggaccttatccgctgataaccataccggcccgcggcttttgaaaacaccgcatatggaggcctgacagaagaccgcattcgatcactcctaattaggctcaaaaacttcttgcattatgggcggtaaccacaga

SEQ ID NO: 7955 - DNA, 1462 bp, unidentified
  source 1..1462: mol_type = unassigned DNA; note = element_c65d81f
  misc_feature 1..2: note = core
  misc_feature 3..138: note = LE
  misc_feature 139..1185: note = CDS
  misc_feature 1186..1462: note = RE
  misc_feature 1229..1458: note = bridgeRNA
agatggcatggtccgcccacccaaacagtgttgccgctgaagtgaggtaaccccgcagtcaggtggggcctcgcagaaacggcatcagcgtgccaaagtggagattctttgcaaccacttaaacctggaggccccaccatgcaatctaccgcaaaactacccgtcattggtctggatctggccaagtctgtgttccagcttcacatcgttgatatggattccggcgagatccaacgccgccagatcaagcgtgccaagctcaccgatttcttcgccaagtgccagaaaagccttgtcgcgatggaggcttgtgccagttcccattactgggcacgcactctcatttcgttgggacatcaggtcaagatgttcccagcccaacatgtcaaagccttcttgttgcgtgacaagaccgatgccatggatgcgcaggcaatctgggtggccgcccagcagccgcatatcctgcctgtacccgtcaagaccgagcgccaacaagcctgtctggctctgcacggcatgcgccgccaactcatgaagatgcgcatcatgcaaaccaatgcgctacgcggcatactggccgagtttggcattgcgctgcctgtggggcacaacaaactgctcaagtcgatccacggcgagttggccaaggcccagcaggctaacctgctggcggccgacctggtggtcagcgttcaggagcagctcaaacgcattgatgggttgcagcaagacatcgagcacatcggccagcggctgcgcaccatgatccgggaggatcggcagatgcaggcgatccaacagattcctggcgttggggacttgacggcctcagcgttggtggccgcagtcggggacttctcggcattcaaatctggacgccagtttgcgtcgtgggtggggttgacgccaaagcaggttggaaccgggggaagaacgcagcagctaggtatttccaagcgaggtgatacatatctgcgaaccctgttgattgcgggtgccagagccgtgattgccatgtcggagaaatcgagttggataacgcggttgctggagcgccgccattacaacgtggtggtggtcgcgttggccaacaagatggcgcgtactgcttgggcggtcctggccaaaggcgcagcctttgaccaggtcaagtggaatcccatcgaacaagtgggtagatgatccacgacatctcggcatccaaccatttaagggggaagagaaaaaccgttttgaaggagagcatgcaataagcgcagtgatggaatgaaggccaaaccaggtagggggtattccggtgaatgactcgtactttgagtacgtgaagcagataggaaccccgaccgcgaatagccatcatgggcagcagcaccaactgcacaaacagcccggatgtaaggcagcaaacctttcaaactatcactacgacgaaacttgctttccttgggcggaccatgta

SEQ ID NO: 7956 - DNA, 1636 bp, unidentified
  source 1..1636: mol_type = unassigned DNA; note = element_c6823e9
  misc_feature 1..3: note = core
  misc_feature 4..260: note = LE
  misc_feature 261..1481: note = CDS
  misc_feature 1482..1636: note = RE
  misc_feature 1..227: note = bridgeRNA
cccgttaccttgatcgtgtctccgtaagctcggggacaggtcactggcctcggtatggctaattcgccctgttgttctacatcatgatccggggggtgttgccgccgaggaaccaggacgcacgccgacggctaatagggacgcggctcgccaactcctcaggtgaagtctcttcgtaacgtgggtgcccgcgacgagtgtctgaccagtgatcttccaccaccgaacacgacctccccactccaaggaggggaacgatcatggaagacaccatctacgacatttacctcggattagatgtcggcaaaaccgcgcaccacggcgtcgcgatgacaatcgacggcacgacggtctacgacaaagcgctaccccaggacgaagccagtctgactgaggtcttcaacaagctcacccaacacggcgacgtgctgctgatcgtcgatcagccgaacaccatcggcgccctgcctgtcgctgtggcccgcgccaacggctgcggggttgcctatctacccggcctggcgatgcgaaaggccgccgacctgtaccccggacaagccaagaccgatccccgcgacgcgttcatcatcgccaacaccgcccgaaccatgccgcacacgctacgggttgtcgaccgcgacgacgaggtcctatctgcattgaagatgctgtccggcctggacgatgacatcgcccgcgactgcacccgcacgatcaaccgactgcgcagcatcctcgtgcagatctacccgtccctggagcgagtgttcgccggcgagatgctgcaacggaccttcgtgctggacctgatgatccactacggcgggccgaccaagttgaagaagtccggcaagaaacgggtcctaacctggtcccgcaagcacgcgaagaaggatcccgaggccctggtcgacgacatcttccaggcgctggacgcccagacggtgaccgtgcctggaaccgacgctgctgaagtcgcgatcggcatgctggcgaccaacatcaaagccctgaaggcccagcgtgaatccatcgccggccaggttgaggagatgctcgacgacttccctcttgccgaggtcttgatgtcgatgccgggagtcggcatcaagactgccgccaacattctcctggccgtgggtgactgttccgactttcccgacgctgcgcacctggctgcctacgccggcatcgccccggtgacccgaagatcggggacgtcgatccgcggtgagttcccggccaggtcgggaaacaagagactcaagaacgccctgttccgatccgcatgggtcgcttcgacctgccatgaagcatcgaagctgtactacgagagaaaacgggccgaaggaaaaagacacaatgcggcggtgatgtgcctggccagacgacgatgcaacgtcatcttcgcgatgctcactcgtggcgagttcttccgcgaactaccggcccgcacctcacaggaggtggctgtggcctagccttacccccgcgccatcgggaccgcacgccaggcgttcaaccgttcgcaacggttgaacgtccacgcccgcatgttcgaccgtcgtaactccgaatactcgggcagtatggacaaaagtcgagtgcaggggttgacgaactacatagggacacc

SEQ ID NO: 7957 - DNA, 1647 bp, unidentified
  source 1..1647: mol_type = unassigned DNA; note = element_c68cc86
  misc_feature 1: note = core
  misc_feature 2..308: note = LE
  misc_feature 309..1484: note = CDS
  misc_feature 1485..1647: note = RE
tggtatatacaaattaagctcatccagctaagcaaaatctgtatacatctcctttcccatccggcttagtatcggcccggatcaccgagtagaattgagatcgtgaatgcgtacctgtatctgatagctttgtagctttgactacgtgaggtattatctggccgcttcgttgtatggaaactgcaattagttagatgagcccttctttctctggagtgagttcacatttcgcaccatattctctgatacttctgaaacggcggtactggtattcgtcacatccattgatcgaaaggagtatatacatcatgatcagcatcggtatcgatgtcggtaagttcaaacactgtgctgcagtgcttgatgacaggaccggcgaagttctcatcaaacctttcttcttcagtaacgatcaggaaggcttcgaactcttctattccaaggtgaagcgatatgttcatcgcaagcatgcggttggaatggaagacaccgggcattacatgatcaacctcaccaactttcttctcgaaaagaaactctctgtgaagtacatcaatcccagaaccacaagtatgcgtcgcaaagaacttggcaggtccgccaagaacgatcggaaggatgcgaccctgatcgcagagatgttaagcgagaagaagttctggagatctatttccaagacttccatagaaacatccaaactgcgtgaactgacacgtctctaccatcagctccaagaacagcagaatcaggatatgaaccggctccagcgtgctctggacatcgtctttccggaagtgaacgagctctcctggacccgctattccaaggcttatatgcaattcctggcagcctattccagtgcttcatcaattgcctcagaagatatccgtaatctccgcaaagctctcaaaacagaaggcagaggccggcagtgtaaagtgaccgttgaagatatcaaggatctggcaaaacgctctgttggtgacgataacttcgctgttgaactggaagtgaagtccgtcatcgccatcatcaatgccagaaatgaacagatacatgtcctggaaaagaaaatagaagaattcagccgccagctaaactctcctatcatttccattcccggtatctcgcacataacaggaatgactattcttgcggaaatcggtgatatcaaagactatctggaagcggcgaagctgatatcttatgcaggaatggagcctcttgttcaccagtccggcatatacgacgctgcgcatatgcccatatccaagcacggctcaaggtatctgcgcaaagccctgtatcaagccgtcttcacagtctgtaaatatgatccgaccttccaagcctattatacaaagaaacgcaatcaggggaagtctcacagatgtgcacaaggtcactgtgtacgcaaacttctccgggtgatatacaagcttctcagtaacgacctgtcttttgacgcaagtctgattcattaaccgaattaccaatctgtaataattactcacataggcaaagctacaaatgtagttgttttaactgtacgctattcacgatttcaaagaacattttctaagatctgctggatttacattaaatctcagattttagtcaaaatcacttgacttccttatagttaaa

SEQ ID NO: 7958 - DNA, 1377 bp, unidentified
  source 1..1377: mol_type = unassigned DNA; note = element_c68ce10
  misc_feature 1: note = core
  misc_feature 2..78: note = LE
  misc_feature 79..1116: note = CDS
  misc_feature 1117..1377: note = RE
  misc_feature 1120..1365: note = bridgeRNA
atgatggggtggacggccccctacggcatcagtgtgccagaatgaggttgtcagacactcatttcacaggagccgtccgtgagccagattatccgcattgggatggacacgtcgaagtatatttttcaactccatggggtggatgcgtcggaacgggtcgtgttgcgcaagcggcttggccgcaaggcaatgctcgagttttttgccaagctgccacccacggtggtggcgattgaggcctgcggggcagctcacaacttggcgcgtgagctgagcaagctgggacacacggtcaagctgatcgcgccgcaactggtgaagccctacgtgccgcgcaacaagaacgacgggcgcgatgcggaagggctgtgcgaggcggcaagccggccgcggatgcgatatgtcccggtgaagacggccgagcagcaggccgcgctgatgctgctcggcgtccgcgaccagttggtgagccgacgcacgcaactctccaacacgatccgcggtcatgcggcggagttcgggctcaccacggcccgcgggctggacaagctcgccgcgttcctggccgcgatcgaacaggacgaacgtgtgcccgtgttggcccgcgagctttttgcgatgcttgctcggcaatacgatcaggtgcaggccgagcttaaggcgatcgaggccaagctgctggcctggcaccgtgccgatgccacaagccggcgcctggcgcaggtccctgggatcggtccggtcacggcggccgcgctagtgatgaaggcgcctgacccacacgccttccgttcggggcgattgttcgcagcctggctcggcctgacgcccaaagaccattccaccgcgggaaagaccaggctcggcaagataacccgtgcgggcgatgagaccttgcgtcagctgctggtggtcggggcgacctcggtggtcaagcaagcgaaagcgaagaggcgagggccggactggctcgtcgagcttttgaagcgcaagacgccgaagctggcggcggtggcgcttgccaacaagatggcccgtatcgcctggaagctgatgacgacgggagatagttacaacgctgcgcggttcgatgccaaaacggcaaccgccgcgtagttgagagatccggccgacctgcgggataactcatcggccggaatggagctgcaagagcagatggtgtgatcgatcgacccaagatgcgggcaaatccgtgggacccattggccgaacaaggtcgcgtgggtgattggaactcgcgtcgcggaaaccatcttggccagcggcccaacaagccgcaccgacaggccggacatatggatgcaagcgatccgatcagacctcaaaatgctcttgtgccacgggggccgtccacat

SEQ ID NO: 7959 - DNA, 1339 bp, unidentified
  source 1..1339: mol_type = unassigned DNA; note = element_c6a2070
  misc_feature 1..2: note = core
  misc_feature 3..87: note = LE
  misc_feature 88..1002: note = CDS
  misc_feature 1003..1339: note = RE
  misc_feature 1108..1327: note = bridgeRNA
tgatgctgtggacggctcctccccggcacgagagtgccatcgaagtgggcgctgttaggacatcccatgattcggaggagccagagcatgcaaacgactaagaccgtcggtttcgatatcgcgaagtcagtttttcaggttcatggcgtcgatgcggacggcaatgtggttgttcgccgtcagctcaagcggcgttatgttctgacgttctttcagaagctgccgccatgcctggtaggcatcgaggcctgtgcgtcatcgcattattggtcgcgcgagcttcaggcgctcagtcacaccgtacgcctgatgccaccggcctacgtcaagccttacgtcaaacgacataagaatgatgcggctgacgcggaagcgatttgcgaagccgtcacgaggccaaacatgcggtttgtgcccaccaagaccgccgagcagcagagctgtctgacactccaccgcacacggcatctgttcattcgccagcagacggccatcatcaattccattcgcgcgcacctggccgagttcgggatcgtcgcaccggtcgggcgccgtggtgtcgagcaattgctcaaagtctgcgtggctgctctcgggactcaattgctggcactgaaagcccagatcctggccttcgatcgctgcatcatggcatggcaccgatcgaacgagaccagcaagcgacttgacgccatcccgggtgtcggccccgcgttggcaaccgctctggtcgcgagcattggtgatcccaaggcgtttcgatcgggacgggatttctcggcctggattggactcgtcccgaagcagaactcgagcggcggcaaagacaagctcggcaatatcagcaaacaaggcgatcgcctatctgcgcagcttattcaccgccggtgctctcgccgtgatccgctatgcgaagctccatggtacgaagcatcggccatggcttacagcattgttggcacggcggccgaccaaggtcgctgccatcgcactcgccaataagatcgcgcgaatggcctgggcgatgatgaccaagggcgagcgctacaaggaacccgtcgcactagcggcgtgaacgagatcgcgccgggcgtccggcgtgatgtgaacgggtgggaggagcgaacagcacgtaatgcagagccggtcgatccggcgatcaagacaacccactcgggccaccgcatggtcgaatgcgtggaattgaccgggacctgatccgcggagggcattatggccagcggtcacgtgaaccgcactaacaggccgaacacatggctgctccgaccactgctgcacgggtgaagaacgctcttgccaacccggagccgtccacaca

SEQ ID NO: 7960 - DNA, 1365 bp, unidentified
  source 1..1365: mol_type = unassigned DNA; note = element_c6b46e0
  misc_feature 1..2: note = core
  misc_feature 3..84: note = LE
  misc_feature 85..1107: note = CDS
  misc_feature 1108..1365: note = RE
  misc_feature 1081..1352: note = bridgeRNA
tgatggagtggatgcccccacccgacggcatcgcaatgtgccaaaatggtgatgctgaagtcatcacagagggaggaggcatccatgggtgaggttagcatcgtcggcgtcgacctggcaaagcaggttctgcaggttcatggggcagcggccgatggacaggtgctgttccgcaagaagctgtcacgggcgcagtttgcgaagttcatggcgtcgctgccgccttgtgtggtggcgatggaggcatgcgcaacggcgcactattggggtcgtgagctctcccgtctgggtcatgaagtgcggctgatcccgcccatttacgtgaagccattcgtcaagcggcaaaaaaacgatgccgctgatgctgaggccgtggcggaagcagcacagcgtccgaccatgcgtaccgtggcggtgaagacggcagaccaacaagcccgggcgatgctgttccgcacccgggacctgctggtcggccagcgaacccgtctggtgaatgcactacgcgggcatcttgctgagcacggcatcataatcggtcaaggcgttggcaatatcgctcgctttgttgcctgcctcgatcaggacacgcttccggaactggttcgcgatctcgggcggctttacctcgatcagattgctcagatcagcgacgagatcgacaaactcgataagcgtatcgcaactgcagccagggaaaacagcacagcacgccggctgcagaccatgccgggaatcggcccggtctgcgccatggcgatcgcatcctttgcaccggcgatgcgggaattccgtcgtggtcgcgactttgccgcgtggcttgggctcgttccacggcagcattcctccggtggcaagcagaagcttggtcgcacttccaagatgggtcagcgcgatattcgacgcctgctgatcatcggcgccatgtctgtcgtgcattggaggggccggcacggtggccgtccgggatcgtggctatcgcgcatgctcgcacgcaaaccacgcaaactggtcgccatcgcattggcgaacaaaatggcgcgtatggtctgggccatgctcgccggcgagacggattacagggatccgaccggcgcgatctgctgaacgcggctgtcggagcctcggggatgtgaggagggcaatgacctgaatgggcaaatgatcgatcagatccgggtcgggtaaaccagtggcgtccaacgagcctcgagctcgcccttttgatttggtgcctgatccgcgcatcaccatcccggcccgcggcatgtgaaagccgcacttgtgaggcctgaaacatgaccgcacccgatcacccgctcagacaggcaaaaaaatccttgcatcaaggggggcatccaaaca

SEQ ID NO: 7961 - DNA, 1605 bp, unidentified
  source 1..1605: mol_type = unassigned DNA; note = element_c6b49b4
  misc_feature 1..2: note = core
  misc_feature 3..279: note = LE
  misc_feature 280..1494: note = CDS
  misc_feature 1495..1605: note = RE
  misc_feature 16..302: note = bridgeRNA
ctcctaatatataagtgtaaggttcaagcacccaacagccagttgggacttatccttctcattgttaaagctgtataatgattaagcatcggcctgacagatttctccttggaccactaggtgtccgcagtaaagccagtcagccagcttatcatttgcagccgttcgatttatgcaggttgaactaccgtgatgtacgttcgtttgataccccaggagatggaataagcaatgagtgaagctggaaccatgcaaattcactttaggaggtacgtaagaatgtacaacgcagtaggtattgatgtttcaaaaggcaagagcaccattgcagtcctgcaacccgcaggtgtcattatcagaaagccttttgatgtatcccacacttctcagcaactgaatgaactttccagttatctcaattcccttgagggcgataccaaggtagttatggaatgtaccggcagataccatgaacctatggcaaatgccttacataaagccggactgtttgtctcaattgtcaatccgcacctgattaaaaattttgggattaactcccttcgcaaagtaaaatctgaccctgcggatgccaataaaattgcccgctatactcttgacaactggcctgaactgcgtcagtattcaagtatggatgatacacgtactcaactaaaaacattaaattctcaattcagcttctttatgaagcaaaaagttgctgcaaaagcaaacttgattgctctgttggataacacctatcctggtgtaaacaagctctttgacagccctgtccgcagcgatggcagcgaaaaatgggtggactatgcttactccttctggcatgtggactgtgtccgtaaaataggcttaaaagcctttacagaacgctacaaagccttttgcaaaaagcaccactacaacttccagcctttgaagccggaaggattgttccttgcctcaaaggaactcattgcggtttttccaaaagagaaaaactacaagctgttaatccagcaaagcatccaacagctgaaccttgcttctgagcatgtggagcagcttcgcagagaaatggatgcacttgccgctacactgccggaatacggtactgtcatgggcatatatggtgtgggcaatacttacgggcctcagcttatggctgagatcggtgacgtatcaagatttacccacagggaagcattaactgccttcgcaggtgtcgatcctggcgtagatgagtccggtcaacgcaaatctaaaagcaatagggcttcaaagatcggttctgcgaggctacgcaagacactgtttcagattatgactaccttgcttcagaacgccccgcaagatgatccggtctaccgtttccttgacaagaagcgttcagaaggcaagccctactatgtctacatgaccgccggcgccaacaagttcctgcgcatctactatggcaaagtgaaagagtgtctgcgtaatttagagcagccagaatagcatttttcttcatatccctttcaatgaccggctattagggcggtcttgaagttgtgcccaaaaccatctcaaaaaattttttcaaaaaacacttgactttttattagcagg

SEQ ID NO: 7962 - DNA, 1370 bp, unidentified
  source 1..1370: mol_type = unassigned DNA; note = element_c6b85dd
  misc_feature 1..2: note = core
  misc_feature 3..75: note = LE
  misc_feature 76..1104: note = CDS
  misc_feature 1105..1370: note = RE
  misc_feature 1135..1357: note = bridgeRNA
tgatgctgtggacggcatccatcacccggcccggagaccggtaaggttctcgggctttagatggagggaagtcagatggcgcagccagtcacggtcggcctcgatatcgctaagaacgtgttccacgcccacggcgtcgatgctcatgggcagaaggtcctcagccgcaagctccggcgtgggcaggtcgaagctttctttgccaagcttgacccctgcctcgtcggcatcgaagcgtgcgccacagcgcatcattgggcgcgcacgattgctcggttcggccaccaagtccggctcatgccgccagcgtatgtgaaaccctacgtgaagacacagaagaacgatgcggcagatgccgaggcgatctgcgaggcggttacgcgcccgaacatgcggttcgccgatacgaagaccatcgagcagcaaagcgtgctggtgctgcatcggacacgggcgatgttgatcaggcaccgaacacgggtgggcaacacgatccgagcgcacctcgcggagttcggcatcacagagagcatcggcagagtcgggctgtcgcggctggtcgacatcataacctcaggcgaagatgaccgcattccagatgtgacacgcggcgcactgatgtgcctagtagatcagtactgccttctgcagggccagatcctcgagctcgaccggcaggtgatggcctggcacaagtcgaacgaggcgagcaagcgccttgctacgatccccggcatagggccgcttgccgcgagtgcgctcgtcgcttccatcggcgacgcttcgaccttcaagaacggcaggagcttcgccgcgttcatcggtctggtgccgaagcaatcatcgagcggcggcaaagagcgcctcgggaagatatcgaagcgtggcgaccactacctgcgatggctactcgtcgtcggtggcctggcggtgatccgatacgcgcagcgtcatggcacgcgtcgtccctggctgctcaagcttctgcaacggcgcacgaccaagatcgctgccgtcgccatggccaacaagatggcaaggatcgcatgggtgctgatggcgcgcggcggtgcgtatcacgaaccagtgccacaggccgcataggaacgagcgggtccaacagggcacgcttcacgaggttggagagggcaaaaggaaagccatgcagtaagcggtcgaccaccgggatcggcaaaacccaattgtcccagggcgccttgagcgcgtgcttttgatcgggagctgatcttgcggatagcatgaaggccatcggtgttcgcgccgagcaaaaaggccggacacatgggcgctaccgaccagctctttgtgacaagccaaaaaaaccttgccaacggggtgccgtccacaca

SEQ ID NO: 7963 - DNA, 1412 bp, unidentified
  source 1..1412: mol_type = unassigned DNA; note = element_c6b9d16
  misc_feature 1: note = core
  misc_feature 2..126: note = LE
  misc_feature 127..1146: note = CDS
  misc_feature 1147..1412: note = RE
  misc_feature 1177..1412: note = bridgeRNA
atggaatgaacgcccccgcctacctggtgagggatgctgaacggaggcggaccctcgcgggccgacggcatcaagtgcccagatggaagatcattgaagtcttcacaggcaaaccggagggtccaaatgaagtatacgaccgtaggggtggatattgcgaagaacgtattccagcttcactgggtggacgccggcacgggtgagattgtgaacaggcaactgaaacgggccgcgttcctcgagcattttgcaaatcgcgaaccctgcctgataggcatggaggcctgtggaggttcgcagcactgggcccgacgactgatcgagatgggccatcaggtcaagctgatgccagcgaagttcgtgaaggcgtttaacattggaaacaaaaacgatcctgcagatgctcgcgcgatctggatggccacgcagatgccgagcaaggccgtcgccgtgaagaccgaagcgcagcaagccatactggcgctgcaccggttgcggcaacagaagatcaagtttcgcaccgcggagatgaacagcctgcgcggtctgctggccgaatacggcgaggtgatggccaaacgtcgagctgcactggacaaggcaattccgagcgtgctggcgaggctcgcagaaaggttgcccgcaatgctgatcgactccttgcgcgagctatggagcgatctcgagcggcttgacagccaaatcgcggacatcgaacggcgcctgcaggcctggatgaaggaagacagggcctgccgggcaattgccgcgatccctggtgtaggtctgctgacagctacggccactgttgccaccatgggcgacgcgaaggcattcagttcaggacgggaattcgctgcctggctcggcctagttcccaagcagatcggcaccggaggcagggttcagctactgggcatcagccggcgcggcgacacgtatgtgcgcacgctactgatccacggcgcgcgcagtgtgctcttccatgggaaacataccggaacgtgggccgcgcagttgcagaagcgacgaccgtcgaatgtggtcgctgttgcactagcaaacaagatcgctcgaacaatctgggcaatcctcgcgcatgacaggccgtacgatcaaagctacgtgactttaaagatggcttgatgggacgcaaagaagtttgaagattgcacgatgacgtcgacaggttgcgttggcaatcgagcgtgatgacagacaggtcggacctgaactcgctaagcctgaaagctaatttgagcgcgaagctcgtgcgacaaatgaggagcgagtcagcggatttcatcggggcccgcagcgaatgaggctgcaatgaggccgcatataaagctgcaacctatcctgtcgaatcaacacgcaagaaaacctggcgcatcgggggcgttcatata

SEQ ID NO: 7964 - DNA, 1379 bp, unidentified
  source 1..1379: mol_type = unassigned DNA; note = element_c6c61c8
  misc_feature 1..2: note = core
  misc_feature 3..76: note = LE
  misc_feature 77..1117: note = CDS
  misc_feature 1118..1379: note = RE
  misc_feature 1117..1366: note = bridgeRNA
tgatggtgtggacggccccctacggcatcagtgtgccagaatgaggttgttgagatctcagacaagggagccgtccgtggagcagattatccgcattggaatggatacgtcgaagcatatttttcagttgcatggggttgatgcggccgaacggccggtgttgcgcaagcggtttgggcgcaagcaaatggtggctttttttgcggagctgccgccgaccgtgatcgggatcgaggcctgcggcgcggcgcattactgggcgcgcacgctgggtgagttcggccatgaggtgaagctgatcgcgccgcaacacgtgaagccctacgtcaagcgcaacaagaatgacaggcgggatgccgaggggctgtgtgaagcgacgggccgaccgacgatgcggtttgtgccggtgaagacagctgagcagcaggcagcgctgatgctgaccggcctccgcgagcagatggtcgctcggcgcacccaactgagcaacgcgatccgcggttatgcggcggagttcggtgtcacggcagccaagggtctcgacaagatcgagccgctattggccgacatcgcgcaagacgagagcgtgccggcgctggcgcgcgagttgtttgcggtccagggccgcgagtgcgcgcagttgcaggtggagttgaaggcgatcgaggccaagctgagggcctggcaccgcgccaatgccgatagccggcgcctggcaaagattccaggggtcgggccgatcggcgccacggcgctggtaatgaagacgcccgatccgcgcgcgttcgcctccggccggcattttgcggcctggctcgggctgaccccgaaagaccattccaccgccggcaagacccggctcggcaagatcacccgcgccggagatgagaggttgcgcagcgtgctggtggcgggggcgaccgccgtgatccagcaggcgaagcacggccgtggccgtccgtcgccctggctgcttgccctgctcaagcgcaagccgccaaaactcgcggcggtggcgctcgccaacaagattgcccgtatcgcctggaagctgatggtgacgggtgagagttacgacggcgcgagaatgcccgcggcatcggcgtccgccgcctaggagatcagccgatcggcaagttggtctgatcggctgaaccggagctgcaagaggagtagatggcaggatcgatcgatccgaggtgcgagacagtccgtgggacccattggccgaagccaggtcgtgtggttgtttggaactcgcgtcgcggaaaccatcttggccagcggtccaaaccgaccgcatcaacaggccggacatatggatgcaagcgatccgatcacaccgcaaaacctcttgtgccacgggggccgtccacata

SEQ ID NO: 7965 - DNA, 1410 bp, unidentified
  source 1..1410: mol_type = unassigned DNA; note = element_c6cbe85
  misc_feature 1: note = core
  misc_feature 2..78: note = LE
  misc_feature 79..1026: note = CDS
  misc_feature 1027..1410: note = RE
  misc_feature 1188..1404: note = bridgeRNA
taatgagatggtccgccggcttgatcatcctgaccgtaggatgatctcagccagcagcatatacaggaggatcatcacatgcacatcgcttctatcgggatcgatctcggcaagacaacatttcacctggttgcagttggggagcaaagcaaggtagtcgtcaggaagaagttttcgcgcaagcaactgctagcctacaccgcgaacctgcaaagctcgctgataggcatcgaagcctgctcgggagcacatttcatcggtgcagccctgcgcagccagggacacgacgtgcgactcatccctgcccagttcgtaaagccttacctgaagtcgaacaagaacgacttcctcgatgcggaagcgatcgccgaggcggtggcgcgacagaacatgcgcttcgttcccatcaagaccgaggaccagctcgatcttcaggcgctccatcgcgtacgcgacaggctcgtgcatcgccgcaccgcgatcatcaaccagatccgcggtttcctgctggagcgtggcattaccttcgcgaaaggaccagccaacctgcgcaaccagatgccggcgatgatcgaagacgccgagctgaagatctcaccacgtatgcggaccctgttgactcgcgtctggcaggagtggaagcaactcgagatcgacattgcccatgccagcgacgagatagagcgcatcgccagcgaagacgcgggctgcaagcgcctgcggcagatacccggagtcggacctctggtctcgacggccacggttgcagccattggcaacggcgccgccttccgtaagggacgtgacttcgctgcctggcttgggctcgtgccccgtcagcactccactggcggcaaggcgaagctgtacggcatccggcaacatctacctgcgacgcatgttcgttcacggcgaacgcgccgtgctgctccgggtgaagtacgacaccggaggcttcggccagtgggttcatcagctcgaagcgcgagcgccgcgcaacaaggtgatcgtcgctatcgccaataagctcgcgcggatcgcatgggcggtgctgttccgaggagaggattaccagcacatggcggtctgcacacaggcgtgaactcagccgtggaaaagacgctgcgcttggaaagcgctaacgcgcttcccactttcccaccgccactacgacggcgaataactaaccaggtctgttgaggagaggacaagacgaaagaacagtcaaacggcgtgccagagaacctgttcccacaagaggtcgatcgtgaccgttcggcttataaggactggcacgcgcggatcatcatcatggcccggagaacaatctccaactagaggccggatacatttgcgcagactgtacttcgtccaagaatctctccttgcagtcgggcggcggaccataca

SEQ ID NO: 7966 - DNA, 1337 bp, unidentified
  source 1..1337: mol_type = unassigned DNA; note = element_c6cdb79
  misc_feature 1..2: note = core
  misc_feature 3..70: note = LE
  misc_feature 71..1111: note = CDS
  misc_feature 1112..1337: note = RE
  misc_feature 1101..1322: note = bridgeRNA
agatgtatggactcctctcccctcggggactacgttataaatacacctgtaaaaatagtggagctcagatatggaagagaatctaatacttgccatcgacctagcgaaaaactcatttcaagtttgctatatgagaatcaatggtgaagttctcatgaacaaagctatcagccgtactagtttgatcagactgctaactggaaagaagaagttttctttagtggtcatggaggcttgtggtggtgctcattactgggctcgcttagcgaagaaaaataattatgaagttaaagtcatcccacctcgtgcagttaaaggtctacaactcaaacagaaaacggataagaatgatgcttatgcgataggagttgccgctctacttcctcatatatctagttgcagtcagatgtctgaagaagagcaaggactacagtgtttggatcgtgctcggtcattacagatagcccaacgaacagcacttagtaatcaaatgcgtgggttcttaatggaatttggcatcgttttgcccaaaggaataactcctttagcaaaacggatcccagaaatattagaagatgcagaaaatgggttaccagattgtttacgccaagtactcgcatctcaatctgatttattagctatgtatacagaacaaatagaatactacgacggtttaattacagagcatgtcagtcaaaataaaatctgtaaaaagcttagtaaactagaaggagttgggccaatcgtagcattaggtctaatggtacgtttaggtaatggtaaagaatttgttcgaagtcgagatgcgtctgcttgtataggattaacgcctaaacaacactctactggcggtaaagagcgtatagggcatatttctaaaagttgcgcagataagcgtttgagaagcctcttgtatcaaggagcaatgtctatagtgtacaaagttacacttcgagcaccaacaacagaaaaagaacggtggttaaaatctatgatagagcgacgtggtaagaaaatagctgctattgctctggcaaataagacggttagaaccgccgttgcactcataaaaagtgatagtgagtatcacccattggcgattcaagcataagtagtgtcaatcaaattttaattcaatgacttgcataaaataaagcgataatacaaccaatggaattcagatccgcacaaaagtacttagatactgcgctatagactcggaccattggagcgaacacatcaaagggcaggagtagctctccaataagagcccgtatataagtgcgcaactatcgttctatttaaaaaggcattgattaaaacgaggagtccatata

SEQ ID NO: 7967 - DNA, 1379 bp, unidentified
  source 1..1379: mol_type = unassigned DNA; note = element_c6d07eb
  misc_feature 1..2: note = core
  misc_feature 3..307: note = LE
  misc_feature 308..1117: note = CDS
  misc_feature 1118..1379: note = RE
  misc_feature 1149..1367: note = bridgeRNA
tgatgctgtggacggctcctccacgggcacgagagtgccaaggagtgggcgccgtttgaggctcccacgattcggaggagcaagctatgcagtcaatttcgacaatcggtctggatatcgcgaagtcggtctttcaagtgcatggcgttgatacagccggccaggtggtcatacgccgtcagttgaggcgtcggcacgtcctggcgttcttccagaagctgccccatgcctcgtcgggatcgaggcttgcgcgtcgtcacactattggtcccgcgagctgcaggcgttggggcattcggtgcgattgatgcctccggcttatgtgagaccctacgtcaagcggcagaagaacgatgccacggacgcggaagcgatttgtgaggcggttacgagacccaacatgcggttcgtgccgaccaagacggtcgagcaacagagctgtctgatgcttcaccgggcgcgccatctcttcattcgccagcagacagccgtgatcaactcgatccgcgcctatcttgccgagttcgggatcgtcgcccctgtcggacgcaggggtgtcgagcagctgctggaagtcgtcgccgatacagccgaccgccggcttccagaggtcggccgtgcatgtcttgctgctctcggcagtcagttgcgagcactgaaggctcagatactggagttcgacagacgcatcatcgcctggcatcgatcaaatgcgacgagcaagcggctggatgcgatccccggcgtcgggccggcgctggccacggcccttgtcgccagcattgctgacccagaagccttccgatcagggagggatttctcggcctgggtcgggcttgtgccgaagcagaactcgagcgggggtaaggacaagcttggcagtatcagcaagcaaggcgatcgctatttgcgcagcctgttcacggcaggcgcactcgccgtgatccgctatgccaagatccacggcacccagcatcggccctggctcaccgcgctgttggcgcgccgaccaaccaaggtcgccgcaattgcgctcgccaacaaactcgcgaggatggcatgggcgatgatggcgaggaatgaaggctacaaggaacccgccgctcttgcggcgtaaacgaaatcacaccggacagcccagtgtgacgtaacggttgggagggcgaacagcacgtaatgcagtgccggtcgatccggcgatcaggacaacccacatgggccacagcatcatcgaatgcgtgcttttgaccgggatctgatccgcggagggcattatggccagcggtcatgggtaccgcgcgaacaggccgaacacatggctgctccgaccaatgctgcaaagtgaagattctccttgccaacccggagccgtccacaca

SEQ ID NO: 7968 - DNA, 1461 bp, unidentified
  source 1..1461: mol_type = unassigned DNA; note = element_c6d4cbd
  misc_feature 1: note = core
  misc_feature 2..227: note = LE
  misc_feature 228..1085: note = CDS
  misc_feature 1086..1461: note = RE
  misc_feature 13..242: note = bridgeRNA
ctactagagacttccctgcaggatcggtgtctggccagattcggtccaggtgcccggcgggacgctctcatttgggctgcccatccattctcgggtgtggctcactttcggtctgctgcccgccggacaccgctgacgaggcgtggctcaagaagggactgccctgctcgtagtagcactgcccacctcgccgtccacatcggtacgagcacaggcgggagcagcacatgcaacacatggagcagatcatcatcggggtcgacccgcacaagctgtcggcgacgatcgaggtcgtcgacagacacgagcagcggctcggctcgggtcggttcatgaccgaccggtccggctacatggcgatgcggacctacgcgaaggcctggcctgagcgggtctgggcgatcgagggcgccaacggagccggtcgacccctaacccagcggctgctcgaggccggcgagagcgtcgtcgacgtcccggcgaaactggccgcgcgcgtccggctcttcgacacggggcacaaccgcaagaccgacgcgcttgatgcgcactcgatcgcggtcgtcgcggtccgcaccgagggactgcgggtcctgaaggtcgacggggagctcgaagcgctgcggatgctcaccgaccgacgcgaagcgctgacccgccgccgcatccagaccgtcaaccggctccaggccctcctcgccgaactactacctggtcaggcaaagaaggacatcaccccgttgcaggccaaggcgatgctcgccagcatccgcccccgcgacatcgccggcaagacccggcgcagcatcgccgctgaagaactcgccgagctggccgcggtcgacgccaagatcaagaaggcaaccgtcgaactcaaggccatcgtcctggcacgcgactcacacctgatggacatccacggcgtcggcccggtggtggcggcccgagtcttggccgacgtcggtgacgtgaccaggttcgccgaccgcaaccggttcgcctcctggaccggcaccgcacccttggacgcatcctcgggcgagcaaaccaacaccggttctcccgcgccgggaaccgccgaatgaaccacatgatccacatcgccgccgtcacccagatccgtctcgacaccgagggccgggcctactaccgacgcaagcgggccgagggcaagaaacccctcgaggccatcaggtgcctcaagcgcaggatctccgacgccatctatcgccagctgctcgccgaccaccagcgtgccgccggcgctgagcctgaagcgggcccgggagggcaccgcggggcgactcaagaatccagcgcggtcgacctacccccgcacatcgacacttccgatcagccacttcccggacccgcagcaacgacgctacgccccacccgaccagcccggaaggccaccaggaaaaccaccctcaagaccgccggttgacaacagaggggagc

SEQ ID NO: 7969 - DNA, 1217 bp, unidentified
  source 1..1217: mol_type = unassigned DNA; note = element_c6db7a6
  misc_feature 1: note = core
  misc_feature 2..214: note = LE
  misc_feature 215..1186: note = CDS
  misc_feature 1187..1217: note = RE
  misc_feature 34..204: note = bridgeRNA
tcttaagtttacaatctattaaattagataaataaacagaaaagacaaaagagaggaataaggttaatatacacgcagaagctttagacttcgtcaacattgaaaatcccttctcttttactacacagatttcgtacagttctatgaggctttaagacctctattttaagtcgttgaaactcgcgtagcttgtcctttcataaaacattttattatgaataaagatattaaatattttggaatagacatgagtcatttagtatttgatgttaccgattctgatggtaattattatcagtttaaaaacaatgaatttggttttaagcagttaacaaaactcttgaattgcgatagccattgtgtaatggaagctacaggctattatcattatcagttagcctatcatttactagagtttggtataaaagtatctgttgaaaatccattatcggtaaaacgttttatacagatgaagctatcaaaaattaagactgataagagtgattcaaaacttatatgtgattatgccagccaagtagcattaaagttatggcaaggtaattctaagcataaaatagaatgtcttcaaatagctagagctctttctgtatatacaaaacagagcactatgttaaagaataaattacatggagaaggtgttttgggtaatccaagtaaagtagttgtgagatccttaaagcgaagtttaaagttgctccaaaaagagattaaatatttagaagatgagctattgattttagtaaaagaggtacatcaagatctgttaacacgattaaaaaccattccgggtattggtccaaaaacagcaattatgttagtcgttttcacaggaggctttgatcgttttacaagcgcaagcgaattgtgtagttatgctggattaactccagtaattagacaaagtggaagtagtgtaaaaggacgaccaagaattagtaagataggtaatcaaaaattaagaaacctattatttatgtgcagttttaatgcatgcaaatacaacaaagcttgccgagatttatatgaacgaattgtagccaaaggaaagagtaaaaaattagcattaattgcagtatgtaataaactattaaaacaggcctttgctattgcaaaatcaggattaatatatgatgatacttatagaagcactttagtaaaaaattaatgagtttttacttgttttttaccacagtact

SEQ ID NO: 7970 - DNA, 1264 bp, unidentified
  source 1..1264: mol_type = unassigned DNA; note = element_c6df2c4
  misc_feature 1..2: note = core
  misc_feature 3..253: note = LE
  misc_feature 254..1249: note = CDS
  misc_feature 1250..1264: note = RE
  misc_feature 6..187: note = bridgeRNA
cttgtatgttgaagccgtctggtttgataggttttctgccagacaccggggaagccgttccgccctggaggcagaatatttctgacctcgtgcgtagatgggctccccgcctcattgccgatttcgaggagtatccggaagccagcgtggctggacttcgcattacaaggtcgaaccggcaagaagtgcgaggtcggggaaccggtgaccattgtgacgcaatcgaaccccgcaagggaaaggaggaatcgtgatgagcactttcgtcggcattgatgtcgccgctgaatccttcgacctggtctgccgcagcaacagcaagcacagcaaggcccagaccttcccgcagaccgcccagggccacgcccgggcaatccgcaagctgcaggcgctgcaaccgacgtgcatcgtgttggaggccaccgggatctactacctggacctggcgctggcactgcacgaggccgggctgcccgtctgcgtgatcaacccgcgaagcttccggcacttcgccgagatcaccctgcgcggcagcaagaccgacccgctcgacgccgccctgctggcagaatacgccgaacgcatgacgccccggcgctggaccccaccgccaacgacctaccgggaactgcgagacctcggccgccacctcaaccggctgctgcacgcgcgtacccaggccaagaaccaactgcatgccctgaaatctcggcagggcgccccgaagctgctgatcgaggataccgaggaaggcatcgcccagctgaaccagcgcatcgagcgcctgcaacaggcagcccaggcacggatccagaaagcccctgaactggatcaacagcagacccacctctgcgccgccaccggcatcgcgaccgccagcagcctggccctcctggccgaactgtgcaccctgcccaaggatctgaaagccaaccaagtcgtgcgccatgccgggctggacgtgcgcctgcacgaatccggttccagcgtccaccgacccggccgtctggccaagacgggcaacgcctacctgcgcagcgcgctgtacatgccggcgatggtagcgatcgtgcacgacccgtacgccaaggccttctacaacgccctggtcgcccgcggcaagaagaaaatccaggccttgtgcgccgtcatgcgcaagtacctcaccggcatctgggcctgcatgcagagcggtcagccgttcgactcctccaaactgttcagcgatcaacatcagcaacccgcttgacaggaaacggagtat

SEQ ID NO: 7971 - DNA, 1670 bp, unidentified
  source 1..1670: mol_type = unassigned DNA; note = element_c6e38c8
  misc_feature 1..2: note = core
  misc_feature 3..274: note = LE
  misc_feature 275..1453: note = CDS
  misc_feature 1454..1670: note = RE
  misc_feature 26..243: note = bridgeRNA
ctcgtataatatagttgaagttaaaataattttacttcactttatttctcttttccatctcactattcttgtgagataataattgtacagataggggtcgtagtattcctccttgaagcgttgtcttccttaaaaagggttacgcctcttctttacatctatatgcgaatgagctggatagtacctagttactgaatgtctaacgaggttgtattattgtaaagcaaagaggttctagtctttatctgttaatactataaaaactggtgattttatgttttatgttggtattgatattgctaagaaaagtcacgaagcttctattattgactctggtggtaagcttttggataaaagcatatccttttctaattccgaatctggttgtaataaacttcttaccttacttgaaaaatttgaagccaactcttccaatactatcattggaatggaagctactggtcattattggcttagtctatattctcatttactggatcttggatttactgtgtatgttattaatcctatccaatctgatgcattcaggaaaatgtatattaggcagactaaaaatgactctaaagattcttttgtaatagcccaaatcatgcgttttggtgaattttctactacttccttagctgatgaagatattatggctctacgccaactttctcgctatagattttctctggtagacgaatgttctgactggaaacgcaaatgtattgcactcttggatcaggtctttcctgaatattcaaagctcttttctgatattttcggagttacatctagggaacttctttctaaatacccaactccagaggatatgatgtctatagatgctaatactctatccgagcttttatctagagctagcagaggtcgatttggtatctccaaagcttctgaaatacaggaatctgcttctaatacttttggtattagttttgcaagagatgcttttgcatttcaaattaaacaaattattggtcaaattaactttattgaaatgcagttaaaggaacttgaatctgagatatccttcttactccacaagactaatcaagttatcactacaatcattggtattggtgatgttcttggtgctgtcattattggtgaaattggtgatatttctcgttttgattctgcatcgcaattagttgcttatgcaggccttgatgcttccgttaagcagtctggagactttgtggggactcatactaaaatatctaagcgtggttctccatatctccgcagggctatctggttggctgcaactgttgctgcttttaaagatccagcattatctgtgtattatcagtcacttaaagcccgtggtaaacaccatttaaccgctattggagctgttgctaggaagatatgcaatattatttttgctgtgctcaccaataacaagccatatgtgccccatattcgttaaggttacacatatttagccttacacctagcataattcagcctaatttcttcatttctaatataggcttatttgttttgcctaattttacataagaatttatggcaggttctgtcaagggactctttttcccttgacgggttctgacagaaattctacaatcacaaaggcaaaataaatccaataattttatattacttgttgacttttaatagctggt

SEQ ID NO: 7972 - DNA, 1376 bp, unidentified
  source 1..1376: mol_type = unassigned DNA; note = element_c6f12b2
  misc_feature 1..2: note = core
  misc_feature 3..88: note = LE
  misc_feature 89..1117: note = CDS
  misc_feature 1118..1376: note = RE
  misc_feature 1142..1362: note = bridgeRNA
gatggggtggatggctcccgctcccggcatctgagtgccaaattgtggttgctgtcgaagcgtccactcacgagaggagccatccgcgatggagattagcacgatcggcctcgatctggccaagagcatctttcaggttcacgcgatcagcaccgctggcgagacggtcgtccggaaagcgctccggcggtcgcaagtgctgccgttcttcacaaagctgccgccgtgccgggtcgggatcgaggcatgcggcacatcgcatcactgggcgcgagaactgaccaggctcggccacgacgtgcgactgatgccgccggcttacgtgaagccgtatgtgaagcgcggcaagaccgacgccaatgatgcggaggcgatctgcgaggcggtgacgcggccgacgatgcggtttgtgccagtgaagtcgcctgagcagcaggcggcgctggcgctgcaccgaactcgcgatctgctggtcaagcagcgcacgcagctcgtcaatatgatccgtggtttgctcgcggagttcgggatcgagatggcgcgagggctgcaccatgcgctcgagctcgcgaagcggctggtcgacggccgcgcacccgacgtgccggagctggcccagcgggtggtcaccggcttggcgcagcagatcggcaatctgcaggtgcaactggcggcactcgagaaggaactgctcgcgtggcatcggtccaacgagctgtcgcagcggcttgcgacgatccctggcgtcgggatcatctcggcgaccgcgctcgccgcttcggtcacggagcccgagcgcttccgatcgggtcgtcagtttgctgcatctctggggctgacgccgctgcaaaactccagcggtggaaagcagcgaatgggccggatctcgcgcatgggagatcgctacctgcgccggctgctcgtcgttggcatgacatcgctgatcaggcgcgccaggacggcgcctgcatcagtggatccgcgcatccctgccatgctgcagcgtcgaccggcgcgcgtcgtcacagtcgccgccgccaaccggaccgcgcgcgtcgcgtgggcgatcatgacccgcggaggcacgtatcggcggccgactttggctgcggcatgagacgctaaccaggagaccagctcaacgaggttgcgaggacgaagagatgtgatggcgcaccggtcagaccgggagcaggggcacgccgccgaaagtccgaggcatcatagcctgcgaagcagagtggcacccagctcgcggataccatcagggccagcggtcaggaaaacggccgcaccaacaggccggacacaagactgcacccgaccagccgccaaacttcaaatcgccacttgcaacgcgggagccatccacacaa

SEQ ID NO: 7973 - DNA, 1325 bp, unidentified
  source 1..1325: mol_type = unassigned DNA; note = element_c6f1619
  misc_feature 1: note = core
  misc_feature 2..255: note = LE
  misc_feature 256..1314: note = CDS
  misc_feature 1315..1325: note = RE
  misc_feature 38..248: note = bridgeRNA
ctattggtgcacagtggttcatgccggatgacttcgacgggagttgttgcggcccagggccgctgggtgactcagagaacacgtgccgcaaggccttccgttgatatgtccacagcagcccgcagagcgagagccctgaccgggagtgacttgatagaagcctgctgagccgtcaactcgcaataggtctgtcccctggtcagggccctcgctttgtcccgtcgtccgcgattggcagaaggagaggacctctcgatggtgacagtgggaatcgacccgcacaagcgtgtccatgtcgcagtggcggttgacgccgccggcagccggatcggcaagccgctgaccgtgaagaacgacgcgacgctaatcactgccctcctcaagtggatccggtcgatcaccgacgacaccaacctcacctgggctatcgaggatggccacggattcgcccgccgactcgcagatggcctgctgttggccggccacgaagtcgtttgggtccccacccggctgactgcggcgcaccggaagctgcacgctgccaccggatccaaatcagatctggttgatgccatcgcagccgcccacgccgcgatcgcatctcccggtctggaccggcaccgcatcgacgaacgcgtgcgtgagctgcgagtactggtcgactaccgcgccgacatcatcaagcgccgcaccatggcgatcaaccaactcaagagccacatccatgtctggctcgaccacacacccggcgacctggcccgcaacaagcctttggcggcggtgaccgccctggtgaatgccgcccagctgggcacccatgtccgccaggtcctcaccgacatgatcgccgagatcgccgagctcaaccgccgcattcacgacctcgacaccacggtcagggacctggtcggcccgctggcaccgaacctgctggatatcgtcggaatcagccatacctcggcagcggtgctgatcgccgagatcggcgacatcacacggttcccgaactcggccaaactcgcccgctacaccggttgcgctcccgttccggtctactcctccgacaacgaacgccatcgcctgcaccggggcggcaatcgccgactcaacagcgtcctctacaccgcagccatagtgcagaaacggttccacccgaacgcacaggcactgctcgcccggcacgaaaccaccaaaggcacccgcggcgcccgccgcattctccagcggcatctcgtcgacgtcgttcaccgcgcgatgaccgctgaccaagtgacctggcagcacccgatcacccgctatcaacccgcagcttgacatagaagcat

SEQ ID NO: 7974 - DNA, 1205 bp, unidentified
  source 1..1205: mol_type = unassigned DNA; note = element_c6f1be6
  misc_feature 1..2: note = core
  misc_feature 3..190: note = LE
  misc_feature 191..1171: note = CDS
  misc_feature 1172..1205: note = RE
  misc_feature 12..196: note = bridgeRNA
cttgtgtctctctcgatatgctgattagctatcagtgtatcaggcgaggtggtgagcttgtttcgaccctgaggccttgagcctgtgctgtagatgaagccccatcccgcaattttcttttaaactgaatggtatctgagcccacccgtggggaagaggctgtacgtacaaggttaagtggagagaaacgatgatcgttattggtattgatgttagcaaggcaaagttagactgcttgtggatacgtgacctggtcggcatgaaggtgaaaagtaaaatacaggcaaacaacccggcaggtcaccaggcattactagactgggcaatgaaacaaacaggtgaggatattggtggccttcatttcgtaatggaagccacgggtgtgtaccacgaggcattggcttacgctttgtatgatgccggggcacaggtatcagtgatcaatccggcccggatacatcattacgccaaaagtttgggaagccattccaaaacagacaaaaaggacagcgttaatatcgcccgttacggcatgacccagtcgccgcagttatgggtacctgaacgtgaggatatccgacaattaaaagcgctaatagcacgccgggatgcggttaagcaggatgttcaacgcgaaatgaatcgaagggagaaggcccaggttagcgctgtttcgaaagaagtgcatacttccatcgagacggttctcgctcaattggaggctgaaaagaaacgactagagtcattgatcgatgatcacataaacaaccatccagacctcaagaaagatcgggcgctgctagagagtattcctggtgttggtcctgtgatttcacaacagatggtggctgttattcgtagccgtccgtttaaccgggctcgtgaatgtgccgcctttctggggctggtgccgatagagaatgaatcaggcagcaccgtgtatttcaaaccacgactatccaaacgaggtgatgcccggatccgcgcaaagctgtatatggctgcggtcgttgctatccgacataacccggatattcggtgccaatacaatcgacttttgaagcgtggaaaatccaaaatgtccgctattggtgccgccatgcgaaaactcgtgcatatctgttttggtgtcttgaaacaccaggcaccctatcaaccacaaacagtatgaaatactggttgtgaacaactgagggagatggtat

SEQ ID NO: 7975 - DNA, 1375 bp, unidentified
  source 1..1375: mol_type = unassigned DNA; note = element_c6f2d46
  misc_feature 1..3: note = core
  misc_feature 4..83: note = LE
  misc_feature 84..1115: note = CDS
  misc_feature 1116..1375: note = RE
  misc_feature 1139..1363: note = bridgeRNA
tgatgctgtggacggctcctccgccggcatcgcaatgtgccatggaggttgttttataaccgccaaaaggggagccgcccgagatggatgttagcacgataggtttggatatcgcgaagagtgttttccaggttcacggcattgatgctgcaggcgatgtcgttgttcgccggcgtttgaggcgacgtcagcttgtgggatttttcgagaagcttggcccttgtctggtcgggatcgaggcttgtgccactgcccattactgggggcgcgagattgcggcgttggggcacgaggtgcggttgatgccggcacactatgtgaaggcctacgtcaagcgcggcaagaacgatgcggccgatgccgaagcgatctgtgaggcggttcagcggccgacgatgcgctttgtcagtctcaagaacccagaacagcagagcatgctgatgctgcatcggacccgggagttgctggtccgtcagcgcacaatgctggtcaatgcgatccgcgggcatatggccgagttcgggattgtggcccgtgttggtctgcctcagatcaaggagcttctggcggtgatcgccgaccgggaggatcaccggcttccgcctggcgcccgtgcctgtcttgagagccttgggcggcagttcttatcgctgcacgaagagatttgcgctgccgacaagcacctccatgcctggcaccgatcgaaccccgtgagccagcaccttgcaaccatacccggcattggaccggttacggcgagcgcgttggctgcctccatcgccgatccttcagtgttcaagtcgggccgcgagctggcggcctggatcggacttgtgccgcggcagaactcaacaggtggaaagcagcggctcggcaaaatctccaaacagggcgatccgtatctgcgatggctgctcgtcgccggggcgatgaccgtgatccggcacgccaaacgacgcggcgcaacaaaccagccttggcttgatgacctgatcgccaggcgaccgaccaaggtagcggcggtggctttggccaacaagatggcccggatggcttgggcccttctaagacatggcggcgcctatcggcagccactcgtcaccgcgagcctataaggcatcaagaggcgaagcagatcaccgatttggcgaggtgcaggtgaggtaatgcaaaatcggtcgaaccgagggtcgggaaaacccgtttgggtcagggtgcatcatctgcccgcgctaatgattgggacccggcccaagcggatcgcattagggccagcggcacaaggcgccgcatcaacaggccggacacatgacagcactcgaccagtttgcaccagatccaaaatacaccttgccaaaacggagccgtccacaca

SEQ ID NO: 7976 - DNA, 1709 bp, unidentified
  source 1..1709: mol_type = unassigned DNA; note = element_c6f6650
  misc_feature 1..3: note = core
  misc_feature 4..248: note = LE
  misc_feature 249..1463: note = CDS
  misc_feature 1464..1709: note = RE
  misc_feature 60..236: note = bridgeRNA
cttatacagtaaactatgagcaagcccactcgacacagggctggaacaaggatacacttgttctatgacagtgtagaacacggagggcgaaagtctagaaactccacccggctcgaccgattacgaaagctcgccttcgccttccctggttcctgagcaggaccaatcatgagagagtcgcgcttcgagcgccacagtagaagggcatgggatctcaggaacattcttttcagagaggagagcttctgatgtggtataccggtattgactgggcggacgagcaccatgatgccttgacgattgatgaaaaagggcatcagatgggttcgatccgtgtggatcatagtccacacggatttgccaagttggacacctttttggggcagatcattggttctgagtccaaagaacacatggcgtgtatgattgaaacaacccatggtctgttgatcatgcacctcttggaagctggttggcctgtttatccagtcaatcctcgtaccgtggatcgtcgtcgatcggccagtggtgccaagacggatctgatcgatgcctatttgctggccaaaaccgggcgtgccgatttcgccgatttgcatcgattgatcccagatagtgacaaggtggcagaactcaaacacttgacacgtgaccaagatagcttgatccgtacgcaaacccgtttggtcaatcagctcacggcttgcctgaaagcgtattatcccgtggccctggatctgttctctcaactgcaacaaaagagtacgttggggttcttgcagacctatcccaccgttgaggccgcacgagctgcttccctcacagagattcaacagcaactcaaacaaacgaggcatccccaacccgctcttgctgcggcttcgattgttgagatgctgcaccacccgcagttgcaggccgatgcggtcctcacgcgcaccaaatcgcgcttgatgctggccctggtgagccaactgctgccacttcttgaacagattgccagctatgacaaagagatccacaccctttttttgacccatgaagatcacgccatctttgagagtttgccgcgtgcggggcaacacctggctccacggaggttttctgagattggggatgatcggacgcgctaccaagatgcaagcagtttgcaagccctgggaggaacctcgccagtcctgtatcagagtggcatgtattccaaggctcatcgtcggctgggttgcatcaaaccgctgcgcaacgccttgcatcaatttgcgtggcagacgacccaaagtgaagcatgggctaaggactactatcagcgcaaacgaatggagggcaaaagccacaccgtcgccatacgggcacttgccaatgtgtgggtcaggatcatctttgcgatgtggacccgtcgagagtgttatcagacggcgacctttgaactggcacaacaacaacacgcccgcagagcggcctaaacgcctctgatcaagcgatggtggttcaacacgagccaaaaatcctgcattttttgggctttcaacttggcatgcccaaaacagaccgcgcaagctccgggctgtcaaggaaagcgaagcggcttgacagcccggagcggcgtggtacactccttcatgcctggttgaatgcatttctccacctctcgttgcttctgatttttctctgccctcaaattggcccaaaaaaggcttgacatagagagt

SEQ ID NO: 7977 - DNA, 1420 bp, unidentified
  source 1..1420: mol_type = unassigned DNA; note = element_c6f90b0
  misc_feature 1..2: note = core
  misc_feature 3..86: note = LE
  misc_feature 87..1145: note = CDS
  misc_feature 1146..1420: note = RE
  misc_feature 1172..1405: note = bridgeRNA
tgatggtgtggacggcgccctcgcgcggcatctgggtgccatagggtggtcgttggaagacgaatcaccaaagaggggccgtccacatgcaggttacaacgatcgggctcgatctcgccaagagcgtttttcaggttcacggcgtcgatgcggcaggacgcgtcgtcgtcgcgaagccgcttcggcgcgggcagatggcgaagttcttcgccgatctgcggccgtgtctcatcggcatggaggcctgcgcgacaaggcaccactgggcacgcgagctgaggaagcacggtcacgatgtgcggctgctgccgccggcctacgtgaagccctatgtacgccgcggcaagaacgacgcggccgacgccgccgcgatctgcgaggcggtgacgcgcccttcgatgcgcttcgtgccggtgaagacgatcgagcagcagtcggcgctgatggcgcatcgcgcccgcgacctgctgatccggcagcgcacgcagaccctcaatgcgctgagagggcacctggccgagctcggactgatcgcggcgcagggacgcgaaggcatggcgacgctggtcggcatcgtgcggacggagacggagggcgggcaagcgttgccagcggccgtgcgcgcggccctgtcgccgctcgtcgctcagctggaagcgctgcagcagcagatcgccgcgctggacaaggtgatccgtcgccagcaccgcgccgacgaggcgagccggcggctcgagacgatacccggcatcggcgtgatcggcgcgaccgccatcgcggccaccatcaccgatcctagagccttcagatcgggacgggaccttgcggcctggatcggcctcgtgccgcgacagaattccagcggcggcaaggaacggctcggcggcatctcgaagcagggcgaccgctatctgcgcaagctcctcgtcggcggcgcggcggccgtggtgcagcaggcccggcggcatcccgacaagcatccctggctcatggagctgctggcgcgccggccggccaaggtcgccatcgtcgcgcttgccaacaagatggcgcgcgtcgcctgggcggtgctggcgcggggcgaaacctatcgggcgccggtgcccgccgcgaccgccgcgaagggctcggcaatggctgcctgaggaaccggctgaggaaccggcggcggcccgagccgctgccgatcgcgtgagcaaagggtgatgaaggagctgatgcgagacggtcgagccgacggcaggaaaacccgtgggacccagcgcgggcaagcaccgcgattggctgattgggacctgccggcggatttcatcagggccagcagccatccgcgctgcatcacaggccggatacatgacttgcacccgaacgcctcgctgatctcgacaccaccccttgccaacgaggcgccgtccataca

SEQ ID NO: 7978 - DNA, 1644 bp, unidentified
  source 1..1644: mol_type = unassigned DNA; note = element_c70609a
  misc_feature 1: note = core
  misc_feature 2..308: note = LE
  misc_feature 309..1553: note = CDS
  misc_feature 1554..1644: note = RE
tatgaccattcctttccgctgcgctccaaggcaccaaaggcaaatgaaacaaagttacctctaacgcagcgacacaaaatttgttataatatgcttgaggaagcaggcacactacagagcacgtgaaggtgagtaggctcagccttgtgctggactgaatagttatgtgtgccggatgctctttcaagcaccaatgagtagggttttgcaccctgtaaccttatctttggagagacggactacttcaatctttcaacgagcatccagtccctgtctgctctctcaaatactattttgagggatgtgttatgctaaaaattgtttaccctatctgctgtggaatggatgtccacaaatcctttattgttgcctgtattgcttccaccaacgagcagggcgtaacaacttacaaaagcaagcgattttccacctttacaggcgatttgcgtcgctgtgccagatggctcgcagaaaacaactgcaaagatgtgtgtatggaatctaccgggaagtattggattcctgtttacaacatcttggaaaccacttgcaatgttgtgcttgctcatccaaaatatgtgaaagccattcgaggcaagaaaacggataaacgggatgcaaaatggattgcagacattttcaagcatgaccttgttgcgggtagctttattcctcctgcggatattcgtcaacttcgtgatttggttcgttatcgttggaaactcactaatttcactactggtgagaaaaaccgggcgcaaaactgtctgactgtctctaacttcaaactggacgatgtgttctctgatgtttttggtaaagcagcctccgcaatcactgctcgtattctggaaaatccaaccgaaaaaatcacggatgtttctggatttcgaacaaaaggaatgaaggctaccgatgagcaggtgcttgccgcagtggatggagagatgtgtgtcgaacaagctgaaaagctccgcatcatccgttcccacatgaagaatcttgacctttgcaaaaccaacctggaatcgctgattctgacaactgccgaaaaatatctttcacaactcaatcttgttatgacggtgccgggtatccaatcctttgccgcaatcggaattattgctgaaatcggagtggatatgtctgtgtttcccacctcaaagcatctttgctcttgggcagggcttacgccgcaaaacaacgagagtgccggaaagaagaaaaccaccagaatcagccgtgccggaaactatattaaaccgttacttgttcaatgtactctctgtgctatccgtgccaaacaattccaagaggttcgtaatcgctatcttgctctcaaaaaacgccgaggacacaaaaaagcaatcattgccattgccagaatgatactgactgccatctacaacattctgaaaaagaatgagccttacaatccagagctttaccgcaatatcgatagaccacctgtacaccgtgaggtttctttggaagaagctgtttttattctacaacgtcaaggctatttggtaactgctccacctgtagcttaaatctcaagtataattttttcgcccgctatcagggggcttgcttttgtgcgccctttttcggaatggtgctcaaattacagtgtttcaacct

SEQ ID NO: 7979 - DNA, 1332 bp, unidentified
  source 1..1332: mol_type = unassigned DNA; note = element_c706c8c
  misc_feature 1: note = core
  misc_feature 2..299: note = LE
  misc_feature 300..1106: note = CDS
  misc_feature 1107..1332: note = RE
  misc_feature 1105..1326: note = bridgeRNA
gaatgatatggactccctctccctgaaactccgcgtgccatactgactcagtacacgctgaagaactggaggttatcatgtccaacattcaaactattggcgttgacctcgccaagaatgtgttcagtattcacggcgttgatgcatatggcaagtgcgtcctacgcaaaactgtcaaaagaaacaaactgttagacactttcgccaatctaccaccctgcatcatcggtatggaggcctgctctggtgcacatcactgggcaagggagtaaattaaactcggtcatcatcctaaaatcatggcgtccaaattcgttattccatatcgacaaaatgaaaagaacgatgccaacgacgcagaagctatctgcgaagcagtatctagacctaaaacacgatttgtctctataaaaagtgaagagcaacaagcggtgctttgcttgcatcgaatccgtcaggggctaattaaaacaagaactgctaccatcaaccaactcagagggttactctctgagtttggccttgtgatgccgcaaggtcgctactcggctcaacaaactattggtagtatcctcgaagatgcggaaaatggtttgccgctgttggctcgtgaactacttcaagatctatcgaataagattcaaagccttaacctcgaaatcctgcactatgatcgacgcgtctcggctttagttcgtgaaatggcttcagcaaaggccctcatagatattcctggtgtcggtgaacacagtgcaagtaccattgtcgcaaccgtcaatgacgccaagcaatttggatctagccgccaattcgccgcgtggatagggttagttccaaggcaatactcaacaggtggtcatgttcatcttggtcgcatcagcaaaagaggcgaaaaacacattcgcacgctgcttatacacggtgcaagagctgtcattgcccgctgtaaagaaaagacggatagaaacagtttatggttacaacaactcgttgagcgacgaggttacaagcgtgcggctgttgccctagcagccaaaaatgcacgaataatatgggcattattgacgacaggaaacgagtataaagctaactatataaacggttagccctcaccgagtcaaagcaatagcaattgatgacaatacggtcagaccgagatgccttaacctgtttaattgggaagtagaaaatactgtctaacgaatgaggctggcatcaagcgaatatcatcagggtgacggatagaatccgacgaaacaccgaatgtagagctgctgtcagatccactgttgtcagcggtagctattgttgacaaaagagggagtccatgta

SEQ ID NO: 7980 - DNA, 1392 bp, unidentified
  source 1..1392: mol_type = unassigned DNA; note = element_c709d12
  misc_feature 1..3: note = core
  misc_feature 4..88: note = LE
  misc_feature 89..1129: note = CDS
  misc_feature 1130..1392: note = RE
  misc_feature 1160..1379: note = bridgeRNA
agatggggtggatggctcccgctcccggcatctaggtgccacagtgtggtttccatcacgggaccacgagcaagaggagccatccgtcatgaaaattagcaccgttgggctggatctagccaagaacgtttttcaagtacacgccgtcgatgaggcgggagaaggggtcgtccgcaaagcgctgcgccggcgccaagtgatgcccttcttcgagaggctcgagccttgcctggttggcatggaggcttgcggcacgagccactactgggggcgggagctctcggcgctgggtcacgaggtcaagttgatgccgccggcttatgtcaaagcctatgtcaagcgcggcaagaccgacgcgggtgatgcggcggccatctgcgaggcggtgacgcggccgagtatgcggtttgttgcgatcaagtcgcccgatcagcagtcgctattggcggtgcaccgggcgcgtgatctgctgatccgccagcgcacccagctggtcaacatgatccgtggccagctggccgagttcggcattgtggtggccaaaggcattcaccatgtactcaaccttgtggcgcggctgctcgatggagaggcgctgggcattcctgcgctggcggctaaggtcgtcatcaccctggcggagcagctgcgcgatctgcaggcgcggatcggggacctcgagaaggatctggtgagctggtccagagaggacccggtggtgaagtgtctccagagcattccgggcattgggatcattacggcgtcggccctggcggcttctgtcaccgatccgcatcagttcacgtctggccggcagtttgccgcctggctggggctgacgcccagagccaattgcagtggcggcagggagcgcttggggcgcatctccaagatgggcgatcaatatctgcgccgtctgctggtcaacggtatgacatcgcggcttcgatggcttcaccgccacccggaaacccatccctgggccgccaagctgttgcggagaaagccggccaagctggtcgctgtcgcaatggccaacaagaccgcgcggatcgcctgggccgtcatgacccgcggcgagatctaccgtgcccctcaaccgtcaagccagcagcaggcggcggcgtgaggacctgatcgcgcgaaaggatagagactttagcgattgcgagggcgatgagaagtgatggcgaaccggtcagaccggggattgggacaacccgacgaatgtctgggacgaaacagtccgcacagcagaatgggacccaatccgcggaaaccatcaaggccagcggtcacaatcaccgcatcaacaggccggacacaagactgcacccgaccaccacgccaacacttcaaatcattccttgcaacgcgggagccatccacaca

SEQ ID NO: 7981 - DNA, 1592 bp, unidentified
  source 1..1592: mol_type = unassigned DNA; note = element_c710d6a
  misc_feature 1..2: note = core
  misc_feature 3..240: note = LE
  misc_feature 241..1464: note = CDS
  misc_feature 1465..1592: note = RE
  misc_feature 9..214: note = bridgeRNA
ttagtaccataaatagtgtaagagagaaagtgatttctatcttgcactatttttgtataatgaagaagtagtatgacgatcgtcttttagggttgaaacatccgcaaataaaaactgtcatctacctcttcattattcatattcggttaagcaggttgggcaaaacgtccgtgtcacgagctaaaatgagtgtaatggtgcaggtaggaactacaaatcaaaaagaaagagggtaataaaatgatatctataggaatagatatagcaaaagaaaagtttacagtctgtgcattagaacaaggtagcaaaatcatttggaaaccttttgatattcatcttaacaaaacaaaagtagaagaattattaaagaaattagatactttaaatgaagaagtaaaaatagtcatggaagcaacaggtaaataccatcttccaatcctctatgaattaaaagacaaaggatactttgtaactgtggtaaatcctttaaaaatgaaacagttttgccgagtacttaactttagaaaagcaaaaaatgataatatagatgccatacaaatagcagaatatgggttaatgtactggaaagaattacaagaatacaaagtagattcagaaagtttcagagtcctaaaagaattaaacagatcctatcagcactatatggacttaagaatcaatcaaatgaacttcatagaccaaacaataagccaaacatttccaggaataaaaaaactaattccacatggatctaatgatttttcaaaagacaaactattagacttcttagaaatatggtggcataaaaatttagtattagaaaaaacagaagaaaaattcatagaagattttaaaaactgggcaaaagaaaagagataccatcctaatgctgataaagctaaatccatatacaagctcgcagaggaaagtatctcaactcaaccttctagtagctcgtatataaaaatgaacatacaagaaagaatagaattgataaaacatataaatcaaattctacatactattttatcacaaatgatagaaattgccgagcccttagaagaatatcaagaagcaaaaaaattctcaggaatatcagataaattagcagtacaaatcacagcagaatttggagacttatcaaaatttaaaaataaaaaaagtttagtatcctttgtaggaatagattcgccaccatatgagtcagggaactttaaagcagatcagagaaaaataacgaaaagaggcaatgcaatactaagaaaagtaggttatcaagctatgaaatgcatgatgagtgcaaaagatcctgaaaatgaaatatatttgtatatggtaaaaaaagaaaacgatggaaaagctaaaaaagtatgtaaatttgcaggactaaataaattcttaagaacatactatgcaaaagttatggcatcaaaacaagaaaagaagttgttaaaagtagcctagaattaagaatgcaatagttaaacaagccgattgtagccggcttatttgctgtgctcaaatttatactctaactaacaaggagaaaatcaaaattaattttacttttctccttgacttttgttagcagg

SEQ ID NO: 7982 - DNA, 1618 bp, unidentified
  source 1..1618: mol_type = unassigned DNA; note = element_c719036
  misc_feature 1: note = core
  misc_feature 2..288: note = LE
  misc_feature 289..1500: note = CDS
  misc_feature 1501..1618: note = RE
  misc_feature 20..308: note = bridgeRNA
tcctccctactacaatgtatttatgggtaaagtacacgacagccagtcgtgtctatatccatcttgttgctaaagctgttagaatagagagtgcaatgggctgacggccaaaatgctggacttttcgtccgtaaattagtctgtctgccggcctctcattcgcagccgttcgttttatgcaggttgaactgctggttaccagtacgtccgtgtcacaccacagtagatagaatcggcaatgagtaaaggttgggttcccattacaaatctaaataaggagttggatctatgaacgcagttggtattgatgtttctaaaggtaaaagtatggttgctgccctccgcccgttcggcgaaattgttgccaagccatttgaagttccgcatacttccagtggtttccatcagctagttgatcagctcaattctctggacggtagtactcggattatcatggagcatacaggacggtattacgaacctatggcccgatggctctctgactctggtttctttgtcagtacggttaatccaaagctgattaaggattacggcaataacactctccgtaaagttaaaacagataaagctgattccgttaagattgcacgctatgctcttgacaactggcaggatttgcgccagtataccagtatggatatcattcgcaatcaattaaaaaccatgaatcaccagttcagcttctacatgaaacagaaaacctcttacaagaacaacctcatctccctgctggatcagacttaccctggcattaatgacttctttgacagtcctgcccgcagcgatggcagccagaaatgggtagactttgtttcctcattctggcacgtggactgtgtgcgttctcttgggcttgctacgtttactgagcgctatcaaaaatggtgcaaacggcacggctataacttccaaccagagaaaccagcacagatttattcgttttccaaagaactgatttccgtgttcacgaaagactctgtgactaagtttttggttaagcaggctgtggagcagctcaatacggtatctttcacagtggaacagctccgcctggaaatgaaccgtctcgccgcccaactgccagagtatcaggtagtcatggccatgaagggggtaggcccctcactcggccctcaacttatggccgaaataggcgatctctctcgcttttcccatcgtgaagcattaactgcatttgccggtgtggaccctggggtcaatcaatccggcacctatgaggcacgtagtgtccgtacatccaagcgaggatcaccgcagctgcgcaaaacgttgtttcagatcatggacgtcctaattaagtccgctccttccgatgacgctgtttatcgctttctggacaagaaacgtttagaagggaagccgtactatgtctacatgactgccggtgccaataagttcctgcgaatctactatggccgtgtgaaggagtatttagctgccttacccaaaccagaataaccttgacttaacatccaataggccagcgttttacggtggtctttttgtagttcctaaacgctgcataaaacttttttgcaaacttcctcaattctctattgacttttcatttgcaggc

SEQ ID NO: 7983 - DNA, 1155 bp, unidentified
  source 1..1155: mol_type = unassigned DNA; note = element_c72841a
  misc_feature 1..2: note = core
  misc_feature 3..207: note = LE
  misc_feature 208..1143: note = CDS
  misc_feature 1144..1155: note = RE
  misc_feature 12..213: note = bridgeRNA
cttgtcttatgactttttcggttccatgcgatgatggggtcaccgcacgccacgccactcatggcgtgcggtggcggcggttggatcgtttcgcgcccggtctgtcaggaccgtaatcaagtgagaccgaccgccgtcttcgcatgaggcctgaacggatacgcagcggcacgtcgccctgcacgacaagcataggacatgacgaagatgacacatgatagcatcggcatcgatatctcgaaacgacatttcgatgcgcaccgcctcaccaccggcatccacaggcggttcgacaacaccgccgccgggttcagagctttcgggcgctggctcggcacgggggatcccgggctggtcgtctttgagccgaccggcccctaccaccgcgatttcgaggcggcgttcaccggacggctaccgctggtgaaggtcaacccgctgcaggcccgccgctttgcgcagtctcagggcacgcgcgccaagaccgatgcggtggacgcgcacatgctggcgcgcatgggccgggcgctggaactggccccggaccggcccgccgaggaaatccagatcgttctcagagacttgcgcgtcgcccgctcgggcctggtgcgcgaccggaccgccctgatgaaccggctggccgcggcgcggctgccgctcgtccggcggctcgcgaaggcgcgccttgcacaggtcgagcgtcagatcgccgccctcgacgccgagatcgacgcccgcctcgacgcctgcccgaagcgccgccgcgccgtgcagatcctcacctcgatccccggcatcggacgcatcaccgcgcgcagcatccttgcggaatgtcccgaaataggcaccctgcgccacaagcagatcgccgctctcgccggtctcgcgccgatgacccggcaatccggcacctggcgcggcaaggcgaggatagagggcgggcgcagacacctgcgtgaagccctcttcatgcccgccctcgtcgcgatgaagaaaaaccccgacctcagcgccaagtacgaccggctgcgagaagccggaaaacctcacaaggtcgcgctcaccgcactcatgcgaaaactcgttcaactcgccaacacactcatccgcgaggacaggacatggcacccaaaacccgattgacacggacggata

SEQ ID NO: 7984 - DNA, 1363 bp, unidentified
  source 1..1363: mol_type = unassigned DNA; note = element_c72c8c1
  misc_feature 1: note = core
  misc_feature 2..88: note = LE
  misc_feature 89..1114: note = CDS
  misc_feature 1115..1363: note = RE
  misc_feature 1123..1355: note = bridgeRNA
caatgggatggacccctcctcacctaagcggcattgaagtgccagactgggagtgtcaccaaccagtcgatagggagaacgggttgccatgaagcttattcgggtcggagtggatttggcaaagaatgtctttcaactgcacggcgtcgatcggagcgagagggtgatctggcgctggcggctacggcgcgagaattggatcgaagtgctgtgcgagcaactcgagcctggtgctgaggttggcatggaggcatgcggcggagcgcatcattgggcacgtttgctccagcgcctgggttacaaggtgaagttgatcgcgccgcagtttgtaaagccttacgtgaagagcaacaagaacgacgctgcggatgctgaagcgatctgcgaggcgatggatcggccaggaatgcgcttcgtgccggtgaagacggtcgagcagcaggacatccaggcgctgcaccgagtgcgcgcgagcctggtggagcagcgcggtgccaaggcgaaccagatccgtggcctggtcgcggaatatggactggtggcgcccagggagttgctgcatctgcgtcgcgccttgccgtgctggttggtcgacgagaacaacggcctgacggctaggtttcgctcgctactgcaggggttacgcgaggagctgatcgctctggatgcgcgcattgtcgagctcgaccatgagatcgagcggcttgcccaagctgagcccgccgccaagaggctgatgcagctgcggggcgtggggccgatcatcgccacggcgatgcttgccaccgtcggcgatgcgcggcaattcagcaatgggcgtcaaatgtcggcgtccttgggactgacgcccaagcaatgcagttcaggcgggaaggaacgtttactcggcatcagtaaacgcggagatgcctacctacgtagtttgctcattcacggcgcgcgtgccgtgatccgaactgcaagagcgaaggacgatccgctcagcaagtgggtgattcggctggccgatcgcagtcatcctaatgtggccgcagccgcgctcgccaacaagaccacccgcatcgcctgggcgatgttgagccgcgaagccaattaccaaccggcaatgagttgaaggaggacaccactcacgattgctaagcaagctgatcgatggctgacaggtcgaaccggcgctggaagagcccgcaaatgtctgggtgcgtaaaagcccgtcaaagcgattgggatcccgcgcgaacagcccatcaaggcccggcaccgctttaaatcggtgctgcagctagaggccggatatacgtgagcagtcgtacctcacggccagaacgtcggtctgctttgcaaacgaggaggggtccatata

SEQ ID NO: 7985 - DNA, 1398 bp, unidentified
  source 1..1398: mol_type = unassigned DNA; note = element_c735086
  misc_feature 1: note = core
  misc_feature 2..97: note = LE
  misc_feature 98..1144: note = CDS
  misc_feature 1145..1398: note = RE
  misc_feature 1157..1396: note = bridgeRNA
taatgggatggtccgttccgctcccatacggcatcacaatgtgccataatagttgagtccggtgaggacaactattaaccaaggagcgaaacgaaccatgaaaaacattagcagaaataaaatgattacgacagttggtattgatttagcgaagggtgtttttcaccttcatggagtagatgctcagggtgaatttgttgttcgaaaacgattaaaccgaagtaaactcatagaatttatggcacaattgactacatgtctggttgccatggaagcatgtggcggctctcattattgggcacgcaagtttgaagatatgggccatgatgttcgtttaataagccctcagtttgtgaaaccatatgtgaaaggtaataagaatgatgaggcagatgccgaagcaatatgcgaggcagtgcagcgacctaacatgcgttttgtacccattaaaaatattgaacaacaggatattcaaagcattcaccgggcaagagaacaagtggtatgcagacgcacagctcaaggcaatcagatacgcgggttattgatggaatacgggctggttattcctcaaggtcgaaaagttttatgtggccaacttcctgacatacttgccgatgcagacaacggcctctcactgatgttccgagaccttttatcaggtctctgggaagagatgattcatttagaacaacgtgttgctgaatatgacctgcaaattgaaacgttgagtaagcagagtgaagtttgccaaaggttgatgaaagttccaggtgttgggccgatggtggcaacagcgctggttgcatctgttgctgatggtaaagtatttaaaagtggtcgtgaaatggcggcttggttggggcttgtgccacgacaacattcaacgggcggtaaaccaaagttattgggcatcagtaaacgtggtgacacctaccttcgtaagctgattattcatggggcaagagcagcactacgctggacagataaaaaaaatgataaacgaagtgtctgggcaacaagtttgaaagaacgaagaggtcagaatgttgccgctgttgctttagctaataaaattgttcggacagcttgggtgttgatcaccagaaatgaagattaccaaatgagtactgcaaaaatttaaggagaacataaacttttcaacaaattgcgtggattgagtaagatgatggcgacaaaggcggacagccacatttcttaaaacctgacggggacttaggccataaaaggccgttatactgataaggtcagaaatgtgcagcgaattccatcagggccagaagcaacctaagcttcaactaaaggccggatatatgtatgcaactttccttaacttgccaatcaaacttttccttgcaacgcgggacggaccatata

SEQ ID NO: 7986 - DNA, 1141 bp, unidentified
  source 1..1141: mol_type = unassigned DNA; note = element_c738a2b
  misc_feature 1..2: note = core
  misc_feature 3..208: note = LE
  misc_feature 209..1009: note = CDS
  misc_feature 1010..1141: note = RE
  misc_feature 19..214: note = bridgeRNA
cttgtaataacgcgatcggttatcgtcggcatattccgagaggaatggcctgtcgcggttagcgaccgcgacaggccgctggcgatcggatcgcacccatcctgagcagttcgtggctgccccgtagcaggatcgcgccagcaccttcatcggacccggatggttgccggaacggttaggttcgcttcacaaggcggggtcgacgaggatgacacagactagcacaaggacggctggaatcgatacgtccaagagcaagctcgatgttgcggttcacggccggaccgaacattggcaggtcgccaactcactggcgggatggcgtattctgacgaccaaactggccgaggctgacgtgagccgaatcggtatcgaagcgaccgggggctatgagcgcggcgcggtcgaacacctgcgtgcggcaggcttcacggtgctggtgctgcagccgatccaggtcaaggcgttcggccgggtgcatctgcgacgcgccaagaacgatgtgctggatgcggtgttgatcgccgcctgcgcggcagcgatcgagcaggtcagagatgcgcccgatccgcgcctggcggagctggccgaacatctgaccttcctcgagcagatcgaggacgacatcaagcgctgcaagacccggctggagcatatcgatcagcccgcgctgagacgcctggtgctgggtgacattgcccggctgaaggcacggcggctcgcccagatccgttaccttgccaggcaactacgcgctcaccgcgatctcgctgcccgccttgacctcgtgctcagcattcccgggatcggcgaacgcaccgcactcgcgctcttgatccgcatgcccgaactcggccgtgtcagccgcgaggaggctgcggccctcgcggggctcgcgcccttcgacaacgacagtgggcaacataaaggccaacggcgcatcgccggcggtcgggctcggctgcgacgttcgctgtttgctgcggcgcttccggcggcattccgctgacgcctaaccgcagccggaaaggcccacaacgcagctctcatcgcttgcgcgcgaaagctgctgatctatgccaacactgtcatccagcgcggaacgccttggcgcgaacaggcgtccgcgacttaatggttg

SEQ ID NO: 7987 - DNA, 1269 bp, unidentified
  source 1..1269: mol_type = unassigned DNA; note = element_c748767
  misc_feature 1: note = core
  misc_feature 2..195: note = LE
  misc_feature 196..1254: note = CDS
  misc_feature 1255..1269: note = RE
  misc_feature 4..206: note = bridgeRNA
ctgtgaatatagtattgtggcttgatggcctgaccctttctctgactgaccccgtgtcactgtattgaattgtcggtcatcaggtcgccccggcaacgggggagatgtgactttataggagcctgacgggcacgccccttcacagtcttgtcctctctgatcggtgtctgggcatcgtcaattatggaggaaccaatgagcaataccaaatcgagagccgtcattgtcggcgtcgacacacacaaatcgacccacgtcgccgtagcgattgatatacacggagcgcgtttggcaaccctatccattcctgcaaaccccaagggctacctggaattggaagcttggtcgcagtcacagggggacgtggctgcgttcgggattaaaggaaccggatcgtatggcgcaggcttgtgcaggtcgcttctgaaccagggacacaacgtctttgaagtgacgcgtcccaatcggcaattgcggtatgcaaaggggaagtcggatagtgttgatgccgaaggagctgcccgttccgttctcagtggtcaagcaacggcccgacccaagaccgggacgggctcgtccgagatgatccggcatcttaagattgcgcgcgatacagccgtaaaaagtcgttctcaggccatggtgacgttgaaaacactcatcataaacgcgcctgccggattgcgagacttgctcgatcggatcaagggcaaggtgacactgatacggcatatcgcggcattcaggccgggggagatcacctcgacaaccgcatctgccaaagcagcaatgcgtgccttggcgcggcgttggcttgccctgcatgaagaaatccaaatccacgacacagaactggaacgattggccgccaagcgggcgcccaacttgctcgcatcccacggcattgccacgatgactgtcgctgaaatgctcattctggtcggagacgatccaacacgcatcagatcggaagcagcgctggcaaaactttgtggcgtctgtccgatcccggcatcaagcggcaaaaccaaccgctttcgtttgaaccgtggcggcaacagtcaagccaatgcagcactattccgtgtcgcaatcgtcaggatgagcggccatgaaccgacgctcgcctacgtcaaaaagcgtacccgtgagggaaaaagcaaaagagaaataattcgctgcctcaaacgctacatcgtccaggaaatcttcaaccatctttgctgccctaaggtcgacaaaatagcaggttgacagatataggagctt

SEQ ID NO: 7988 - DNA, 1497 bp, unidentified
  source 1..1497: mol_type = unassigned DNA; note = element_c766ada
  misc_feature 1..2: note = core
  misc_feature 3..250: note = LE
  misc_feature 251..1477: note = CDS
  misc_feature 1478..1497: note = RE
  misc_feature 16..230: note = bridgeRNA
ctaatgagagttaacggatccgcccgggtcctcgggcagacttcggactggtggccactggcaggtgagcactcgtgcttcctggacgttgagtcctgacgaaagaccgtgcctctgccggtaaccgggtgagttgatcgctgatgggatgtcgtgcccgccgccgtggcgtgagcactgattcattaggtcgctgatggttctcccgaccggctgccgaaggagatcgacaccgcagacgggagaagcgttgctgttcatcggggacgactgggccgaggaccatcacgatgtggagttgatggatgcggcgggcaaacggctggcgcgagcgcggcttccggagggagtggcgggcatggcccggctgcacgcgatgatcggcgagcagctcggcgatgatgccgacgagctggccgatcaggtgctgatcgggatcgagaccgaccgcgggccgtgggtgcaggcattgatcgcggccggataccgggtgttcgcggtcaacccgttgcaagcctcggagtatcgcaagcggcacagcgtttcgggtgccaagagcgacgcggccgatgcgcatgtgctggccgacatggtccgcaccgatgcccaccagctgcgcacggtggccggggacagcgcccgggctgcggcgatcaaggtagtggcccgcgcgcacaagacgctgatctgggaacgcacccggcacacccagcggctgcggcacgcgctgcgcgactacttcccggccgcgctggaggccttcgacgacctggccgctgccgacaccctggtgctgctgacccgggcgccggatccgttctcggccgcccggctgaccactgcgcaggtcagcgcggcactcaagcaggtccgccgacgcggcattgccggcaaggccgccgcgatcgtcgccgcgctgcgcgccgagcatctgggccagcccgaggccgtcaccgccgcctatgccgcgaccgtgcgcgccctggccgctgtgctgactgcgctgaacgagcagatcaagacccttgaaggccaggtcgaggcgcattttggcgagcacccggccgctgagatcatcttgtcccagccgggactgggaccgatcctcggtgcccgggtgctggccgagttcggcgacgcccccaagcgctacgccagcgccaaagcccgcaagaactatgccggcaccagcccgatcacccgagcctcgggcaagaagaaggtcgtgctggcccgcttcattcacaacgatcgcctggtcgatgccctgggcgcccaggcgttcgccgcgctcaacgcctcgcccggcgcccgcgcctactacgacaggcaacgcgcccgcgagatgagccacaatgccgcgctgcgccagctcgccaaccggctggtcagcatcctgcacggatgcctcagaaccggcacgctctacagcgaaacaaccgcttggtcgcatcgcccagaaccgctcacagcttgacatctaagctcctgggatgt

SEQ ID NO: 7989 - DNA, 1366 bp, unidentified
  source 1..1366: mol_type = unassigned DNA; note = element_c76d413
  misc_feature 1..3: note = core
  misc_feature 4..115: note = LE
  misc_feature 116..1123: note = CDS
  misc_feature 1124..1366: note = RE
  misc_feature 1136..1364: note = bridgeRNA
agatggaatggtcgcctcccgcctcagcagctgtttcagcgactgagctgggtgcttggtttcggtgcaaatatgcgacagtgtcttttccgttctttcgtgaaggagagattcaatggagcccacgacgatcgccatcgatctggctaagcgcgtttttcagatccactttgtcgatacggacggcacgattcacagcaaggcgctcaagcgtgcccaaatgttaccgtttttcgccaaccggccagcggcccggatcgtcatggaggcgtgcggtagcgcccaccactgggctcggcaactgagcaggcttgggcacgaagtcaggctcattgctgcccagttcgtgcgcccgttcgtcaagtcgaataagaacgacgcggcagacgcggccgccatctgggaggcttcccagcgcccaggcatgcgctttgttgccgtcaaatcggcgcaccaacaggcgatgttggcgctacatcgaatgcgccagcaactggtccggatccgcgtcatgcaagtcaatcaattgcgaggattactctatgaattcggcgtcgttttgccacaagggcgacgcccatcgatccaggccgctcaagcggcgatcgcgacgctggccgatcagtttccggcaatgctgatcgatagtcttcgggatcaattgtctcgacttcatctactcgacgagcaaattcaacgcatcgagcagcgcatcctcgaatggcgacgcggtgacccagcatgccgtcgtatctcagaaattccgggtgttggcctgttgacggcaactgcagcggtgtcggttatcggtcaagcgaaaactttccgctccggtcgggaatttgcggcctaccttggcctcgtgccgcgacagaacagctcgggtggcaaagtccggctgggcggcatcagcaaacgcggtgacgtctatttacgtaccttactgattcacggtgcacgatcagtcatctcgagttcgaaacacttaccagagcgattacgtgctctattaactcgacggccgacaaacgtcgtcgctgtcgcgctggctaacaagatggcgcgaacgatctgggcgctgctagcgtacgggcgaacgtatcaggcagcaccagcacagtgatcacgctttaaggcctaacccatccatggttgcacaggtgtattgaacgatggcaagacaggttggaccgcgcaaaggcaagcctgagacatttctcggacctccagtccgccaattagattaggacctttgcggcgcaatccatcggggccggcgggcacgcccgcgatcgagtccggatataagtccgcaaccaccctcctgccgcgcacaatcgccttgcaaatgggaggcgaccatata

SEQ ID NO: 7990 - DNA, 1365 bp, unidentified
  source 1..1365: mol_type = unassigned DNA; note = element_c76ffd0
  misc_feature 1..2: note = core
  misc_feature 3..79: note = LE
  misc_feature 80..1099: note = CDS
  misc_feature 1100..1365: note = RE
  misc_feature 1106..1352: note = bridgeRNA
tgatggcgtggacggcccctgtatcagcgtagctgtgtcatgatgtggtcgttgtaggtccacgtctaggagttggtacatgaagcaggaggttgttaacgtcggtttggatctggcgaagagtgttttccaagtacacgcgatcggcagcgacggggccgttcttgtccggcgcaagcttcggcgcgcagaggtggtcggctttttcaccgatcttccaagttgcctcgtgggtatggaggcatgtgcatcggcgcaccattgggctcgggaactaatcgcgttggggcacgaggtgcggctgatgccacctgcctatgtgaagccgtacgtgaagcgtgggaagaccgacgcagcagacgcagaggcgatctgcgaggcggtgacccgcccaacgatgcggttcgtcgccgtgaagaccgttgaacagcaggcagtgttgatgctccacaagagccgcgatctgatggtgcgacagctgaccatgctcatcaatgccttgcgagggcacctcgccgagtacggcattgtaaccggcgtcggcgcaggcggcgtgaccgcgatgctcaaggctttgtatgagcaacaggaagagctgcctgttcatgctctgtcagcactgcacggcttggcagcccaactgagggcgcttgctggcgagatcgaccgattggagacgcagatactcgcatggcaccgcgccgacgagacgagccgccggctcgccacgatcccgggcatcggtcccatcacggcgtccgcgatctcagcggcagtgccagatgcgtctctgttccgatccgggcgtcagttcgcagcatggctcggcctcacccctcgagccaacagctctggcggcagggaacgattgggcgggatcaccaagcagggcgatggctacttacggcggctgctagtggtcggcgcgacggcggtaatgcgtatgacgcgcaaaaacgctgatcggcagccttggatggcgcagctcctggagcgcaaacctgcgaagatcgccacggtcgcgctcgccaacaaaacggcgcgcattgcttgggcggtgatgtcgcgcaaagaagtctacgcggccgcaaccgcgtgaccgtcgtctgcgctggcgggtaacgctcgttggcaggatggcgtgagagtagctgagtagtgatgacgaaccggttagaccgggggtcggcaaaacccagggggtcacagcgcttggagcgcgatgacgtgattagggagccgacctgcggacttcatcagggccagcagccatacggcgctgcgcgaacaggccgaacacatggatgcacccgaccggtgctcattgctccataaagctcttgcgctgcaggggtcgtccacaca

SEQ ID NO: 7991 - DNA, 1356 bp, unidentified
  source 1..1356: mol_type = unassigned DNA; note = element_c776149
  misc_feature 1: note = core
  misc_feature 2..75: note = LE
  misc_feature 76..1101: note = CDS
  misc_feature 1102..1356: note = RE
  misc_feature 1125..1353: note = bridgeRNA
taatgagatggtcacccccgacaccctgcgaaggctagcctttcgcagggtgtttcaattccggaggccatcgccatgagcaacactgcattgatcggcatcgacctaggcaaacatagtttccacctgcatgcccaggatggctccggccgcgagctgtttcgcaagaagaccacccgcccacaactgatcaggctgctggcacaacagccgccgtgtacggtggcaatggaagcctgcgccggatcccattgtctggcgcgggaaatccaggcgctggggcatgtggtcagactgatctcgccgcagttcgtccgccccttcgtgcggggcaacaagaacgacttcatcgatgcacaggccatctgcgaagccgcctcccgcccctcgatgcgcttcgtgacgcccaggaacgaagcccagcagaccctgtcggtgctgcaccgcatgcgcgaatcgctgatccgcgaccgcaccaagaccatcaaccaactgcatggcttcctgctggagttcggtatcagtctgccacgcagcatggcggtgatccggcgcctgtccaatgtcctcgcggaacatgagctaccggtacgactagtcgtcctgctgcagcgtctgcatgctcatttcagttacctggatgaacagatcaaggcgctggacaaggaggtcgtcgcccaagtcgaggcggatgacctgggcagccgcctgctgagcctgccctgtgttggcccgatcaccaccagcgtgctgattgcagaactgggcgacggcaagcagtatggctgcagtcgagacttcgcggcgtccgtcggcctggtgccaaggcaatacagcaccggtggccgagccaacctgctgggcatcagcaagcgcggggacaaaaacctgcgccgattgctggtgcagtgcgcgcgggtatatctgcagcgtctggagcatcagcgcggagcgctggcggactgggtgcgcgccttgctcgtgcggcgtcattcgaacgtggtggcctgcgccctggccaacaagctggcgcgtatcgcctgggccatcgcggcgaagcacacccgttatgaagcggggccagacggctgcgccgcctgaccccgctgttgttgcagtaccacgaaacgcccttccaggttttgcgatagctgaacaaccgatgacgtgaacggcccactggcctggcgaagaacctggcacaaaaatcggcttttgaagccgttagccttttcaggatcgtcaggcgcgactctcatcgtggcgcggggcaagccccatattgacgccggatagatttaggcaagccaaacacccatcgctgatcagtattgcaaaaacgggggtgaccataga

SEQ ID NO: 7992 - DNA, 1380 bp, unidentified
  source 1..1380: mol_type = unassigned DNA; note = element_c77a486
  misc_feature 1: note = core
  misc_feature 2..216: note = LE
  misc_feature 217..1275: note = CDS
  misc_feature 1276..1380: note = RE
  misc_feature 13..231: note = bridgeRNA
ctacttagagactgggtgtaggaccggtgtccggccagactcggccaggtgctcggcgggacgctcccacattgcggctgcccaccggtgtcatgggtgtggctctcatggccccgccgggcaccgcgcggggagtggctggaaaggggtttgtgctgctcgaagtagcggtgccctcctcgctaacaacatcaagttcagtagagggaggcgccggtgacggtgatcatcgggatggatccgcacaagcggtcggccaccatcgaagtcgtcgacgagcgtgggcgggtcttggccaccggacgatatggaaccgataaggctggctatgcgcagctgctggtggccggtcgcaggttcgggcagcgggtctgggcggtggagggctgcaatggcgtcggccggcatatcgcgcaccgcctcgtgcacgagggcgagaccgtgctggacgtgccggcgaagctgtccgcgcaggtgcgggtcttcgccaccggcaacggtcgcaagaccgacccggtcgacgcgcactcggcggcgatggtcgcgctacgcacccctgacctggtgcgcgttcaagtcgaccccgacctggttgtactcgggctgctggtagatcggcgtgatgagctgggtcgggccaggacgcagacggtcaaccggctgcaccggctactgctggagctgtttcccggtggggccaagcagttcctgtccgcccgccaggcccgcgccctgatcgccaccatcaagccacgcgacctggttggcaagacccggcgccggctcgcggtcgaactgatcggcgaggtcgagaccatcgacaagaagatcaaagccgcggacaaggacctcaccgagctcgtcaccgcccgcggctgcaccctcatggacctgcacggcattggcccgtccggcgccgcccgactgctggttgacgtgggtgacatccgtcgattcgccgaccgcaaccggttcgcctcctggaacggcaccgcacccctggatgcgtcctcaggacagcagcagcgccatcggctctcccgggccggcaaccgccggatcaaccgaacgctgcacatcatggctgtcgtccagctccgcaaccgcaccccaggccgggcctacttcgacgccaagaaagccgccggcaagacctcaatggaggccatgcgcgccctgaaacgacgactctccaacgtgatctacgcccgcatggtcaacgaccagcacaaacgccaggcggcaggcccgggacgactctgcaatccagcgtgaccgacctgaccccggacatcggctcttcggacaagccacaacccggacccgccatcacccaccctaaacccgcgctccagacggtgcgttgacagaaaggggtgc

SEQ ID NO: 7993 - DNA, 1357 bp, unidentified
  source 1..1357: mol_type = unassigned DNA; note = element_c77fcfd
  misc_feature 1: note = core
  misc_feature 2..65: note = LE
  misc_feature 66..827: note = CDS
  misc_feature 828..1357: note = RE
  misc_feature 1130..1351: note = bridgeRNA
taatgggatggtccgccccgtcctcccgccgcagaatgcggccccttggcacaggaggattggctatggcggaacgtaacaaaccaaaggacgcagccgtgttcggcgtcgatatcggtaagaatgttttccacgtggtcgggatcgacgcatccggcgcgccgatccagcgagcgagctttcggcgggatacgctgctgcaattttttgagcgcgcgaagccgacggtcgttggcatggaagcctgtccaggctcccaatggctggcgcgaaagattatggccttcggacacagggtccggatcgtccccgcgaggttcgtcaaaccttacgtcaagtccaacaagaacgacatcatcgacgcggaggcaatcgccgaggcggtctcgcggccaacaatgcgcttcgtcgaagtgcgctcgccggaacagatcgatctccaggcgctgcaccgcgtccgtgaccggatggtggcccagcggacacgactcgtctgtcaaatgcgcgccttttgcctggaatacggcatcgcgatgcatcagggcgtcggcagattcaaggcagacctgccaaaagtcctgacgaatgaagagaacgatcttacgccagcgatgcgcaagctgctcgccagcctcttcgaagatgtgcgacagctcgaggcgagaatctctgagatctcgcgcgagatcgaagcgacagcggcagctgatgacaccgcccggcgtttgatgacgatcccgggtattggaccgctggcggcgacggcgctgctcgcagcggcaggcaaaggcgcgcagtttaaaaaagctcgagatatggcggcttagctcggacttacgccgcgcgaatattcaaccgggggcaagacgacgttgctcgggatcagcaagcgaggaaacgcctatctgcgccggcttctgatccacggatcccggtcatgcctgctacacttggaccgagcgcgggatcggcttggtggctggctcgggcggcttcagagccgaatgcacaacaacaaagcggttgtggcgcttgccgccaaggtcgcacgcatcgcctgggtggtcatgacgacgcccggcgcaacctatgagaagcgcggtccggcagcagcctgattgccttttctacagactgcgaggttcgggagagtgatgacgaaacagttgatcggcacgccgtaagctctgggcaaaaaaccgggcttcgagcccgcaccattattcgagaacggcgtgtgcgcatctcatcatggcctggctgcaacagcagctcgctcgcgagaggccggatacatttatgcagactggaacgtcagaacaagcgcgacccttgcacggacggggcggaccataca

SEQ ID NO: 7994 - DNA, 1655 bp, unidentified
  source 1..1655: mol_type = unassigned DNA; note = element_c780dec
  misc_feature 1..2: note = core
  misc_feature 3..253: note = LE
  misc_feature 254..1483: note = CDS
  misc_feature 1484..1655: note = RE
  misc_feature 57..269: note = bridgeRNA
ctggtatattgaaattgactcataaaacaagtcattaacaatatacatctcctttctttatcaacctataatcgcggttgatagcgatatttgtatcttgtaatatattgaaatatgtgaatgtggatttgtacttctccttgtggcattgactactttagaaaggctcctaccacaccttattccaaaacaatgattagttagatgagtctttgaattcgcattttgaaccaggttttgtggtttaagtgttgtggcatcaagcacatcgcacatatattttgaaaggatgttttttatgtttttagtcggtattgacattggtaagaacaagcactctttttgtatcattgaaaaagagactggtgaactgatagttaagccaaaattctttgataacaataatgtcggtttcgaagagttaatttcttctatccaaaaactttcaaatcaagatattcttattggaatggaagatacaggtcattatcattttactttattaaaatttcttttagataagaaatatcaagtagctctaattaatcctgttactacaaatcttacacgtaaactccagggtggaatcacaaagactgacaagctggatacacttactatttgtgatgttttatcttctagtcaaagagttaaatcttatcgcattacaaaagttgacagatttgatatgtatgaacagaaacagttaactagagagcatcacaatttaaaagaacaattaaatgtacttaaaaatcgtttacagaaaagcattgatatcgtatttcctgaattcaacagtttatttgattcgaaatatggaattgtatacgtcaacattttaaaagaatttggcagtgcagatgctgtagcacgtgctgatattcgtaccatccgtaaatgctttgacatcaagggaaaaggtagacgtattgcacttactgccgaaaaattaaaggaagcagccaagaattcagtaggatttccttctactgcagaagttgttcaaatcaaacaccttatcattcaagtaaagttgattgaagaacaaatatccgagatagataaaaaaatagaagagttttctatctccaacaactctcctatcctatccataccagggatctctcatttctctggtacttcaattctagctgaattaggagatatacacaactactcaaaaccttctcaagtaattaaatttgcaggtgtagcgccaattacttatgaatcttcacagtttactgcacaacacactgctattacaaagaaaggttctaaatacttaagaaagacactataccaaataattacatcagtcattaaaaacaatgaagtttttagaaactattaccaattaaagctttcacaaggcaaaggcaacaggtgtgcccaagggcattgtgttcgtaaactgatgagagtaatctttcatcttttaagtacaaacactcagttcaatccgtcattgcttgtttaaaagaacctacatatatgacttatatatagatcaattcacttcaaatgaagttgttttagtcatgcctaatattcacattttcaaagaacagatactttttaattcactaacttttcaatagatgacattttcaaactttttcataaattactattgatttttatatagttag

SEQ ID NO: 7995 - DNA, 1434 bp, unidentified
  source 1..1434: mol_type = unassigned DNA; note = element_c78405f
  misc_feature 1..3: note = core
  misc_feature 4..256: note = LE
  misc_feature 257..1153: note = CDS
  misc_feature 1154..1434: note = RE
  misc_feature 1172..1421: note = bridgeRNA
tgatgtggtggacggcgcccactctgcggcatcgaagtgccatagggtggttgcgtcaaagcaaaccacattgaggggagccgtccatgggtgaagttagcacaattggtgtcgatattgcgaagtcggtatttcagattcacggcgtcgatgcggaaggtgcggtggtcatccgcaggcgcattggtcgagccaaggttcttgagttctttaccgatctgccgccttgccttgttggcatggaagcctgcttggcatggaagcctgcgcaacggcgcaccagtgggcgcgcgagcttaagaagctagggcacgacacgcggctcatgccaccgacctatgtcaaagcctacgtgaagcgcggcaagaatgacgctgccgatgcagcggcgatctgcgaggccgtcacacggccatcgatgcgttttgtgccgatcaagagcgtcgagcagcagagcgcgttgatgctgcatcggacgcgggacctcctaatccgccaacggactcaactgatcaatgcacttcgtgcccatctggccgaactcggactggtggcagcgaaggggcatgaaggattgcatcagctggttacggccgtggcggagagcagcgatgagcggttgccaagtaacgcacgctttgcctgccaggcgatcgctgcgcaactgagcgcggtgcagacccagatcaacgggctcgacaagcgcatcacccaagcccatcgcgccaatccagacagcaaacgactcgaagccattccagggttcggcgtgatcctatccacggcggtcgtggcgacgatgacagacccaaaggcgttcaagaccggccgcgagtttgccgcctggatcggattggtgccgcggcagaactcctccggtggcaaggagcgccttggctcgatttccaagcagggcgatcgctatctgcggcgactattggtcctcggtgcaatatccattgtcgggaccgcgcgcacgcggccggataagtatccctgggtaaccgaactgctgggtcgtcggccggccaaggtggtcgcggtggcgctggccaacaagatggcgcggaccgcctgggcggtgctggccaggggtgagacctatcgggcaccgatacgcttaagcagcgctgccatcgcagcggcagcctgaaaaggtttggcattcggaatgtgaggttgaggttacgtagagggcgtacaggaaagtcgagggtgatgatggtttgatgcgaaccggttggaccggggatcgggagaacccgctaatgggtcaagcactcttgagtgcgggctaatgatagggacccgatctgcggattacatcaaggccagcggctatgagcgccgcacaaaaaggccggacacatgacttgcacccgaccgcaagctaagaaccaaaaaatcccttgacccgtgggcgccgtccacaca

SEQ ID NO: 7996 - DNA, 1479 bp, unidentified
  source 1..1479: mol_type = unassigned DNA; note = element_c788fab
  misc_feature 1: note = core
  misc_feature 2..137: note = LE
  misc_feature 138..1187: note = CDS
  misc_feature 1188..1479: note = RE
  misc_feature 1219..1475: note = bridgeRNA
atggtatggacgcctcccaccccgctgccccacgacgaaggccgtgaccaccgctgagcaggcggggactcgcttcgacaacatcgaagtgccaaagtggcgttgtgtctagcaacgaccaagacggaggccccgaaatgaatcgtacgacgtatggattggacctggcaaagagcgtgatgcaactgcactggatcgacagcgagaccggcgagatcgggcgaaagaagctcactcgcgccaagctgggcgaattttttgcgacgcgccagtccgcgcgagtagcgatggaagcgtgtggcagcgcgcaccactgggcgcgcacgttggggaatctcggtcaccaggtggaactgctgcccgccaagcaggtgcgcgccttcgtgcggagcaacaaggacgacgcagccgacgcgcgggcgatctggttggctgcgcagcaaacagacatccggcgcgcgccgatcaagacggtggagcagcaagcagttatgtcgctgcaccgcacgcgctcgcattgggtaagcgtgcgcacagcgaccaccaacatggtcaggggcctgctgtacgaatttggcgtggtgctgcccggtggcaagcaggccggcctaaaggcgatcggcgctaaccgggcgcagatcgacgacaagctgccgcagttgatgagccggctggtcgaccagcagcttcagacgctccgggacatcgagcgcagcatcgagcagatcgaagccgagatcgccgagcagcagcgccagctcgacaaggcgcgagtgcttcgcgaggtgccgggcatcggcgtactcggcgcgactgcgctggcggccacgctgggcgatggcaagggctggcgatctggtcgggagttcgccgcgagcctgggcttggtgcccgcgcacagcggcacgggcggcaagacgcagatcggtcatctgagcaagcgcggtgacccgtacctgcgaaccttgctgatccacggcgcgcgcgcagtgattgccggcgccaagaacaagccgacgtggctccagaacctgttgctgcgccggccgcctaatgtcgtggcggtggcgctagccaacaagctggctcgcacggcctgggcattggtagcgcatggtcgggcgtatcgaccggagtggaagagcactccaccaagtgggtgcaacgcgcaagcgttctcggcctgaacgaaaaacgcggaacaaccccataggagagaaagccgcaaagagtgcgtgagtcgagttcaagaagtgatggtgaagcggtcggaccgcagatcgggtaaagctgaatgatggtgtggatgagcttcggcgaaatccacctgggagataagcaccgatctcgcgaatgaccatcaaggccagcggcgggcttcgtcccgatctgcatcaacaggccggatataagaccgcagtcgttaccgtcaagccagaacttcgaagacttgcttgccacacgggaggcgtccatata

SEQ ID NO: 7997 - DNA, 1800 bp, unidentified
  source 1..1800: mol_type = unassigned DNA; note = element_c792bb5
  misc_feature 1..2: note = core
  misc_feature 3..72: note = LE
  misc_feature 73..1110: note = CDS
  misc_feature 1111..1800: note = RE
  misc_feature 1575..1787: note = bridgeRNA
tgttggggtggacggccccacggcatcgtgtgccagacttggggttgtcagcatccaagacaggagccgtccatgaccgagtataagcgcattgccatcgacacgtcgaaggccgtgttcaccctgcacggggtggaccaggccgaccgcccgacgcttcggaccgatctccggcgcgcccagctgctcccctttttgcgcaagctgccggcgaccgagatcgtgctggaagcctgtggcggcagccatcactgggcgcgggaattgaccgcgctcggccaccgggttcggttgatcccgccgcagtatgtgaagccgttcgtcaagcgcgccaagaacgaccgcaacgatgccgcggcgatctgcgaggccggcggccgcccggggatgcacttcgtgccggtgaagtcggccgagcagcaggctcaggggatggtgctgaaggtgcgcgagacgctggtggcgcagcgcaccgcgctggtcaacgcgctgcgcggtcacgccgcggaatatggcgtgatcgccggcaagggcctgagcaacatcgcgctgttgctggaagtcgttgctgcggcgcctgccatcccggcggcggcgggggcgatgatggcgctgctcggcgcggagatcgatcgtctcgacgccaggttgcgggagctggagacgacgctcgccgcgacacacaaggcgaacccggtcagccggcggctggcgacgatccccggcgtcggtccgatcaccgcgctgagcctggcgatcgagatcgatgcggcggcgttcgaatccggccgtcacctggcggcctggatcggtctgacaccgcgggagcattcgaccggcggcaagcagcgcatgggcgggatcagccgggccgggaatgaacggctgcgcgcgttgttcgtgctcggcgcgacctcggtgatcaaggttgccgagcgaccgggcaacaagctggcgacggactggctgctgaagctgctgcggcgcaagccccgcaaggtcgcggcggtggcgctcgccaacaagatggcgcgtacggcctgggccctgatgacgagcggggagacgtaccggcgcgagccggccgccaccggggccggggcggcatgaccgggtttcgtgacataacgattgggagtggaaccatgccccgtccctcgatcggcgaccgcgccatgaccgacgccgaacgccaggcccgctaccgggccgcccgggccgccggcgccgcggtgatccgcacgcgcccccaggccgaccggcgcagccgcagccggcgctggcacgcggccgtcgccgaactcgcggccatgcaggccgagtatgccgcctggcaggaggcgctggcggagagcctgcacgacagcgccaccggtgcggccttgcaggcgatctgcgacctcgacctgaccgagttgcaggcggtcgaacccccgcgcgggttcggccgtgattgaccaaccggatcgcctgtgcggcgggggccccgcgatggcccacgcggcacgggccacgatgacccgtgcggcggcagcccggcctcggccgggaccaggccgcttcacgtgtcgctgccagggtgcatgagcggaacgagatgaccatcggtcgaaccgacgctccggaaaacccgcccgggtcaacggctctcgaagccgcgggcttgtttgggaccggagcgcgaaccccatctgggccagcggccatggcgccgcgccaacaggccggacacatgagcgctctcgacccgagtgtcagaattctcgatcttcctcttgcatcccaggggccgtccacaca

SEQ ID NO: 7998 - DNA, 1423 bp, unidentified
  source 1..1423: mol_type = unassigned DNA; note = element_c792dc5
  misc_feature 1..3: note = core
  misc_feature 4..85: note = LE
  misc_feature 86..1117: note = CDS
  misc_feature 1118..1423: note = RE
  misc_feature 1162..1410: note = bridgeRNA
tgatgtagtggacgacgcccgctcccggcatcggagtgccatagggtgatcgttgaagaacgaatcacctgagggggtcgtccacatgcagactagcaccatcggcattgatctcgccaagaacgtcttccagctccatggcgtcgacgcgcacggcaaagtcgtgctcgtccggcagctgcggcgcggtcagatgatcgcgtttctcgccaaggtcccgccgtgcctcattggcatggaggcctgcgcgacgtcgcaccactgggcgcgcgagatcacgaagctcggccacgaggtgaagctgatcccgcctgcttatgtgaaggcctacgtcaagcggcagaagaacgatgccgctgacgccgcagccatatgcgaggcggtgacacgaccgagcatgcgtttcgtacccatcaagtccgccgatcagcaatccacgctcgctgtacaccgcacgcgaaacctgttggtcagccagtgcacgcagctcatcaacgcgctgagggcccatctcgccgaactcggcgtcgttaccgagaagggtcgcgacggccttgccaggctcatcgccattctcaaggacgaggcgacgctgcagtcgcttcccgccgctatgctacatgctctgcgcgcaatggtggcagggcttgcagcgctgcagacccagatcgccgagctcgatcgctcgatccgcgaccagcatcgcacgagcgacgtgagccggcgtctcaagaccgtcccctcgatcggactgctcggcgcgacggcgctcaccgcgaccatcacggacccaggtgcattcaagtctggccgcgacctcgctgcctggatcggtctcgtgccgaagcagaactcgaccggcggcaaggagcggctcggcggcatcagcaaacagggcgaccggtatctgcgtcgcctcctggtcgcaggtgccacggccgtcgtgcagcatgcccgacgtcaccccgagaaatatccctggatcacaaagctgctcgccaggaaaccggcgaaggtcgtcgcgatcgctgtcgccaacaagacggcgcgcatagcctggtcgatcatgaccagaggcgggacctatcgttcgccggcgctcgtggcggcggcctgaaggggcttggcaatgggagcctgtgacagcgccgaatgaacttcagacgcgccggttgcggatcggcaaccgagggcgcgcagatgcgggggtgatgatggcgtgatgcgaggcggtcgatctgtagatcgggagaacccgtttgtgggtcacgggcttcgagcccgcgattttgatagggatccgatctgcggactacatcagggccagcggtcatgcgccgcgcaaacaggccggacacatgacttgcacccgaccgcaagcccaacgccagattcctcttgcaccgcgggcgtcgtccacaca

SEQ ID NO: 7999 - DNA, 1114 bp, unidentified
  source 1..1114: mol_type = unassigned DNA; note = element_c794c11
  misc_feature 1: note = core
  misc_feature 2..84: note = LE
  misc_feature 85..897: note = CDS
  misc_feature 898..1114: note = RE
  misc_feature 882..1109: note = bridgeRNA
caatgagatggactcctccctcctacggcgtcattgcgccagactgaaggttgtaaaacaagcaatcccggagggggagcccgcatgaaacttaaacgcataggcgtggatttggcaaagcaggtttttcaagttcatggtgtcgacagccatgagcaggtcaaatgccgcaagcaactcaaacggcatcagatgctggattttttccgccaactggagccgtgtgtggtggcgatggaggcctgtggcagcgcgcattactgggcccgtgaattaggcaagctggggcatgaggtgcgtttaattgctccgcagttcgtcaagccttacgtgaaaggcggcaagaacgacgcgaacgatgcgcaggcaatttgtgaagcggccagcaggcccaccatgcgttatgtcgaggtcaagacagtagagcaacaggcgagccagtcggtgcatcggatcagaggtcggctgatcaaggctcgaacagcattagtcaacgaagttcgtgggttgctggccgagtttggtttgatcgaatcacgcaaaggcattgcggcaacgcgcgaactactgtgtcgggcgatcgatgattcagatagcagcatgcctggcacgatgcgagagctgctgagggggttgagcgaagagttgcaagggtatgacgagcgcttgaaaaagctggaacaactgatccagcgcgaggcgcgcgaggatgagcgggtcagacgcttaatgaagatcgaggggctcggcccgatcagtgccacggccatcgtcagtgctgttggcgatgccagacagtttgccagtggcaggcaattcgcggcctggctgggactggtgcccagtcaatactccacagggggcaaggagcgccagatccactcgattgcacagtgacatgaactgatgacgaaccggtcgcaccgacctgtgtgtaacctgctgcatccatcggccctctgctttgcaaggccgctagcccggttaggcgcacaggagcgaaattcatcatggctcaaggctaacgccttatcagaagtcgaatatacggaagcagtcgtacctaggttcagaggcagattatttcactggcaaaacgggaggagtccatata

SEQ ID NO: 8000 - DNA, 1573 bp, unidentified
  source 1..1573: mol_type = unassigned DNA; note = element_c7a267b
  misc_feature 1: note = core
  misc_feature 2..79: note = LE
  misc_feature 80..1144: note = CDS
  misc_feature 1145..1573: note = RE
  misc_feature 1335..1564: note = bridgeRNA
taatggaatggtgcggccgtgctcccgcccctccagcgaatgatgcttggatggggcgtccaaatagaggagcaccgctatgtccgacaaatcaaatttgctgattgccacgatgggcatcgacatcggcaagaacgcgttccatgtcgtcggcctcgaccggcgtggcgcgatcgtgctgcggcagaggtggtcgcgcggccaggtcgaagcacggctcgtgaacatgccgccgtgtctgatcggaatggaggcctgcgttggcgcgcatcacctgagccgccgactgcactcgcagggtcacgatgcccgtttgatgccggcgaaatacgtgcggccctattcgaaagggcagaagaacgacttccgcgacgccgaagcgatcgccgaggcggtgcagcgcccgacgatgaaattcgtcgccaccaagacggccgaccaactcgatttacaggcgctgcaccgggtgcgggcgcggctggtcagccagcgcaccggcattatcaatcagatccgtgccttcctgttggagcgcggggttgcggtgcgccaggggctgcgtttcttgcgcgccgagctgccgatcatcctcgccacccgctctgacgtcctgtcgccgcgcatggtgcgggttatcgaggaactagccggcgattggcggcgggtggacgagcgcattgacggcctgtcccaagaaatcgaagccttggcccgtcaggatccggcctgtgagcgtctgatgacagtgcccggcattggaccgatcatctcaagcgcaatggtggcagcgatcggcaatggtgcggtattcacgaagggacgcgacttcggtgcctggctcggactggtgcccaagcaaatctcgaccggagaccgcacgatcctgggcgccatatcgcgacgcggcaaccgctatctgcgggctctgttcgtgcaggcggcttgggtcgtgctggtcaggatcaaggactgggatcggtacgggctcaaagcctggatcgacgccgctaagaagagattgcaccacaacgtgctggcgatcgcgctggccaataagcttgcccgcattgcatgggcggttctcaacaaggagcgcgggttcgaatatgtgaagacgcgcgcgacggcgtcccaacctgcatgagcgtggcacggtgctcggagccgtcaaggccaagcccggcgggtggccgctgagagcggccagccttgacagcccctgcgcgcggcgccccgcagcaacggcaggccgggacgaaggaacgaccctaatggcacgaacaaaggaactgcaccgacaaggaagacagagatgacctaacaccgcatccaattcccgccgaggtctgcgagaggatgagacgagatggaggatcggtcttcacggcgcatgcgaaacctggcgacccaaatggcccgctcgaggtctgaccgctaatgagaacgtatgcgcgctgatatccatggtggcccggagcacagcacgctccaaccagaggccggatacattgatgcaagaccccaagccgacagatcgcacgaagcctcttgcaacgcacggccgcaccataca

SEQ ID NO: 8001 - DNA, 1219 bp, unidentified
  source 1..1219: mol_type = unassigned DNA; note = element_c7ac150
  misc_feature 1..3: note = core
  misc_feature 4..242: note = LE
  misc_feature 243..1205: note = CDS
  misc_feature 1206..1219: note = RE
  misc_feature 41..227: note = bridgeRNA
tcttgtatgttcacgccgctgcttgactgggctccagccgggcggtctactcagggacgcttgagtagtgagcgtcgagatgccgactctcttcggaggccatgatgagcctgcacaggagatcagcactcggcgctcagcgtcgggcgtccggtcgaacggtatcaaaggccactccacaccggagtcgagcctgcattcacaaggctgaccgtgcacgacgtcccgaaaaggagcccacgatggaggcagtcctcgggatcgacatcggcaaaatgaaatttcatgtgaccttgcagtttcccgacgggacccgccgtcggaaggcctgcgcgaactcgcccgccggctgcacggacctgctcgcctggatgcgtcggcagggcgcgacgcgtgtgcacgccggcctcgaagcgaccggcacctacggcgaggtgctggcgacccgcttggtcgatgcggggcatcaggtgagcctgctcaatccggcgatcattcaccattacgccaagagtcggctgtcccgcgcgaaaaccgacgccgtcgatgccgacgtcatcgccgagtacgtggcgaaagaacacccgcccttgtggaccccgctgccgcgggagatccgcgagctgcaggccctcgtgcggcgactcgatgcgctgatcgggatgcagaccgaggaacgcaaccgcgcacaggccgggggactcacgccggccgtcgagcagtcgatcgccgccgtcctgcgccatctcgagcagcagattcagcaggtgcgtgaccagatccgcacgcacatggatcagcacccgggcctgcgcgcccagcgcgacctgttgaccagtatcccggggatcggcgaggccacggccgccctcctgttagcggagctctttaacaaacgcttcacctccgcacgacaggcggccgcattcgccggcaccgtgccgcggcccaacgactccggcctccaccagggccgtcgcgtgatgtgcaaagtcggaccgagtcgcgtgcgcaaaggtctctactttcccgcaatcgcggcgatccgcttcaacccgagtctgcagccgctcgcgcgtcgcctcaaagacgcgggcaaaccgccgatgctcatcattggcgccgccatgcggaaactcattcacctggccttcggtgtactcaaatcgggtcgcgcgtacgacgccaccctcgcgaaggcttgacaggtaacacggta

SEQ ID NO: 8002 - DNA, 1442 bp, unidentified
  source 1..1442: mol_type = unassigned DNA; note = element_c7b0f9f
  misc_feature 1..2: note = core
  misc_feature 3..78: note = LE
  misc_feature 79..1149: note = CDS
  misc_feature 1150..1442: note = RE
  misc_feature 1167..1429: note = bridgeRNA
tgttggggtggacggcccccacggcatcatgtgccaagattggagctgtcgcagcgtccaacagaggagccgtccgccatggaatttaagtgtatagccgtcgacacgtccaagtctgtcttcaccctgcacggggtggacgagcacggtcgcccaatcctgcgccgggatctgagccgggctcggttcgagacgttcctggccaagatctcgcctaccgaggtggtgctggaagcctgtggcagctcccatcactggggccgggttgcgcaagcgtcggggcatacggcgcggctgatcccgccgcaatacgtcaagccgttcgtacagcgcggcaagaacaaccgcaacgacgcggaggcgatcggcgaggcagcatcacgccccaccatgcgctttgtgccggtgaggtcagccacggctcaagccgaggcgatggacctgaccgcccgcgacctgctggtgcggcagcggacgcagctggtgcacgccgtgcggggtcatgcggcggagttcggcgtcatcgcggccaaaggcattgcccaggtcgagccgctgttgaggaagatcgctgaaaccgacatgccgcaggctgcaaaggagacgctggcccagctaggccgggtcatcacgcagttggatgcgcagctggcagaggtcgatcagcgcctgaccgcgcagcacaaggccaatccggtcagtcaacgcttggcggcggtcccgggtgtggggccagtcacggcgctgacggtggcgatgaaagtcgatgcgagccagttcgagtccgctcgccatttcgcggcctggctcgggttgacgccaagagaacactccaccggcagccgccaatgcctcggcggcatcagccgggccggcaatgaacggctccggcaactgctggtcgtgggagcgatggcggtgatccgccatgccaagccggggagcaagacggcgagcccctggctgctgacattgctggagcgccggccgcgcaaagtggcagcggtcgctctggccaacaagatggcccgcatcctgtgggcggagctggcaaaggttccaactgatcggcttcgatcggttggaatgccagcggagggcatgatggcgaacggcacggcttaccggcgcacgccgcaagccgcctgaccgctcgtcgtcgccaaggagcaaaagggccaacgtaggagatggcaaacggtcgaaccgacgaacaggacaccccgcttggtgcagaggcacctcgatgccgcatccatgtttggggcttgttcggcgaaacccatctgggcggagtagccaaaggttccatcggcaaagccgatggaatggctacggagggcagcggtcatgcagccgcgtcgaaggccggacacatgaccgcactcgttccgtgagccagatcaaacaaaaccccttgcgctccaggggccgtccacaca

SEQ ID NO: 8003 - DNA, 1614 bp, unidentified
  source 1..1614: mol_type = unassigned DNA; note = element_c7b6439
  misc_feature 1..3: note = core
  misc_feature 4..292: note = LE
  misc_feature 293..1495: note = CDS
  misc_feature 1496..1614: note = RE
  misc_feature 11..312: note = bridgeRNA
tttggtacaatatttgcatagtctactgctgacgacagttggtatacagactatgcttattttagttataataagaaggtaatggactgacggtcactccttagaactaagcgtttgtgtttgaaagagtcatccgccttcttgttataaagattcgattaagcaggttgttctgatttttgaaagaatggttaaccattctttcaaaaattgcgttcgtgtcactaaccaaaatgaatcgtaataagcttcggtggaaacattacacatcttaaatgaaagaaggaatgttatgattagcgttggaattgatgtatccaaaggaaaaagcactgtttgtatgatgaaacccggcggtgaagttttatctgcaccgtttgaggttgttcatactaaaaccgaactgcttaaccttgttcggataatcaaatctcaaaatgaagaagtacgagtcattatggaagataccggacattaccacttgcctgttgcaacactgcttgttgataatggtatctttgtttgctctgttaatgccctgcgtatgaaaaaatattgttctcaaagtattcgcagagctaaaaccgataaaattgattctatacatattgcttcttacggtatcacatattggaatgaacttaatctgattccttgtactgatgatacatataaggaattgcaattattggcaagacaatattatcagtctgtttctttgcttgttaaagccaaagttaatttcagcaatcttttagaccgtgttacgcctgatattcaaagcgttttaaaggataatgcttcaaattctaagctgactgattttgttcagcgttattaccatttctcccatattcttgatatgggtgaaaaacgctttacatctgattactgcaaatgggcaaagaaaaagggataccgtttgtgcgaacgcaatgcaaaagaaatctttgctttggctcaaaacggtatccccgtgcttcccgatactcaatccaccaaaattgttgttacggaaactgtacgagtgattcacgaacttgaattatctcgtgacaccattttagcacaaatgcagtcttttgcaaagaccttgcccgaatattctgttgtcagagaaatgccttgtatcggtgatacattagcacctcgcattattgccaaaatcggagatgttcgccgtttcaaaaacaagcactctttaattgcttatgccggtattgatgcaccgccttatcaatcaggcaattttaatgcatcagaaagacatatttccaaaagaggtaatccttatctgagaaaaacaggatatgaaattatgcaaagccttatcaagcataaacctgaaaatgatgctgtttatgacttcattgtcaagaaacgctgcgaaggcaaatgcggtaaagaagctatgattgccggtcttaacaaattccttcgtgtttatttcggcaaagttactgagctttattccaatctgaatttcatgatttaactgtataactgtttaaacttttatttagctgttgaaaatgtttatttcaacggctttgtttgctgtgcctgtgtcttttgaaattttttctcttttttctcttgactttgtttagcagg

SEQ ID NO: 8004 - DNA, 1402 bp, unidentified
  source 1..1402: mol_type = unassigned DNA; note = element_c7bfe05
  misc_feature 1..2: note = core
  misc_feature 3..90: note = LE
  misc_feature 91..1131: note = CDS
  misc_feature 1132..1402: note = RE
  misc_feature 1149..1390: note = bridgeRNA
tgatggtgtggaacggccccgctaccgacagcatctaagtgctagaacgtggtcgttgcgagcaacgccacaaggatagggagccgttccgtgaagcaggttagcaccatcggcctggatttggccaagaacgtttttcagattcatggcgccgacgccgaaggcgcgccgattttcaatcgcaaactgcgtcgagccgagctgctgggctttttcgaaaagcttccgccgtgtctggttggtttggaggcgtgcggcggttcgcattattgggcgcgcgagatcgcggcgctcggtcacgacgtgcgtttgatcccgccgatttatgtgaagcccttcgtgaaacgaggcaagacggacgccgccgacgccgaagcgatcagcgaagccgtcacccgcaagaccatgcgtttcgttccgatcaaatcggctgatcaacaagcggcggccatggtgctgaggacgcgcgcccttttgatccgccagcaaactcaggcgatcaacgcgcttcgcgggcatttgtcggagttgggcgttattgccgccctcggcacggctaaagtcgctgcgttgatcgagatcgtacgggacgaggaggacgtttgcctgccaaaagccgctagactggctttggctgagatcgccgatcagatcgaggcgctgacgcgtcaaatcgcgaagctcgaacgagggatcgtcagcgaggcgaagcgcgaagaggacatgcgacggctgaccacaattccgggcgtcggagcgattacggcggcttccgtcaaagcgctggtcccggatcccggcgggttcaaatctggccgtcacttcgccgcttggctgggactgacgccaaagcctcattcgagcggcggcaaggagcggctcggcggcatatcgaaaatgggcaacccgacgctctgctcgctgctcgtttgtggcgcgacgtcggtcttgcggcgcgttaagggaaacgacaaagcgctgcgatggctagtcacccttttggcgcggcggcctttcaaggtcgtcgcggtcgcgctcgccaacaagatggcgaggattatctgggcgctgctcaccaagggcgggacatatcgaaatactggtgcggcaagcggcgcagcacgcgcctgagccgaacgacgaccaggacggactggccggcgcgacgccggacagaggcgaggtgcacaattagacgatgacccacgggacgaaatcccgaggcgagagaggccggcgcgacaatgcgcttacagcgcgtcagattgatcagcccctcgcatcgcgaatttcatcgaggccagcggtcttagaccgcgctgaaaggccggacatatgaccgcacctatcccgctgggtgaaatgtctgaaaaagcgcttgcccgcgtggccgttccacata

SEQ ID NO: 8005 - DNA, 1488 bp, unidentified
  source 1..1488: mol_type = unassigned DNA; note = element_c7c7dd5
  misc_feature 1..3: note = core
  misc_feature 4..256: note = LE
  misc_feature 257..1468: note = CDS
  misc_feature 1469..1488: note = RE
  misc_feature 28..254: note = bridgeRNA
ctaatgggagtggattggcgtgttggcggcatgtttcggtagttgtcgcgagacgctgattgttgagcccgctggccggtgagcacttgtcgctcgtgaggcgaggttgacctcttcgcgtagatggtgccccggccagttggcgggatgcctgtagcgctgatgggatgtcgtgccattgcgagcactgattcattaggacgccgccgggtgtctcgggctcatgggaatgaagggataccggaggtggtgattgatgatcttcatcggcgacgattgggccgaagaccatcatgatgtttatctgatggacgctgctggcctacgtttggcgtcgcggcggctgcccgaagggttgatcggaatccggcagctgcacgagctgatcgcgcgatatgcccaagaccctagggatgtcgcggtgggtatcgaaaccgatcggggtttgtgggtgacggcgctgaccgcggccggctatcagctgtgggcgatcaacccgatggcggtggcccgttatcggggtcgacaccatgtgtcgggagccaaatccgatgcctctgatgccaaactgcttgccgatctggttcgtaccgatcggcataaccatcgttcgatcgctggggatagcgccgatgccgaggcgattaaggtgctggcccgcgcgcatcaaagcctgatctgggcacggactcgacacgccaacgcgctgcgcagtgcgttgcgtgagtactatccggcagcgctggaggccttcgaggatctcaccgatcgcgacgcgttggcgatcctgggccgcgcacccacaccagcgcaggcggcacggttgagcttgacgaagatcagttcagctctcaaacagggtggacgccaacgcaatatcgacgcgacagcccgcgaaatccaggacacgctgcgaggcgaacacctcaatgcacccgaggcggtcgcgacagcatttggggccaccacccgcgccaccgtgaccattctggtcgaacttaacaatcaaatcagagagctcgaatccaacctggccgaccattttgagaaacacccggacgccgacatctaccgctccctgccaggacttggtgtcgtactcggcgcccgggtgctcggtgagttcggggacgacccgaacagatacaccaccgccaagtctcgcaaaaactacgccggaaccgcgccgttgaccatcgcgtcgggcaagaaacgcgctgtgttggcccgccatgtccgcaaacgccgcctctatgacgcgatcgaccaatgggccttctgcgccctgaacaccagccccggcgctcgcgtcttctacgaccaacaccgcgccgctggagacagccaccaccaagccctccgcgccctcggtaaccgactggtcggcatcttgcacggctgcctaaaccaccacacccactacaacgaacacaccgcctgggcccaccgcatgcccgccgccgcttgacacttagaagcctgggatgt

SEQ ID NO: 8006 - DNA, 1589 bp, unidentified
  source 1..1589: mol_type = unassigned DNA; note = element_c7d6ffc
  misc_feature 1: note = core
  misc_feature 2..252: note = LE
  misc_feature 253..1461: note = CDS
  misc_feature 1462..1589: note = RE
  misc_feature 6..223: note = bridgeRNA
tcgtattatgagatcaaccagttctttctggttgatccttttttcatttgcatagaggattaaagtagcctggtcgaacgtacctgcccgtgggacttgatcccgagtgctataatgttcaccctacttgtcatgaccatgattgaggctggttgggacgtaagatcccgtataacaagcgatgctatggagcgacaagaagaaccgtagggatgccggtgaatttaaacttacagggagagatgagatgaaatgaatccagttgtcggtctagatatttcaaaagaagaaagtcatggacaagcctttttagcgcgcggaaagctcttcagagggacattccacttcgagcacactcgtgatggcctagcaaatctacatcaagttttaaaggacgttgaatcggtatccaaacaacgtcctttacttattctagaagcaacaggacattaccaaagccctgttgttcagttcttagaggaacatcactatatttacattgtcattaacccgctaatctccaatcggcttagaaagtctcagcttcgtaaagtaaagacggatgctgctgacgcttacctattgggtgagttgtactacagggaagagtttgaaccttttaagaaaagaggtgtgcaacttctcaatctgcgctatcttacaaggcaatatgagactctttcaaagatgtgtgtatcgactaaactgcaattccaagctgttttagatcaggttttcccgggttataaaggcgtgtttggagctatgtattccggtgtttcactgcggtttttaagtgaattcccaacctcatatttagttttacagacggatgaagatacacttagagctaagatgaaagaactgctttcttcgaaacgggggcgttcagaggactggattaaccaacgggttcaacgattagtagatgcggcaaaacaaaatccatttcagcaaaccatgtatgcaagtcatttaatcaatatgagagttcttattacccttattcttcaataccaagagcatcttgctgaactggaacagaacatagatgctctggctgaagaaattgaagagtatgaattaattcagtcgattcccgggattgggcataaaattgctgcaacaattttatccgaaataggagaagtcgaacgatttgatcatcctaagaagttagtcgccttcgcaggcattgacccgagtgtctttgcttccggtaagtttacagcgactcgaaaccgaatcacgaaacgtggttccaggcagctgcgttacgcactggtgatggctgttcagtgtggacttatacgctcccgaaatatgcgaatcaaagcgttctatgaacgtaagagagctgaaggaaaaccacataaagtagctctaatcgcatgtgcaaataaactcgtccattggctctatgcgatcttaaaaaataaaaaggaatttcgtccaatttaaaaaatattattggcataaccttccaagacacaaagaaaattggagggttttttggcatgcctcattttaactataccacatgatttagaatcactttactggtaatgttgacaagctattagctggta

SEQ ID NO: 8007 - DNA, 1410 bp, unidentified
  source 1..1410: mol_type = unassigned DNA; note = element_c7e39a8
  misc_feature 1: note = core
  misc_feature 2..89: note = LE
  misc_feature 90..1130: note = CDS
  misc_feature 1131..1410: note = RE
  misc_feature 1161..1383: note = bridgeRNA
caatggtatggactcctccttccctatcggcatcaatgtgccaaacttagattgacgtttcagttaatgatgagagcgaggagaacactatggatattagtcgggttggtgtagatctagcaaagagtgtgtttcaactacatggtgtaaataaagcaggaaaaagggtttggaaaaggcaattaccacggaataagtggctaagcgtgatatccgagacaattgaacctggaactgaaatcggtatggaagcatgtgccgggtcacatcattggtctagagagctaattgccagaggctataaagttaaaatgataccgccacaattcgtcacaccttttgtcaaaggtaataagaatgatgctaatgacgcagaagctattacagaggctatggctcgtcccaatatgcaccctgttaaggtgaaaagtgttgagcaacaagatatgcaggcagtccatcgtatcagagaagaaataaagaatcatcgagtagccaagggtaatcagataagaggactggtagccgaatatggaatagttgctccagtgcaattaacctccctgcgccaagctatccctgtttggcttgaggatacatccaatggtctaacctcgcttttcaaacagttgcttcaagggttatgggaggatctgaccaccttagataaacgtatgaaaatacttgataagcaaatcatggtgattgcaactcagaacccgacagcaaaacgtttacagcagttgcgaggtattggccccttaatagctacggctatggttgcgaccttgggtgacggtaaacaatatcgtaaaggcagagatatggctgctgcccttggactaacaccaaaacaacatagttctggcggaaaagataaactactggggatcagtaaacgaggcgattcctatttaagatgtttgataattcacggtgcccgatctgccgttcaagcagcaaaaaataaggacgaccgcttaagtcgctggatagttagcctacaaattagaaggcataacaatgttgttgtagtcgccatggcaaataagatggcaagaatggcatgggtgatgatgaccaaagatgttgattatgacccgaacttttgttcagcatcagttaactgatagaaaaaggttagaagacaagattcaatttacgattgcgaaataagctgtgtaatggcaaacaggtcgaaccggcgtaaataaaacccgatgatgtccgagtgcgtgatagcacgtaatagcaatagggaatttacgcgcgaataaaccattatggcccggcatcaatgtatgccaccttaagaggccggatatacgtatgcagtcgagccagctgccgtttagcagattatttgcaaactaggaggagtccatatacaaactaggaggagtccatata

SEQ ID NO: 8008 - DNA, 1346 bp, unidentified
  source 1..1346: mol_type = unassigned DNA; note = element_c7e6158
  misc_feature 1..2: note = core
  misc_feature 3..65: note = LE
  misc_feature 66..1091: note = CDS
  misc_feature 1092..1346: note = RE
  misc_feature 1096..1336: note = bridgeRNA
ttatggatggcccgcccctcctgctgagctggtaggggcgattcggaacaaaggagggattttccatggatgtcgcggttctcggcattgatcttggtaagaacagctgcagcgtcgtcgggcttgatggctccggcaaagtcgttctccgacgtcgtgtgcaacgcaaaaccatcgtgggcctggccgcaaagctctcgccctgcatcattgcgatggaagcctgttgtggtgcccatcatctcggccgggttctctcggctgacggacacacagttcggctgatgtcgcctgaatatgtacggccctacgtcaaggcacagaagaacgatgaccgagacgcggaagcgattgccgaagcggcaacccggcccaccatgcgcttcgttgcacttaagaacgaagaacaattggacatgcaaaccctgcatcgagctcgggatcggacggtagtcgaacgaacgtctttgatgaaccagttgcgcgctattctgctcgagcgcgggattatcgtaccgcaaggtcgtgccaaattaagacttcggctggccgagcttatgcggcaaggtattgagcaattgagctcacgtatccgccggctgatcgaggacatgttagcgcggtggcagacgctggacgagcgaatcgcggcattcgatgccgagttctccgcggaggcgaagcagaatgaggctgcgcgccggctcacgagcattccggggatcggcgcgctcaacgcaaccgcgcttgtcgcagcagtgggggacgcgcagaccttcgcgcgcgctcgcaatcttgccgcatggctcggccttgtgcctcggcaggcgacgacaggaggcaagcctcgcctgcttggcatcaccaaacgtggcagcaaatacttgcgcaagatgctgattcaaggcgctcgcgcagctttgccgagcttgagccgaagcaacactcggctcggcgggtggttgcgtggtctcctcgcgagagctcattccaatacagttgtcgtcgccctcgccgccaagatggcgcggatcgtttgggctctgctgcgttacggcacaacgtttgagccgcaagcaatcgctatttgattccacgaccgaccggctttccattagcagtcggtcaatgatgtctgcgggtggttgagcgaaagatggcctgacagtcgatcggcgttctgcaaacctacggcggaaaatggcaccttgatgccgtcccccttatgaggagtggagcgcgcggatctccatcttggccaacggcatagccgaaaggccggatacgtttgtgcagactgtttgtgccagctgcaaaaaccacttgccgacggggcgggccatacg

SEQ ID NO: 8009 - DNA, 1400 bp, unidentified
  source 1..1400: mol_type = unassigned DNA; note = element_c7e7277
  misc_feature 1: note = core
  misc_feature 2..87: note = LE
  misc_feature 88..1137: note = CDS
  misc_feature 1138..1400: note = RE
  misc_feature 1173..1398: note = bridgeRNA
caatgaaagggactcctcccctcctgaagcttcaacgagctacattgatggtgaatacacgcctatcaatgaaaaaggggaagagtcatgaatcagcatacggcgattggaattgatttggcaaagcgagtttttcaagtgtgcatcatcgacacacgtaaccaacatgtgcatgtcaataaggcgctaaaacgacatgagctgctcgatttcatccgtcagcaaccacgttgtcgtgtgtttatggaggcttgcggcgggtcgcactattgggcacgacagataaaggcgataggacacgacgtcggtctgatttcacctcagttcgtcacgccttttcgcaaaggccacaaaacggatgctaacgatgcgctggccattgtcgaagcaggcctacgacccaacatgcgttttgtgcctgctaaaggaatagagcagcaagatatccagagcctgcatcgcattcgtgatcgctatatcaagcagcgtactcaactgatcaaccaggtacatggcttattgcaggagtacggcatgatcagcggttgcgggcaaaaatcactgacgcagtgtgtctggcgagcgctggaagatgcggaaaacgaactgaccatggtgatgcgcgacttgcttgctgaccagatggaagaattggatcgactcaacgaacggcttcagagccttgaccagcgagtagagcaagtaagtcgcgcgtttgcgccttgccgtcaactgatggcgattgaaggtgtcggggtggtatcagcgacgcaactttacagtgcgttgggtgacggtcgagctttccagaacgggcgccaggcatcggcttatatcggcctgacgccgaaacaatatagcagcggcggctctgccaatatgcgaggcatcgggcgtacggggcaggtatcactcaaatgcgccctcatacgaggtgcacatgccgccattcgtgtcgtaggcgataaacaagatgccagaagccagtggttacgtgcattagtcagtcgtgttggcaaaaacagggcggccgttgccttggccaacaaaaacgtacgcattgcgtgggcgatgctttgccggaaaacgccttaccgtaacgattttcatacggtccatgacgtgatggcgatataaaccgccgtccccgccacgttagcgaggtaattgggccgtcaccgtgttgccgagcactgaaagatgaaaaacaggtcagaccgaccttctcaaaacctgttgcgggcgtgggctgaaagaagccgcctccccgttgaggagagaaggtgcgcgacgttcattagggtcaggggttagctaccccaacaagagaccgactatacgcacgcatcggcttacgtttttcaaacatcggggcttgcaaccggggaggagtccctata

SEQ ID NO: 8010 - DNA, 1430 bp, unidentified
  source 1..1430: mol_type = unassigned DNA; note = element_c7f8717
  misc_feature 1: note = core
  misc_feature 2..135: note = LE
  misc_feature 136..1155: note = CDS
  misc_feature 1156..1430: note = RE
  misc_feature 1190..1427: note = bridgeRNA
atggtatggacgcctcccactttagaggtgaagtgagtaggtgagcttgcgaaggaagtggaccctccgggccgacggcatcaaagtgcctgaggtggaaggtgttcagtcttcacaggcaacggagggtccgagatgaatcgtatcgtggttggagtggatatcgcaaagcgggtatttcagctgcattgggtagagcccgagacgggcgagattgtggcgctgcagcttaagcgggagaagtttttggagcattttgccaaccgtaggagctgtttgatcggcatggaagcgtgcggtgggtcgcagcactgggcgcgatcgctgcagaagcttggtcatgaagtgaagctgttgtcggggcggatggtcaagccgtttgtggtcggcaacaagaacgatgcggcggacgcgcgcgggatctggatggcggtacagcagcctgggataaaggcggtggcggtcaagagcgaagagcagcaagcggtgctagcgctgcatcggatgcgcgagcagttggtgaagtttcgcaccgcgcagatcaacggtctgaggggattactcaccgagtacggcgaggtgatgccgcagggccgagccgggatcaagcgagatattcccagcgctctggggcgattggcggatcggctaccggcgatggtgatcgagaccttgcgcgaacagtacgcacgcctggccgagttcgacgagcggattagccagatcgagcggcgtctccgtcagtggcagcgtgaggactcagcgacccagcgcattgcgcagatccccggcgtgggtctgttgagtgcgacggcggcaatcgcgacgatgggcgatgcgagagcatttaaatccggccgccagtttgccgcctggctcgggttggtgccccagcaaaccggcacgggcggacgagtgcgattactcggtatcagtaagcgcggcgacaaatatcttcgcacgctgctgatccacggcgctcgttcggtactgacgcacagccaatcgccgcccgagtggttgagcgaattagtaaaacgtcggccgaagaatgtggccgtcgtcgcgatggcgaacaagatggcacgcacaatctgggcgctgacggcccatgaacgtgcgtatcaatccgggtacgtgagtcaaccggcgtagggttgcacacggtcgattaaccgttaacaaaggaaggtacgccaaaaggttgcgcaaggactacaacgtgtgatggtaaacaggtcagaccgtgacccgccaagcctgaatgtgcgtccgagctttcgagctcttcggagaaataaggtgcgggtcagcgaaatccatcagggcccgcaggctacggcttgcaaaacaggccggatataaacctgcagccttatctgtcaatcatcacaccgaatagctcttgcacgtcgggaggcgtccatata

SEQ ID NO: 8011 - DNA, 1208 bp, unidentified
  source 1..1208: mol_type = unassigned DNA; note = element_c8017c5
  misc_feature 1..2: note = core
  misc_feature 3..214: note = LE
  misc_feature 215..1186: note = CDS
  misc_feature 1187..1208: note = RE
  misc_feature 12..189: note = bridgeRNA
cttgtatcttgaacgtgttggtggttagctactactaactgaggtgaagactagcttgtgccaacccttaaggcttgaccttgtggcgtagataaagctcttcacctctccccaccccatgactgaacactggacggtatctaagggcatcgaccctgcatgtacaaggcgagtgtggagtggacgagggaaaattcacgatacaggaggcgaaatgttttatcttggcgtagacgtttcaaagaagacgttggactgcatgctgctcaatacttcgaccagcaagtcaaaatcgaaatccataccgaatacgaatgcaggcttccagcagttgctggagtggctgtccaagcagggagcgcccaatgctcacgtggtgcttgagccgaccggcgtgtatcacgagccagctgcgctagccctggccgatgccggcttaacgttgtcactcgttaatccagctcagttgcgtcaatttgccctggcgttgggattcaagacaaagaccgacaaggccgatagcatggttctagcccgctatggggccacgcagcagcccgaggcatggcagccgccgtccaaatcggcacgtcgactcaaagccctactggcgcgacgtgatgctgtcgccgacgacatacaacgtgaacaaaaccgacttgaagcgatcgaattcggcgactcgcccagcgaggtaagagcgtcgatcaacaaatcaatcgaattcctcgacggtgagctcaaaacgctggaggccatgatccacgctcatatcgatgacgaccctgacttacgcagcaataaaaaattgctcgagtcaattcctggagtcggcgagcgcgtctcgatacatatgaccgcattgtttgctgccaaaacctttacgagtgcagaacagctagcggcttacttggggctcgtaccagtgcagtgggagtcaggctcatcagtacgcggacgcccccggatgtctaaggccgggccaaaacatctgcgtaagctcctatacatgccagctgtgacggcccgccgctggaatccgcacatcaaagcgatgagcgaccgtctgctcgccaagggcaagaccctgatgaccgtgattggagcctgcatgcgcaagctggctcacttgtgcttcggagtcatcaactcccgcaagccatacaacgaaaattatgcaatgtaggacttgacgggagagacggtat

SEQ ID NO: 8012 - DNA, 1496 bp, unidentified
  source 1..1496: mol_type = unassigned DNA; note = element_c80b741
  misc_feature 1: note = core
  misc_feature 2..249: note = LE
  misc_feature 250..1305: note = CDS
  misc_feature 1306..1496: note = RE
  misc_feature 98..232: note = bridgeRNA
cagtgaggatgttgtcggccgtcgtgttgggatggccttgtgtgtaatccgccgtggttatgactcttttccgacctgactgtggtgtcttccatcggatctgtctggcctcggcggtgcacgcaccggcggtcggggtgacctaataggagcttgtcgaaggcctcgtcactgtcttgtccgaccggccggcggtgcgtgtcattcctaacccgttttcggttaccggaaaggatggcgagacttacgatgccaaaggcgaggatggaatccaagccgtcgtcgatgattgtggtgggcggggttgatacccacgccgacacccacaccgttgcggcactagatcaggtggggcgccggctcggatgtgcggtgttcccggcccatcgggccggctatcgcgccttggccgactggttggccgggcacggtgagatcagtgcagtcggggttgagggtaccggcagctacggcgctgggctgacccgctggttaagcgcacaccagatcacggtggtggaggtgaaccggccgaaccgggctgagcgtcgccgccgcggcaagtccgacccggtcgatgctgagcatgccgcggcagcggtgctggccaacaccgcgaccgcggtgcccaaggccagaaccgggctagtggaatcgatccggctgatccatgccacccgggctggcgcggtgaaggcccgtaccgctgcacggaacaccttcaccaacaccctgcggaccagccctgatgcggttcgagagcagctgcagccgctcactcgggcccggcaactcacagccgctaccggctaccgggccactggcgatgaccctgactccacggtgaaacggtgcctgcgccggctcgcggtccgcatcagccagttgagtgaggagattaacgccgccgaccatgagctggaccggttgacccgcgaactcgcccccaccatgcggagccggccagggttcggcccagaaaccaccgcgcagctgctgatcaccgccggtgacaatcccgaccggatcggctccgaagctgcgctcgccgggctgtgcggagtcagcccggtgtcggcatcctccggccggacccgctaccaccgcctcaaccgcggcggggaccggcaagccaaccgggccctgcacatgatcatcctcaatcggctccggcaccacccacctacgcgtgcttatctggcctcgcacagcctccagggccaagccaccccgcacctgcgccgggtgctgaagcgctacctggtccgcgaggtctaccagctgcttagccagctccagcgctagcctccgccgccgcgccgccgacttggggcaggcactgcctgcccccgcttcggcctgccccgggcccgccgaggctccgaggtcaagggcggcccgcagggccgtcgcgcagcgatcgcacagcgacccttgaggccggagaaagcgggcccgtaccatcacggcgcggctcttgacatacataggagcat

SEQ ID NO: 8013 - DNA, 1242 bp, unidentified
  source 1..1242: mol_type = unassigned DNA; note = element_c80d686
  misc_feature 1..2: note = core
  misc_feature 3..232: note = LE
  misc_feature 233..1213: note = CDS
  misc_feature 1214..1242: note = RE
  misc_feature 20..199: note = bridgeRNA
ctgatattgtttctcccgctcccgtcgcgctgaagggagcccgttcggtaaaccctgtgctcctccttgggccgctcagcccgcaataaagactggggatccggacggattcgacgctgtagctcgaacggtgtcttggggcgtcgccagcgaatgcgctggcgatgaccccgcatatcagggtgtgcatgtcgaatatggcgcatcgatccttgatccaaggagtaccacggtgacatgcaaagtaggagtcgacatcagcaaggcgaagctcgatgtggcgtggctgagagcggacggtaaatatcgctccaaggtgttccccaacaatgcgaccgggttcgtggacctgcttggatggctggattcccacctgccggggggcaaggcgacggcccatgtctgcatggaagccaccggcgcgtaccacgagggcttggcgctgttcctgcacgaccatgcggtggcggtctcggtcgtgaatccgctgcaggtcaagcgattcatggaactggagcgggtgcgcaacaagaccgacgatggcgatgcgaaggcccttgcgcggttttgcgacaagacaggccctgcgctgtgggaggctccttctgccagcgtgcgctccctgcaggcgctggtggcccggctggacacgctgctggagctcaggcagggtgagttgaaccgcctagaggtcgctcacgactcggtcaagccgtccctcacggcggtcatcgcgagcctggacgactccatcgaggacgtgcgcatgcagattcgcaagaccatcgatgacgaccccgatttgcagcaacgcagcgagcttctcgcatcgattcccggcctcggggacaggacgattccccagctgctcgcgtacatcgggcgccccgagcggttcacgagcgtcaaggcactgattgcctatgccagcctgacgccgatgatcaggcagtcgggaacctccgtggacaagcggcgaggaacgcacccccaggggcatcgggagctcaggaaggcgctctatttcccagccatggtggccggcagatacaacccgttggtggctgagttctggcagcgcctgaaggcgcagaacaagcccggcaagctcatcgtcgtagcctgcatgcacaagctcctggccatcgcctatggcgtcttgaggtcgggcaagcccttcgatgtgaaccactgcaagaaggcctgcgcttgacgggtactgcttgacaagcacaacggtgt

SEQ ID NO: 8014 - DNA, 1502 bp, unidentified
  source 1..1502: mol_type = unassigned DNA; note = element_c8117d4
  misc_feature 1: note = core
  misc_feature 2..224: note = LE
  misc_feature 225..1481: note = CDS
  misc_feature 1482..1502: note = RE
  misc_feature 14..236: note = bridgeRNA
ctaattgcacccgagagcgctgcgggccgccgtagcgttcgggtggcccggtgggctgggtccctaaccgcctgccggtcgcgctggtggcctggctttagaacgaggtgccagcctgccgggccgcgccgcggcgtggttcgaaagaggcgcgagcgccagcactgtaattaggcatgcccgccgcggcttccggttcggtgcgaacggtcgggagtgtgctgatggcggaagtgatgatcgggatcgacccgcacaaggcctcgcataccgcggtggcgatcgggctgtcggagcagcagctgggccagctgcaggtgtgcgcctgcccgtcccagacggaccagctgctggcctgggcggcggcctggccggagcgggcctgggcggtggagggcgccgccgggctggggcacctgctggcccagcagctggccgctgcgggtgagcgggtgctggacgtgccgccgaagctggccgcccgggtgcggctgctgcaggccggggacaccaacaagaacgaccccaacgacgccttctcggtcgcggtcgcggcgctgcggtccacggccaaacgcccggtgatcgccgaggaccacgccgtggtgctgaaggtgtgggccaagcggcaccgcgacctggcccgggcccgtaaccaggcctgctgccggctgcatgcggtgctgtgtgacctggtgcccggcgggatccgcaaggagatcagcgccggccaggccgcccgcatcctcgagcaggtcaggccagccgatgcggtcaccacggcgcgctgcgagctggctgccgagttcctcaccgacatccgccgcctcgacgcccagctgcgcaccaccaacaagaagctggccgccgcagtgaaagcttccggcaccagcctgaccggcctgttcggcgtcggcccggtcatcgccggcaccgttatcggcgacgtgcgccaggtgttccggttccccagccgggaccacttcgccgcctacgacggcaccgccccggtcgaggtgtcctccggcggccggaaggtctaccggctgtcgctgcgcggcaaccgcaggctcaaccatgcgatccacatggccgccatcacccagctccggtataagcacagccagggccgggcctactacgagaagaaactagctgagggcaagacccacaaggaggcgctgcgctctctcaagcgccggatcagcgacgcgatctacgcggcgctggtggccgacgcccggcaggccgcagctgcctgcagcaagggcccgggagggcaaccggggaacctctctgtctccagggcggccggctcacaccccgcgcacaccagctcttcggacaagccactcccgggcctgccaccaccctacggcccggcactacggcaagacccgcccccagtcagcccaaccgagcgcgtcggtaccgggttaggaactccccggccggctgaagaaatccgacacaaccactagacacggactgcaaagaggact

SEQ ID NO: 8015 - DNA, 1325 bp, unidentified
  source 1..1325: mol_type = unassigned DNA; note = element_c819303
  misc_feature 1..2: note = core
  misc_feature 3..68: note = LE
  misc_feature 69..821: note = CDS
  misc_feature 822..1325: note = RE
  misc_feature 1092..1323: note = bridgeRNA
ttaatgagatggtcactccctccttcccagtactatgctgaggacaggctttcattcggagaaccatcatggaaaacattgcgcttattggtatcgatctgggtaagaactctttccatattcattgtcaggatcatcgtgggaaggccgtttaccgtaaaaaattcacccgaccaaagctaatcgaatttctggcgacatgcccggcaacaaccatcgcgatggaagcctgtggcggttctcactttatggcacgcaagctggaagagttagggcattttccaaagctgatatcaccgcaatttgtccgcccattcgttaaaagcaacaaaaatgacttcgttgatgctgaagctatctgtgaagcagcatcacgtccatctatgcgtttcgtgcagcccagaaccgaatctcagcaggcaatgcgagctctgcatcgtgtccgtgaatccccggttcaggataaggtgaaaacaactaatcagatgcatgcttttctgctggaatttggtatcagcgttccgcgaggtgctgccgttattagtcgactgagtacccttcttgaggacagtagtttgcctctttatctcagccagttactgctgaaattacaacagcattatcactatcttgttgagcagattaaagatctggaatctcagttgaaacgaaagttggacgaagatgaggttggacagcgcttgctgagtattccctgcgttggaacgctgactgccagtactatttcaactgagattggcgacgggaagcagtacgccagcagccgtgactttgcggcggcaacagggctggtaccctgacagtacagcacgggaggtcggacgacattgttagggattagcaagcggcaacaaaaagatccgaactttgttggttcagtgtgccggggtattcatacaaaaactggaacaccagtctggcaagttggccgactgggtcagggagttgttgtgtcggaaaagcaactttgtcgtcacctgtgctctggcaaacaagctggccagaatagccgggcactgacggcgcgacagcaaacttacgaagcataaaggcagaaatacaccagtttaaacaatcattcatctggttttgcgaatactgatattgatgatactaacggcccaccggcctgttgaggaacctgtaaaacggaaaggctcattgaagccgtatattttctggaggttcatcaggcgcggaactcatcgaggcgcgggaataaaatcccattcagacgccggatagattcaagcaagccaacttgtcgtcaaaatcggtgttgcaaaaacgggagtgaccataga

SEQ ID NO: 8016 - DNA, 1654 bp, unidentified
  source 1..1654: mol_type = unassigned DNA; note = element_c82d740
  misc_feature 1: note = core
  misc_feature 2..525: note = LE
  misc_feature 526..1401: note = CDS
  misc_feature 1402..1654: note = RE
  misc_feature 1419..1650: note = bridgeRNA
taatgggatggtcgcccccgcctccgtggcaagagtacgctacggaggcaatcaccgaggggaaccatcatggaagaagtgacgctcgtcggaatcgatcttgggaagcattcgtttcacttacacgcccaggaccaaaagggtaaagaggtctttcgccggaaagtgacacgcaggcagctcgttgtgtcagcggcgacgtggaattcgatgaaaacggacggtttgaaattcacattgatgaagcgatagcgcgacggcgggataaatagtcaatctggctctgcgaccgcggctgacctcagtggctaatccgctgagaatgcggcaaccacgcgggaagcaggagaatggagcgaggaaaaataaagaagactgaggctctcgataaaccgggccccgaagaaaatgaaccaagaaaagttggttccacgcagtgagtttcacactgtcagtttttgacgactttcagatcgccgatgacacgttgagctattggcgaattttcccgcctgtactattgcaatggaggcatgtgccggtgcgcatttcatggcgcgcacgctgggtggcttgggccatcacgtccggctcattgccccacaccttgttcggccgttcgtcaaaagcaataaaaacgactttgccgacgccgaggcgatctgcgaagcggcatcgcgcccgtccatgcgattcgtcacacctcgaacagagccgcagcaagtcctgtcagcactgcatcgaattcgggaatcgttcgtgcgcgaccgtgtgtgcaccggaaaccaagttcacggaattcttctggagttcggcgtcagtttgcccgtgggcagcacggcgttgaagcgtttgccaaccatcatcgcccagcattcacttcccccccggctcgtgatgatgcttgagaggcttcatgcccactacaagtatctcgacggacagattgccgacctcgacaaggagctggctcgccagttgagtgacgatgatctcgggcagcggctactgacgatccccggagtcggcccaattacggcaagcgtgctgtcaagcgaggtcggtgacgggaagcagtatcgaaacagtcgtgatttcgctgcctcaatcggccttgttccgcgtcagcacagtacaggcggcaaagcgactctgctcggcatcagcaagcgaggggacaagaatatcaggcgtctccttgtgcagtgcgcgcgctcctatatgcgtgacgtcgaaagaagatctggtcctcttgctgactgggtacgtgctctcctcgggcgacgacactcgagcgttgtggcctgcgcgctggccaacaagctggcccggatcgcgtgggccatagctgcacggcacacggtattcgaagctaccggttctcgattgcaggatgcctgagagaggctgttagcgttggattaaccatctggttttgcgatcgctggaaattgatgacgtgaacggcataccggcctgaacgaacaacccgatagtcaaggaggcttccaaagccgatgtgttttttaggatcgtcaggtgcgactctcatcgtggcgctggggcagtgaccccatgaggacgccgaatagatttgcgcaagcccgtaacatcgtcgaaaccggcatttgcaaaaatgggggcgaccatagat

SEQ ID NO: 8017 - DNA, 1313 bp, unidentified
  source 1..1313: mol_type = unassigned DNA; note = element_c833f1d
  misc_feature 1..2: note = core
  misc_feature 3..188: note = LE
  misc_feature 189..1151: note = CDS
  misc_feature 1152..1313: note = RE
  misc_feature 28..201: note = bridgeRNA
cttgtgtccgcagattctgccagaatgtgcaaacgggcggttctaaccaaccgcccgttgctggatctgagcccgtacgcgctcaaaggccatgagcctgtcggggagcgtgggacaggtccggtattcttcctcaacccgaacagttgcatgggcttcgagcccgaaccgagcaaggaagggagtggatgatggcacaaaacagtcgtgttgtcgtcgggattgatgtggccaagggcaaggtggatgggtgcattcgctcgctgtcccaacggcaaacgttcccgagcagtgcgcaggggcggcgcaaactgatcgcctggttgcgcaagcaaaaggtcgacagggcggtgatggaggcgtccggcggctacgagcgggactgggccaaggcgctacgcgaagcctgcttcgaggtgcggatcgttgatccaaagagagtgcgcaacttcgcccgatcggcggggcggctcgccaagaacgatgtcatcgatgcagagatgatcggctggttcgccgagacatttgaagatgcgccgagccaaacgcacgatgcggcgcgcgaggagctggcggcactagtcaaagcacgcaaagccgtgatcgatttgaggacccgcctgcagagccagaacgagcatgccgtgccgggagcggtgcagaaagcccacgcccgcgtcttgaagggcctggatgccgagattgccaagctcgaggatgcaatcgttgtcacggtcaaggctacaccggcatttgccgtgcgcgccgagatcatcgagagcgtgccgggcctcgccggaatggcctctgcggtcctcattgcggggctcccggagctcgggacggtccgcgaggaggtcgccgctgcgttgttgggggctgcgccttatgatgacgacagtggcaagcgacgtggcgagcgccacatcaagggcggccgccgctgggttcgtaacgccctctatatgccctgtctcggcgcagccactcagaacaacccggtgctcaaggccttctatcaacggctgattgccaagggaaaggagccgaaagttgcgctgatcgcctgcatgcgcaagctgatcgtcatcctcaatacgatgatcgcccgcggcgagaaatgggattcgagccgctacgcattgcggtgagctgatcgagcgcgccttaccgcgttcggtcctcgaccgaacgtatgcaaagccgacagaccggcgagcggacggggtcaaggccgtcagccgccgaaggcgggggcgcgtccagcgccagccttgaggccggccgatcggcggtctacttcagcacagttg

SEQ ID NO: 8018 - DNA, 1492 bp, unidentified
  source 1..1492: mol_type = unassigned DNA; note = element_c83ea9c
  misc_feature 1..2: note = core
  misc_feature 3..250: note = LE
  misc_feature 251..1471: note = CDS
  misc_feature 1472..1492: note = RE
  misc_feature 7..238: note = bridgeRNA
ctaatgggtgtgcaccagcccggtcgggagatgcggcagggtggtgtccctcagccgccggtgggtgagcacttgctcttccaggtccgagtgtgaggcctaggtttagaccgtgcccctgccggtgggggaggaggatcgatggctggtgggatgtcgtgccggcgagcactgatccattagggcgctgtgattcttctccgggctgagccgtggttgatcgatagagcaagggggacgagtgctatttatggggaatgattgggcggaggatcaccacgatgtggaggtggtggacgagtcgggccgtcgcctggttcgtcggcggttttctgagggtatcgcgggtatcgcggaattgcatgcggtgatcgctgatcatcttgatgaggatgccgaggcctccgatgtggtggtggggatcgaaaccgatcggggaccgtgggtggcggctctggctgccgctgggtatcaggtgtatccgatcaaccctatgcaggtcgctcgatatcgagagcgtcatggcacatcgggggctaaatccgatcgcggggatgcgcacgtcctggctgagatcgtccggctagaccgtgatcaccaccaactgttagcggcggattcggaactagccggcgcggtgcagacgttagcccgggtccaccagaacctggtctggtcccggcaacgccaagccaaccagctgcgctcgatgctgcgggagttctaccccgccgccttgcacgcgttcgatgacctgcacggacgcgacgcgctggccgtgctagcagctgcacccacgccctgggcgggacaagccctgaccccggaggccatcacggacatactccgtcaggcaggacgtcagcgttatctgactaccacagcgaccagaatccacacagccctgcaaacagagcacctgagggctttaccgcagattaccgaggcttatggcgcagccacggcagcgctggtggctatcatcaccgagatgggtcagcagatcgaggccctggaagcccaggtggtcacacattttggccggcacccggacagtaagatctatctcagccaacctgggctgggaaagatcctcagcgcccgggtactcggggaattcggcgatgccgctaaccggtacgccaatgctaaagcacgccgtaactacgccggaacctcccccatcacccgcgcctccgggaaaaaactcgtggtcctagcccgctacgcccgcaataaacgcctcgccgacgcactattccaacaagccttcaccgcgctcaccgcatcccccggcgcccgcgcctactacgacagcctgcgagcccgcggaatcagccacaacgacgccctgcgacgcctgtccaaccgcctcgtcggcatcctgcacggctgcctgacccggggctgcgtctacgacgaagccaccgcctggcccacccacaaacaagatcaacaagaagttgcttgacaacttacgcccgtgggatgt

SEQ ID NO: 8019 - DNA, 1204 bp, unidentified
  source 1..1204: mol_type = unassigned DNA; note = element_c84e739
  misc_feature 1: note = core
  misc_feature 2..212: note = LE
  misc_feature 213..1178: note = CDS
  misc_feature 1179..1204: note = RE
  misc_feature 35..202: note = bridgeRNA
tcttaagtttacaatccattaaatttagagtataaatcagaaagaacaaaagagagaaataaggttagtatacacggtgaagccttgacttcgacaacaatgataaccctctctctttttctactaagatttcgttcagttctgtgagacttagatctcgattttaagttgttgaaacgttagtagcgagttctttccaaatttcaattcttatgaataaatataaagaaatttatggaatagacataagcaaggatgtctttgatgtttatgtcccagaaacaggctttagccagtttaaaaatgattatcagggttttaaaaagtttttaaaacaaataagtaaagggtctttggtagttatggaggcaacaggttattatcattatcgtttagctcagttcctacacgctcaagggatattggtatcggtagtaaatcccttatctgtaaagcgttttatacagatgaaattggctaaggtaaagaccgataagagtgatgccaaagcaattagcgaatatgggcagatgaacgaggttcctttgtacaatgctctaacagaggttcaagctgaatgtttacagttgtttagactattggatagttacatgaaacaccgtacagcaaccaagaataagctaaaaggagaggaagccttgggtataccatcgaggtttgtgtaccaatctttaaagcgaaatttaagacatttgaacaaagaagttgagtctttagaatcaagattgttggctttggtaaaacaggagcagcaatcccaattgaccttgctgaaaagtatcccaggtatgggtgttaaaacagctttgttcttaattgtagtttccgatgggttttcaaaatttgagactgctagtcaattatgcagttatgtcggtgtaacaccaacaattcgagaatctggtagcagtgttagaggaagaagtagaataagtaaggttggtaataaaaagctcaggaacttattgtttttatgtgccttttcagcctgcaagcacaataaagcctgtagggaattatatgaaaggatcgtggctaagggaaaaagcaaaaaactggctttgattgcagtatcgaataaactattgaaacaggcatttgcaatagtaaaaagtggattgccctatgatgaaaactttgtttctaaattagcttaaaattgcttgttttttaactcagttct

SEQ ID NO: 8020 - DNA, 1376 bp, unidentified
  source 1..1376: mol_type = unassigned DNA; note = element_c850d87
  misc_feature 1..2: note = core
  misc_feature 3..88: note = LE
  misc_feature 89..1111: note = CDS
  misc_feature 1112..1376: note = RE
  misc_feature 1110..1363: note = bridgeRNA
tgatggggtggatggcccctgtttgcggcgtctgagcgccatagagtggccgtcgctagagcagccacttgggcaggagccatccaccatgcagactatcacgatcggcctcgatctcgcgaagaacgtgtttcaggtccacggcgttgacgccgccggccaagtcaccacccggaggaagctgcgccgcgcggagctgctgaggtttttcgaggcgctcgcgccatgcacggtcggcgtggaggcgtgcgccaccgcccatcactgggcgcgggagatctcggcgctgggtcacgaggtgcgactgatgccggcatcgtacgtgaaggcctacgtccggcgccagaagaacgacgcggccgacgccgaggcgatctgcgaagcggtgaggcgtccgaccatgcgcttcgttccggtcaagagcgccgaacggcagagcgtgctggtgctgcaccggacccgtgagctcttggtgcgtcagcgcaccacgctgatcaacgccatccgcggccactgcgccgagttcgggatgatcgtcgctcaaggcgctcgccgtgtggctgaactcctcgacgaggtgcgtcggaacgagggagcggcgcttcctgatctggcccggtccgctctgctgatgctggccgatcaactgggagcgttggccggccagatcaacaggctcgatcgccgcctgctggcctggcatcgccagaaccagaccagccagcggctcgccaccatcccaggcgtgggcgtcatcaccgccaccgcgctcgcagcctcgatccctgatccacacctgttccgctccggtcgggagttctcggccttcctgggcctggtcccgcgccagaactcctcgggcggcaaggacaagctcgggcggatctccaagatgggcgacggctacctgaggaagctcctggtcgtcggcgccacctcggtgatccgccgggcccggacaggctcttcggcgtctgccggatggatcaccgccctgctcgcgcgaaggccggcccgggtcgtcaccgtggccatggccaacaaaactgcccgcatcgtctgggcgatcctggcgcgcggcggcgtctatcggccgcccgtcatggcctgatcgagatcgcggcggcccaggccgtcgccccaagctgtgagggtgcgcgagggttgatggtgatgatctgaacgcggccgcggaccgggacaacccgaggtgctgtcggggcttcgagctcgatagactgttagggacccggtcagcggactccatcagggccagcggccaccagccgcgccaacaggccgaacagatgaccgcaccccgacagatcgtcagatcaaaccagattcacccttgcggagcaggggccatccacaga

SEQ ID NO: 8021 - DNA, 1380 bp, unidentified
  source 1..1380: mol_type = unassigned DNA; note = element_c85ae1e
  misc_feature 1..2: note = core
  misc_feature 3..89: note = LE
  misc_feature 90..1106: note = CDS
  misc_feature 1107..1380: note = RE
  misc_feature 1144..1378: note = bridgeRNA
cgatgagatcggtctcctccccttctatgcggcgtcgcaatgcgccatgatggaattatcaccaaccatcaagaagagaggagaagaccatgagcaagattacgacaattggactggatttggcaaaaaatgtgtttcatgccgtgtgctgtgatgctcgaggcaaggtgatcagaaagaaaatgctaaagcgatcccaagtattgacctactttgccaatctacctcaattccttattgggatggaggcctgtgctagcgcccaccactgggctcgcaagttaagtgctttggggcatcaggtaaagctcattcccccacaatatgtaaagccctatctgcgaggtaataagaatgactacaatgatgcacaagcaattgcggaagccataaagcaccctgaaatgcgttttgtgtcggtcaaaacaacggatgaacaagacattcaggcactgtatcgtcttcgggagcgtcggctccaggagcgtacagcactttgcaatcagctacggggcttgctggcagagtacggcctcattctgcctcggggaacccatgtattgaggcgacatcttccagaattattagctgatggtgaaaacggtttaaatccgctctttcgtcggttgttggctcagagctatcggcagctacaagagctggatgagcacattgagttttacacccaagagatgaaacgtcacagtcaacaaaatgaagcatgccaacgattgcagacaataccaggctttggcgagattattgctggcgttttctacagtgcggtaggtcagggtgatgcttatcggcgagggcgggatgtatctgcttctctgggtttagtgcctaagcagcatagtagtggaggcaaagagcatttgcttggcatcagcaagcgtggagatcgatacctgcgcagcctactggtacatggtgcccgatcagtggtgagccggtcggccaataaaactgaccgactcagccgctggatcaataaaatcagagcggcacgaggatttaacaaagcggttgttgcactggccaacaagatggcgcggattgggtgggcggtattatccaacaacaccgtttatcaacctgcataaaggtttattaagatagtttgagaaaataagagaggggtaacctaccaacgattgcgaagacattgtgataacgatggcacaacaggtcagaccggcgtatcgaaaacctgattaacccggaggctgaaaggccgctccgccgataagggcgatatgcgcacatttcatcgaggccagaagagcagttccgcttcataaataggccggatatacgagagcaatcctgtccctgtcactgagcacaaggtcttgcaaaatgggaggagaccatata

SEQ ID NO: 8022 - DNA, 1866 bp, unidentified
  source 1..1866: mol_type = unassigned DNA; note = element_c85fcc5
  misc_feature 1..2: note = core
  misc_feature 3..116: note = LE
  misc_feature 117..1409: note = CDS
  misc_feature 1410..1866: note = RE
  misc_feature 1533..1803: note = bridgeRNA
agcttcctgtatagtttaaatcgtggtggacgttgaaaagaagaatacctcagagtacgataagactactgacttgacgggttggtaaatcttatacgaacagagaggtattccaaatgaagtctaacacacagaacacaaaaattgaagcagtaacagagaaaacattggttgtaggtatcgatgtcggaagcgaattccattatgccagggcgtttgactggcggggagttgagttctccagtaagccatttaagttcagcaatacagaaccgggcttcatagagtttaaggcatggatccttcacatacagacagagcatgataaggacgcggtagtaccgggaatggagccgacagggcattactggttcaacctgggaaagttccttcaggataacggcatgaagccggtacttgtgaatccgcatcatgtgaagaagtcaaaagaactagatgacaataatccgacaaagaacgatcgtaaggatccaaaagtcattgcaggattgatcaaggatggacgatactcgtacccctacctgccggacggcgtctacgcggacctgaggacagcatcaaatcttcggttccagatgcagtcggaacttacgagaatacaaaaccggatcagtcgctggttcagcatctactttcccgaatataaagatgtatatgggaacccggatgcaaagagcggaatgatgatagtgaaagttgccccgctcccggaagacatcgtgacgttaggtgtcgaaggggtaaacaggatctggcgggaagcaaagctcaaaggcgtagggcttaagagggcgaagaccctgtatgaagcagccgagcacagtatcggaagccgggaaggagcagcagccgcaaggctggagatccggatgctgctggaggattatgaatccagagcggccaggcttcaggagatcatgacgttgatcgaatcactggtaaagcagatcccgacggctgaaaagctgttggagatcaagggtgttggcattaagactgtatccggatttctggcggaggtcggtgatatcaatcggttcgacaacccaaagcagcttcagaagctggcaggcctggcgatcaaggaaaacagttcgggtaaacacaagggagagacgacgataacaaaacgtggccggaaaaggctgaggtatttactgtttgaggttgcgatgtccgttgtgagtaagaatacagagttctcccagctgcacctgtactacacaaccaggcgaattaatccgctgaagaagatgcagtccctgatggcagtagcctgcaagctgatccggatcttctacgtcatgctgacaaagcaggtggactacgatccacagaagatgatcagcgatatcagaaggccggagatctatttgcaggcagcgtaacagagacagtaactcaatggcggctgtatcctgaatagccactgaacaaaggcagaatgtcacagataacgtccaccgcaaggtgctggggcaggaagcgagtcagtaatcaaacatacaaagaatgagccggcagtcagcaggagtgcggtccatagggcaagaccctgcgaaggagctaagctgacgccctggttatggataggcggtacgaaggaagttgggacccctggaggcaaggggaaacccgttggacacaggaggttcgctgccatagagggaagggtttgcacaaaggccatgtagagcgaaagggatgacgttctacttcgtgcacccatcaaccactatttcagcacctgatgcttggaaatatccatgacactggctcttctgactgagatataccaagtgaaaaaccttggattttcaacaaaaactacttgattatgtgagg

SEQ ID NO: 8023 - DNA, 1420 bp, unidentified
  source 1..1420: mol_type = unassigned DNA; note = element_c863837
  misc_feature 1: note = core
  misc_feature 2..228: note = LE
  misc_feature 229..1407: note = CDS
  misc_feature 1408..1420: note = RE
  misc_feature 14..242: note = bridgeRNA
ctacttgtttcattgactgcaggatcggtgcctggcgaggctcggtccaggcgtccggtccgtggctctctgtgcggctgcccacgacacgttcgtgtggctcactactggcatgcgcgggccgggcgccgagagccaggagaggctcgagaggggtctgcccagctctaagtagcgttgccctcccggctcgacaaccagtgatggatcgagcatcggagaaggccaatggcagagacgacgaccagggtcgtgatcgggatggacccgcacaagaggtcggtcacgatcgaggtgatggacgccgacgagacggtgttggacggtggccggttcggcaccgatgaggccggtttcaccgcgatgaccgattacgtcagccgcttcggcgaccgggtctgggcgatcgagggatgcaacgggatcggccgccatgtcgcggtccggctgctcgcactcggtgaggaagtcgttgatgtgccgccgaagctctcggcccgggcgcgggtcttctccaccggtcagggacgcaagaccgacgccaccgacgcccactccgtggcgttggtcgggacccggatggccggcctgcggccggtcgtggccgacgaggagctcgaggtgctgcggaccctggtcgaccgccgtggctggctcggtgaggaacacacccgcaaggtcgcccagctgcaccacctgctgctggagctgatccccggcggggcgaagaaggacctctccgccgctcaggccaagaagctgttggcgaaggtgcggccgcgcgatgtcgcgggcaaggcccgtcgccgcgtcgccgccgagctgatcgccgacctggagcggatctacacccgcaagaaggccgccgacaaagaactggccgagttgatccgcgcgaccggcagcacactgctcgacctcaacggcatcggccccaccggtgccgcccggctgctggtcgacgtcggcgacatcacccggttccccactcgcggccacttctcctcttggaacggcaccgcacccatcgacgcctcctccggcgaccacgtccgacaccggctctcacgcaaggggaaccgtcagatcaaccggaccctgcacatcatggccaccgtccagctgcgcagacccagcatcggccgcgactacttcgatcgcaagacagcagccggcaagagcaacatggaagcgatgcgctgcctgaaacgcaggctgtccgacctggtctacaagaccatgctcgacgacctcatcaccgcgaaggggacgggcccgggagggcaacgggataacgactctgactccagcgcgaccggctcacaaccccacaccggctcttcggacaagccacttcccggacccgccagaccccaccctagaaccccgctaccgactgcgtcttgacacagaggggtgc

SEQ ID NO: 8024 - DNA, 1378 bp, unidentified
  source 1..1378: mol_type = unassigned DNA; note = element_c864b13
  misc_feature 1..2: note = core
  misc_feature 3..78: note = LE
  misc_feature 79..1119: note = CDS
  misc_feature 1120..1378: note = RE
  misc_feature 1119..1365: note = bridgeRNA
tgatggtgtggacggccccctacggcatcgctttgtgccagaatgaggttgtcgcaaactcaaacatgggagccgtccatggagcagattatccgcattgggatggatacgtcgaagcattttttccagctgcacggggtcgatgccgccgagaagccggtgctgcgcaagaagctgcggcgcaaggagatgctggcgttcttcgccaagctgccgccgacgccgatcgggatcgaggcctgcggtgcggcgcactacctggcgcgggagctgggcaaactcggccacgtggtgaagctgttggcgccgcagcacgtcaagccttacgtcaagcgcaacaagaacgacgggcgcgacgccgaggcgttgtgcgaggcgatgagccggccgacgatggagttcgtgccggtgaagaccgcggagcagcaggcggcgctgatgctgatgggactgcggcagcagctgatcgcaaggcgtacccagctgagcaatgcgattcgcggttatgccgcggaattcggcctgatctcgccgagaggtctcgacaagatcgagccgctgctgttgcggatcgcgcaggacgacaccgtgccgacgctggcgcgcgagctgttcgcgctgcagggccaggactacgcgcgactgcagaatgagctgaaggtgatcgacgccaagctgttggcctggcatcgcgccgacgcctgcagccggcggctggcgcagattcccggagtaggaccgatcggcgccagtgcgctggtgatgaaaacgccggtgccgcagaccttcgcctcggccagggcctttgcggcctggctcggcttgacgccgaaggatcattccaccgccggcaagcttcggctcggcaccatcacccgcgccggcgatgaactgctacgcagcctgttggtggcgggagcgaccgcggtgatccagcaggtgcgccgtggccgcggccgggcgtcgccgtggttgctggcgctgctggcgcgcaagccgcccaagctcgcggcggtagcgctcgccaacaagatcgcccggatcgcctggaagctgatgctgaccggagaaaattacgacggcgcgcggatgctgaacgcatcgccgcacgccgcctgagagatcggccggcaggcattcgcccgccggccgggccggagctgcaagaggagacagatggcgcgatcgatcgatccgagaggcgagacagtccgtggaatccattggcacgtaaaggtcgtgactatgtgtggagctcgcgtcgcggaaaccatcttggccagcggtccaaagcgaccgcatcaacaggccggacatatggatgcaagcgatccgatccgacatcaaaaactcttgtggctcgggggccgtccacata

SEQ ID NO: 8025 - DNA, 1588 bp, unidentified
  source 1..1588: mol_type = unassigned DNA; note = element_c869008
  misc_feature 1..2: note = core
  misc_feature 3..251: note = LE
  misc_feature 252..1421: note = CDS
  misc_feature 1422..1588: note = RE
  misc_feature 3..227: note = bridgeRNA
ctcgtattattaagttgtagcttttctttacctgttcttggtaatcagctactattgttatctgatgctgtggattggttatcacctcctaccgcgcgacggtttttgttaggctccaaccacagcctctttgttacattgttgatcagttagataccgcatgacggtttatgtagaacgaggatacaatcagcaaagagccctgtgggtcgataacagcatcaaacacttattacaggaggatttactaaatgatttacgttggaattgatgttgctaaggataagcatgactgttgtatccttggaccagataccgaagaactgttcccagtctttacgatacggaacaatagtgatggctatggagaattattccacaagattgagtcagtctcaaaggacaaatctcagataaaaataggactcgaggctaccggtcactattcctacaacattctgggatcacttcttgaccatggctaccacacctttgtcatcaatccgttacatacaaatctttacagaaaaggtcaaagccttagaaagacgaaaacggataaagtcgatgcccgttcgattgctatgatgttaatgactaataagactctcaagccctactcagacatatcatatcataacgaagaacttaagtcattaactcgttatcgtttcgacaaggttcaggagcgggcaaaactcaaatcttccgtagctcgtcttgtaaacatcctttttccggagctggaaaaactcgtccccagccttcatatggcttcggtgtattccttgctgtccaaacttcccggagcctcttacattaccgaatgtcatcttacccatctcaaaaatctcctagaaacagcctctaaaggccattacggacgagatatggcgattactttaagaaacaccgccagggactctatcggctctgtgataccggcaaaatcaatggaactaaagcacaccatccatttgattaaggtgatgacggaagagattgatgaaattgaagattccatcaaatccatcatggacacttgtaactctccgattatgacaatccctgggattagctatcgtatgggagctatgatccttgcagagattggtgacttcactcgattcaactatgctgatcagatactggcatttgcagggttgtcaccttctacctaccaatcaggtcaactggattctagctattctcatatggagaaacgaggttctcgttatctaagatatgctttgttcaatgccgcgaaatttgtctgcaagtgggatgagaatttcggagcttacctctcaaagaagataggcgaaggcaagcactataatgttgctatcggtcatgcaacgaaaaaactggtacgcaccatataccgaatggaacttacaggcgaagcctaccgaagataattcattaacttcacatccttttctgagagcacctgtttagatgttctatttgtcatgcgattttcaaggtactgattgaggcttaagcctgcctccgggctatctaaaacatctggtgatgtcttattcaaaaaatcttattttccaattgacttttaatagttagt

SEQ ID NO: 8026 - DNA, 1226 bp, unidentified
  source 1..1226: mol_type = unassigned DNA; note = element_c86d297
  misc_feature 1: note = core
  misc_feature 2..213: note = LE
  misc_feature 214..1188: note = CDS
  misc_feature 1189..1226: note = RE
  misc_feature 36..202: note = bridgeRNA
tcttaagcttgtaaagtattaagtttagggtataaatcagaaagaacaaaagagaggattaaggttaagatagagatagaaactttagatttcgtcaacatagataatcccctctcttttctactaacatttcgaacagttctatgaggcttagacctcgtttttaagtagttgagagtaaagtagattgttccttcataaataggaaacattatgaataaaggtattaattattttgggatagacatatcaaaagatgtatttgatgtagtaaattcagcaggaatttattggcagtttgagaataatttcaaaggatttaggaagtttttaaaagagttggatatgactagtcattgtgtaatggaatcaacaggttattaccatcagcagttggcttattttttattagaaaaagaggtgaaggtatctgtggagaatcctatttctgttaagcggttcatacagatgaagctttctaagataaagacagataagtcagatgcaaagatgatatgtgcatatgctgagagtgtagaactaaagttgtggagtggtcaatccaagcatcagataacttgtttacaaatgataagattggtgagtgtatattttaaacaaacaacagccttaaagaataagatacatggggagaaagcgttgggtaatccatgtatggatgtggtaaagtcactaaatcgatctttaaagaatttacagaaagaaatatcaatgatagaagaaaaggtgttgaagctagtaaagattgagcatcaagatttgttaacaaggatagaaacgattccaggtttaggtagaaagacatcaataatgttattggtattaactgatggatttgagcgatttactagttcaggagagttgtgttcctatgctggtttaactcctacgataaggcagtcaggaagtagtgtgagaggaaaatcgcggataagtaaaatggggaatcaaaaacttcgaaatttattgtttatgtgcagttttacagcctgtaaacataataaagcttgtaaagctatttatgatagaatagtagccaaaggaaagagtaagaagttggcattgatagcagtttgtaataagcttttgaaacaagcttatgcaatagctaaatcaggtttaacttatgataatgagtacagaagtgtaaatccagctttaaattaaaaataagttaatttttagttgttttttagcacagttct

SEQ ID NO: 8027 - DNA, 1419 bp, unidentified
  source 1..1419: mol_type = unassigned DNA; note = element_c8763ba
  misc_feature 1: note = core
  misc_feature 2..230: note = LE
  misc_feature 231..1406: note = CDS
  misc_feature 1407..1419: note = RE
  misc_feature 15..245: note = bridgeRNA
ctacttgtttaatttgatctacgacatcagcccggccaggctgggtcgaggtggccggcgggttgctctctcttgcggctgtccacggcatcatggtgtgactctcatttggcgtgcgcccgccggccaccgcaacgaggagtggctcaagaggggtatgtccggctcgaagtagcgttgccctcctccgaccgtccattgtagatagtgtcgaggaggagagcagatccatgagccgtgtagtgatcgggatggatccccataagcggtcggccacgatcgagatcattgacgagcacgaacaggtcctggcgcacggccggttcggcacagacaccaacggctaccgggcgatgctcgcggccggccgccggtttcctgagcgggtatgggcggtggagggctgcgccggcatcggccggcacatcgcccagcgtttggtcgccgacggtgaacccgtcctggacgtgccggcgaaactgtcggcccgggtgcgggtattcgacaccggccaaggccgcaagaccgaccccgtggacgcccacagcgtggctgtggccggactacgtagccccggcctacgcgccgtcgtggccgatgacggtaccgtcgcgctgcggctgctggtcgaccgccgtgacgagctcggccgcgcccgtaccgagaccatcagccgcatccaccacctgctccttgagctggtccccggtggagcgaagaagttcctgacccgcggtcaggccagctacctgctgcgcaccgcgccagcaccggtcggcatcgctgcccagacgcgccaccaactggcctgcgagctcatcgacgagctgactaccatcgacgccaagatccgggctgcggacaagcaactacgccaactcgtagccgctgccggcagttccctcatccagctcaatggtatcggcccgtccggggcggcccggctcatcggtgacatcgccaacatcggccggttccgtaccgcggcgcacttcgcctcctggaacggcaccgcgccaatcgaagcgtcctcaggcgaccaacgccgccaccgcctgtcccgagccggcaaccggcgcatcaaccgggtcctgcacatcatggccgtcgtgcagctacgccacgacaccccaggccgcgcctactaccggcgccgcctggccgaaggcaagaccacgatggaagcgctgcgggcgctcaaacgccacctctccgacgtggtctacaagcggatgatccacgacgctgtacatgcccgaaggagtgggacgggcccgggaggacaatcgggagcgactctgaaatccagcgcggacggcccagtcccgacagccgcctcttcggacaagtcacagcccggacccgccactgccaagcgtagaacactccttgccaaaaccccttgacctagaggggagc

SEQ ID NO: 8028 - DNA, 1566 bp, unidentified
  source 1..1566: mol_type = unassigned DNA; note = element_c87bc18
  misc_feature 1..2: note = core
  misc_feature 3..246: note = LE
  misc_feature 247..1422: note = CDS
  misc_feature 1423..1566: note = RE
  misc_feature 2..225: note = bridgeRNA
tcgtattattaaatagtagtatttatgaatccctctccagggataaatgttatactgttagagatactgtggattggttctcatttcctaccacatgatggtttattggaggctccaaccacagtctctttgtatatttgttaattggttagataccgtatgacggtttatttagaacgaggctacaatcgcaaagagtacctgtggctctaaacagtatcaaatactttgcaaaggagatttattatgatttacgttggaattgatgttgccaaagacaagcacgactgttttattacaaattcagatggcgaggtattatttaagcccttttccatctcgaacaatcgggaaggttttgaaaacctgtttcaaagaatcgaatccgtttcagatgatttagccaaagtaaaagtaggactagaagccaccggacactacagttacaatcttctgggattccttcttgataaaggtctgaccacctacgttatcaatccgctacataccaatctttacagaaaaagtctaagccttagaaagacgaaaacggataaggttgatttccgtactattgctactatgataatgtctgatatgaacttaaagtcctactcagatacatcttaccacaatgaggaattaaagtcacttactcgttatcgttttgataaagtaaaagaacgggcaaagctgaaaagttctgtttccagacttgtatgcatcctgttccctgaactggagaaacttgtgcctaccctccatatggcttccgtctatgccctcctgtcagaattcccttctgcccacgcagtttcctccgcacatcttacgaggctctcaaaccttctttccgaaagctcaaaagggcattacggaaaagataccgctgtcatcttccgtgaggcggcgaggagttccataggctcacatatgcctgcaaaatctttagaactaaagcataccatcatgctcattcaggaattgaccactgagatcgatgaaatagaacttgctatcaaatccattatggacagccttcactcaccaatcctctccattcctggaatcagttaccgtatgggtgcaatgattattgcagaaatcggtgatttcaaccgtttcgattccgctgacagactacttgcatatgccgggatgtcgccatcaacttatcagtcaggacaactggatggcagccattcccacatggaaaaacggggttccagatacctgcggtatgccctttacaactctacaaaatatgtctgccagtgggatgaatcattcgctgcctatcttgctaaaaagcgggctgaaggcaagcattacaacgttgctttatcccatgctgcaaagaaacttgtgcgcctgatctacgcaatggaaaagtcggggcaatcatacagtaaaaaagcctgattctttccgtaaatatctccttttagagtgcctgtaaacgacactcttattgtcatgcagttttcaaggttcaaatatatctgaaatgccttccggcaattcattcaaaaaatttcattttaggtcttgatttttaatagttag

SEQ ID NO: 8029 - DNA, 1475 bp, unidentified
  source 1..1475: mol_type = unassigned DNA; note = element_c8932e2
  misc_feature 1..2: note = core
  misc_feature 3..249: note = LE
  misc_feature 250..1458: note = CDS
  misc_feature 1459..1475: note = RE
tctacctttggatttcgcaggccggcgaagggtgttgaggtgttctagactcgaggcggcggcggaggtgtggcttgtggggtccgcactccgcttggacgtgctcggttctgaaatgccgccttcgccgcccctgcatcatccggagcgtcccacgtggatggtgcccactcctctggagtgatggctgaaaggtagacgagacgccggatgagttttggcgtcggatcttgcctggaggtcaccgctatggatacccctcttcttgtagccgtggatgtcggcagtcgtttccaccaagtggcggtcggcgatggtacgggacatgtgctggacgagttccgcatcgatcacgaaccgtctggatttacagcgttcttcgaacgagtggaacgccatcgtcggtcgccggaccagagggtccaggtggcgatggaaggttacaacggctgggcacgcccgctggatagccagaccctggcccgcggttgggcgctgtacaacgtcaataacttgaagctagcacggtataaggagatctttccggctcctgccaagacggacgcgatcgactcgcgccgcatgctcgagctattcgcgctggatcagcaacccggggtggcccgcaatgccctacagcgggtgacgctgatcccaaaggcgcaccgccatctgaagtatctgacgcgccggcggcgggtgctggtacaggagcgggctgggcgtctgacgcggctgaactgcgatctacaggcgctttgcccgggcttgctgtcgatcacgggttcgatcgacaaccggtggttcctccgcttcctgacctgccgagaccgcctcacggcgttgccacgagtacgcgcctcgacgctgttaaggatacggggtattgggcgcgcttatctcgccaagatccaggcatggcagccgaccgcacaatttggcccggatatcgccttcggcgatatggatgtggtcaccgatgcacgattgatcctgacgctgagtgagcggatcacggagttggacaccgagctcgaacgcttggcgtgcgagagccaaccggctcggctcctgcgatccatccccggtttcggcccgacgggtgttgcggagttagtgggcgagatcggcacactggatcggttcaccaaggaatcggggctggccgtctatgtggggatggccccgctagcgaacagttcgggcgttcgcgatcggggtaaacgcccccgctccgttaatacccgatgccagaatgcactgatgacctgcgtggcacggcacatggcccatgtgcccgagtcccgcgcgtactatgaccgcaaacgtgctcaaggcaagacgcacaatcaagcggtacgagccctcggccgtcacttgatccgaatgatctggacgatgctccgtcaaggacgggagtaccaccgcctccccacattcgagacgcccaagccttgaaaatccgagagggatgt

SEQ ID NO: 8030 - DNA, 1436 bp, unidentified
  source 1..1436: mol_type = unassigned DNA; note = element_c89bd0c
  misc_feature 1: note = core
  misc_feature 2..139: note = LE
  misc_feature 140..1162: note = CDS
  misc_feature 1163..1436: note = RE
  misc_feature 1192..1434: note = bridgeRNA
atgtaatggacgcctccctcccgcctcgggtgctgacaggtggagcccttcaatgagaagagccctccagttacctgacggcatcgatgtgccaaagtggtggtgtcgaaacgaccacaaacggtaaggagggctcgaaatgaagattacgacattcggtctggacctggcaaagaacgtgtttcaactgcactgggtagagccggagaccggtgaggtcaaacggcgttcgctcaagcgcgatcagacgatcaagttcttcgcccagcgcagcgcctcggtggtggcgatggaagcgtgcggcagtgcgcactactgggcgcgcaagctgatcgaactgggacacgaggcgcgcttgatcgcgccccagttcgtgcgcccgttcgttcgcagcaacaagaccgacgcggccgacgcgcaggcgatctgggaagccgcccagcgcccggagcgccggttcgtggcggtcaagagcgtgcatcaacaggcggtactgatgctgcaccgggtgcgcgagcaacgggtgaagatgcgcacgatgcagatcaaccagctgcgaggtctgctctacgagttcggggtgatcttgcccgcagggcggcacaaggcgatgccacaggtgacacaggcgttagctcggctcgaggacacgctgccggcgatggcgctcgaggtgctgcgcgagcagtgcgcgagtatcgaggccctgagcgcccagatcgaggagatcgaacgcaagctggccgcgtggcgcaaggaggacgaggcggccaaacggctgatgcagatgcccggcgtgggcctgctcacggccaccgctgcagtggccgcggtgggcgatgcaaaggtcttcagcagtgggcgtgagtttgccgctttcctgggcttggtgccccggcaaagcggcaccggcggcagggtgaagttgctgggcatcagcaagcgcggcgacggatatctacgcaggctgctgattcacggcgcacgcgcggtcatcacccacgccaaggcgcgtgatccgtgggtcgaggcgctactggcacgacgccctctcaacgccgtcgtcgtcgccttggccaacaagatggcgcgcaccatctgggcgttgctcgcccacgggcggcattacgagccgcgcgggcaggcgctcgggtgcgcttgagtaaagtcgaaattcaatacaggaacttagcgttgatcgtccaaggttgcgcaggttgaagcgagcatgatggcgaaataggtcggaccgtggggaaacaagcctggcacggcgcttgtccttcgaggacgcgtaggagatgaggccttccccagcgaattccatcagggccagcagacatcgggtctgcactacaggccggatataagactgcagccagatccttgatcgccagatgcaaacttcgcttgccaaaccgggaggcgtccatata

SEQ ID NO: 8031 - DNA, 1524 bp, unidentified
  source 1..1524: mol_type = unassigned DNA; note = element_c8a23f8
  misc_feature 1..2: note = core
  misc_feature 3..240: note = LE
  misc_feature 241..1434: note = CDS
  misc_feature 1435..1524: note = RE
  misc_feature 8..260: note = bridgeRNA
ttcgtacaatataagagtagggattacatcccctattcttatttttttgttatgatgagtctgattggctgacgtaatttcagttgggacaccacgcccgtcacctaaacctgtcggccaactctcatcattgagcactcgattcagcaggttgggtttccacacccgtgtcacccacgaacatgaggcaatcttgagatgttggaaccaatcacaataaccatacaaaggaggaatatcatgattgctgtaggtattgatgtttccaaaggaaagagcaccgttgctattatcagttcatatggtgagattgtaatgaaaccgactgactttcatcacaataatccatccatgcaacagctaacttccacgctgtcgaactttgatgatgaagtccgggtagtaatggaagcaaccggtcattaccatcaaccaatacttaaagcccttttagaggctaatctatttgtttctgtcgtaaacccatatgtcattaaaaaatatgcagaccacgacatccgtaaaggaaagactgataaaaaggatgccatgcgtattgcctggtatgctttagaaaagcaatacacgctaaccggttattcaataactgaagagcgatatgatacattgaaatttctttcccgccagtataagcaatgcatttccatgagagtaaagggacgtgtacagctgcataaccttcttgatgaaatcatgcctggaatccagaatatagtaacctcacagacagaggatccagataacaactttttctataaatttgtcatgaagtatggaagctatgacaaaatcaaagccatgtctgaagaacgctttatcaacagctatgtaaaactggcttataaaagcaaagcaagatgtcctgaagctaaggctctaaaggtatatgaggcagccaagagaagcattacaactcgcccgtttgatacaagcgcccagatcgtcctcaccgaatatatcaatcttctaaaacaaactgagatatcctgcaacacactcatgaagcagatgcaatccattgcatgtaccatgcctgaatacaaaactttgctgtctatggatggcgttggataccgccttgcaccgatcatcatagctgaaataggggatgtgagacgttttaaaaacgccaaagcattaaacgcttatgctgggaacgatgcacctccctatcaatcaggacaatacgaaagccataatcgccatatatctaagcgcggttcatctgagctgcgtaaggcctgctatgaagtcatgcaaagcctaaaattgcaccagaaggttgataaccctatataccaatacatgctcaaaaaagaagcggaagggaaaccaaaggatgtagctaaaatggctggcgtcaataaattcctacgggtttactatgctcgcgtaatggagctttataaataatttttctctctttgtaaagagggcttattaaagttaccccttttttcatcttgcattttttaaaaaagtacttgacttttattagcaggg

SEQ ID NO: 8032 - DNA, 1488 bp, unidentified
  source 1..1488: mol_type = unassigned DNA; note = element_c8a428c
  misc_feature 1..2: note = core
  misc_feature 3..298: note = LE
  misc_feature 299..1468: note = CDS
  misc_feature 1469..1488: note = RE
  misc_feature 14..240: note = bridgeRNA
ctaatgagttccgggagccagccatccggcagactccgagcggtagccgctgacaggtgagcactcggtgttccaggacctcgagtcctgccgaaagaccgtgcccctgtcggttggccgggagagttgatcgctgatgggatgtcgtgcccgccgttcgcggtgtgagcactgtgttcattaggtcgctgatagttctcccgcgggctgctcatggtgatcggcatggagggcgggagaggcgttgcgactgttcgtgggggacgactgggcggaagatcatcatgatgtggaggtgatggacacctcggggcgtcggctgggcagggcccggctgcccgagggggtggccggtgtggcgcggctgcacgcgctggtcggcgagcacgccggcgacgaccccgacgacgtcgaggtgctggtcgggatcgagaccgaccgcggtccctgggtccaggccctggtcgccgccggttacaccgtgttcgcgatcaacccgctgcaggcgtcgcgttaccggtcgcggcacgccgtgtcgggtgcgaagagcgacgccggggacgcgcatgtgctcgctgacatggttcgcaccgacgcccaccagctgcggccggtggccggcgacaccgcgatcgtggaggcggtcaaggtcgtgacccgcacccacaagaccatgatctgggaacggacccggcactcccagcggctgcggcacgcgctgcgggactacttcccggccgcgctggtcgcgttcgaggacctggatgccgccgacaccctcgaactgctcgccaaggcgccgaccccgacggccgcggctcggctgaccctcagccagatcagcgcggccctgcgccgggcccgccgccgcgacgtcgccgccaaggccgtggcggtccaggccgcgttgcgcacggagcacctgggccagcccgacgtcgtcaccggcgcctacgcggcctcggtccgcgcgttgatcgcggtcctgaccgtgctgaatgagcaggtcaaggagttgcaggggcaggtggaggagcattttggccggcacccggccgctgagatcgtcctgtcccagcccggactcggaccggtcctcggtgcccgggtgctcgcggagttcggcgacgaccccgaccgctacgccacggcgaaggcccgcaagaactacgccggcacctcgccgatcacccgagcgtccggcaggaagaagaccgtcgccgcccggttcgtccacaacgaccggctcgtcgacgccctcatgacccaggcgttctccagcctccgggcgtcccccggcgcccgcgcctactacgaccggcaacgcgaacgcggagccagccacaacaccgccctgcgccaactcgccaaccgcctcgtcggcatcctccacggctgcctcaagacagccacgccctacgacgaggcgaccgcctggccgccaggcgccgaacagatcgctgcttgacacttcagctcctgggatgt

SEQ ID NO: 8033 - DNA, 1470 bp, unidentified
  source 1..1470: mol_type = unassigned DNA; note = element_c8a7281
  misc_feature 1: note = core
  misc_feature 2..366: note = LE
  misc_feature 367..1290: note = CDS
  misc_feature 1291..1470: note = RE
  misc_feature 11..232: note = bridgeRNA
cccattaccttcttggtggccccgcaatggggcgcccggcctccggagttggcatgactttctccccctgtcgaacgcatggcctggggggtggtgtcaccggctccggaggcatcgacagaccgctggttaggggcatgaccaccggctttgcaggtcgggaggctcttcgtaatgtggatgtggcgatcggtgccgtgggacggccgggcgaggacgaccgaaggacgcacgtgatcgacaccagcggcatcggcgccttcctcggcctggacgtcggcaagggcgaacaccacgccaccgccgtcaccccagccgggaagaaagccttcgacaaacggctgcccaacagcgagcagaagctccgtgaggtcttcggcaagctcaaggccaagcacggcgccgtgctcgtggtcgttgaccagcccgcctcgatcggggccctgcgacgcgttcgtcatcgccgacgccgcccgctcgatgccgcacaccctgcgggcgatcgatcccgccgacgagacggtcgccgagctggagatgatcgccggcttcgacgacgacctcgccggcgaagccaccagggtctccaaccgcttgcggggactgctgacccagatccacccgcacctggaacgagtgatcggcccgcgtatccagcacccggctgtcctggccctgctggaacgcttcgggtctccggcccagatccgcaaggccggccgccaccggctggtgaacctgctccggccgaaggcacccaggatggcagaacggctggtcgacgacatcttcaccgccctggacgagcagaccgtggtcgttcccggcacggacgcggccgcgctgatcgtcccgagcctggccacttctctgaccgccgtccttgaccagcggaaactgctggccggacggatcgaggaactgctggaggcccaccctctttccaaggtcctgacgtccatgccggggatcggcgtcaggaccggagccaggatcctcatcgacgtcggcgacgccagcggcttcccctccgccgcccacctcgccgcctacgcgggcctcgccccagcaaccagaagttccgggtcctcgatccgcggtgaacaaccctcccggagaggaaacaagcagctcaaacgggctttctttctctccgcgttcgccgctttggccgaccccgtgactctgttgctcaattccgcggaacgtccgggctcgcgtccgcgacctgcaccaacgctgtcgcgaagggcgtggcaggcgctggttcctgcaggttctccgaattgagcaacagagtcccccgtctcccgggcctactacgacaagaagatcgcccaggggaagcatcacacccaagcccttctctgcctcgcccgacgacgagccgacgtgctcttcgccatgctccgcaacggcaccttctacgaccccaagcccacccccacgggttgacgaaacccatagggg

SEQ ID NO: 8034 - DNA, 1532 bp, unidentified
  source 1..1532: mol_type = unassigned DNA; note = element_c8b416e
  misc_feature 1..5: note = core
  misc_feature 6..268: note = LE
  misc_feature 269..1510: note = CDS
  misc_feature 1511..1532: note = RE
ctcactggtgcaccatcttggtatccgagtcgcccgcttgatcttgaagtgggagggttcgggtgatgcacccctggtccccgtcgggccatcgccccgctcgctcgaccttcaaggttcactgtgagttctgcggggcccggcggcccaggacaccccgactggctacaggactgtgcgccatcgagcgccgatcagtgagcgaccggcagcggtgtcccgggaccaccgggtgtcttcccactgacgcaacagcgaggagacaactgtgagtatcgacccacgagccacccgggtgcgcatcagcgcgggggtggactgggccaaggacgaccacgcttgctgtgtcgtcggcggtgaaggtgaggtcctcgaccggttcgccgtgcgccatgacgcggccgggctgaagtcgatggttacccggctgctgcgcgccggtgccgggcaggccggcatcgagcgacccgacgggccggtcgtgaccgcgctcgcccaggccgggctcagcgtgttcgtgatcccgcccgggcaggtcaagaacctgcgctcgcggtacgggccggcggggaacaaggacgaccggttcgacgcctacgtcctggccgacgtcgtccgcaccgacatccgccggccgcggcccctggtctgcgacagtgagcagaccaccgccctgcgctcgagcgtgcgcgcccgcaaggacctggtcacccaccgggtggcggtggccaaccagctgcgcgcccacctgcagatcgtgtttcccgcggccacaacgctcttcgccggcatcgactcggcgatcaccctgagcttcctggagcggttcgccacccaggaacgcgccggctggctctccccgaaacgcctgggcacctggctgcgcagcatgagctacagcggaggcagcgaccccgccgtcctgcatgcccggctcctggccgctccccgcggcgcgaccggtgagcacgccaccatccacgccaccatcaccggcacgtacgtcgcgttgctgcgcgctctcagcacccagatccgggtcctggccaccagcatcggcgaacagcttgccgtccaccccgatgcgccggtcttcacgtccctgccccgctcgggaaccgtgcgcgctgcccggctgctcgccgagatcggtgatgcccgcgcacggttccccaccgccgactccctggcctgcctggccggtgtcgcgccctcgacccggcaatcgggcaaagtcagggccgtcaccttccgctggggagccgacaagcagctgcgagacgccctgtgcgacttcgccggcgactcccgccacgccagcccctgggccgcagatctctaccgcaaggccatcacccgcggacacgaccacccccacgccgtgcgcattctcgcccgcgcctgggcacacatcatctggcgctgctggcaggacgacaccccctacaacccagcagcccacggcgccctccagatcctcctcaaacaagatcaaccactggcagcgtgacccaggggttgacacagggcaa

SEQ ID NO: 8035 - DNA, 1462 bp, unidentified
  source 1..1462: mol_type = unassigned DNA; note = element_c8b717f
  misc_feature 1..2: note = core
  misc_feature 3..39: note = LE
  misc_feature 40..1206: note = CDS
  misc_feature 1207..1462: note = RE
gaggtgacatgaaagaggccacctccgccgatagaacggatgactgagatgcaggtgatgatcgagggacagtcacacttccagcctttcggcttaccttattggggttcgcaagatctcaacaagggagttggaagcatgactgcctcttatgaataccatatcggggtcgattatcacaaatcctatagccatctggtggtgcaggactcagccgggaagacgttacgatccggccgggtgaagaacgaccgccagtcgcttggcgggtttctcgaacgctaccgggaaaacagccatgcggttgtcgaagcgacgcgcaactggatgatgatctacgactggctcgacgacatttgtgatgatgtcgttctcgcccatccgttgaaggtgaaggcgatcgccgacgccaagatcaagacggacaagatcgacgcgacggtgctggcgcatctgcttcgagccgacctggttccggaggcctgggctccgagcgacaaggcccgagagctgcgtgtcgcgctgcgcgagcggatgttttacgtgcggctgcgcacgatgacgaagaaccgcatcgtgacggtgttcgatcgctatccggagcagacggcgcagttgaagaagctgagcgacctgttcggcaaggctggacgccagcagctcgccgcgctcaatgtgttggagatcgaccgtatccagatcgaccgtggtctcgacttcatcggcgacatcgacggccggatcaagcagtcggaagccacgatccgggcgttgacgaagaccaatggcaacgtcaagctgttgaagacgatccccggtatcggcgagttctttgcaaggctgatcgatgccgagatcgacgacatcaagcggttccgcaacccgaagaagcttgctgcctatgccgggcttgtgccctcgacctattcctccggcggcaagaccttccacggcaagatcatcaagcagggcaacaagtggctgcgctgggctttcgtggaagcggtcgctcccgctgtcgccagtgatgcgcagcttcgcggccaatacgaccacctgaagatcagaggagtaaacaaggcgcgtgttgccatcgcgcgcaagcttttgacgatcgccttccagatcctgcgtgaccagcgcgcttacgagccgcgcagcaccaccgccatggaagcgacgtcgacgatatcccggttgtcctgattgctggctagtgagcccggtagaactgggctgcgctcttaaaggagaatgggaaaccgggagccgaacgtcactctgtgaccgaagccaaggcatcaggtcacgcattggagattggttcaagaaccgaaggacaactccgtcctgcggacggaagagatttagccgatcggcgcaaacgccggtcaaaacataaccgaacccaaggaaattcccgcaaatgctggtgttttgccccttgagttctttcattgga

SEQ ID NO: 8036 - DNA, 1454 bp, unidentified
  source 1..1454: mol_type = unassigned DNA; note = element_c8b82c0
  misc_feature 1..2: note = core
  misc_feature 3..218: note = LE
  misc_feature 219..1433: note = CDS
  misc_feature 1434..1454: note = RE
  misc_feature 7..215: note = bridgeRNA
ctaatggcttccgagcagccaacgaatgagactgctctccgagccaccggcggggtgagcaccgagagcgccaggacttcagagtcctagggctagatcgtgcccccgccgggaggcgaggagccgacggctgatgggatgtcgtgccaatcgagcaccgatccattagggcgccgcgcactcctccgggctcgaggtcgtcgagggaaggaggaggggtgatcttcgtcgggatcgactggtcggagacccaccacgacgcgtgcgtcctcgatgtcgatgggcgcgtgctgacgaagggccgtgtgcctgagggcatcgacggagtgagcacgcttcacgagatggtggccgctcacgccgaggatctatcgcaggtcgtggtcggcatcgagctggaccgcgggctcctggtgggtgctctcgtcgcagcgggctacgcggtccatgccatcaacccgctctcggtggaccgctaccgagaccgccatcggacctcgggggcgaagtccgatccgggcgatgcgaaggtccttgcggatctcgtccggaccgatcgacacttgcatcgacaggtcgccggcgacaccgagctcgccgaggcggtgaaggtgctggccagggctcaccagagcctgatctggtcccgccagcggcagctcaatcagcttcgcaacgcgctccgggagttctacccggcagcgctcgaggccttcggcaccgacctagcctcggcagatgccctggcggtgctggaagtggcaccgacgccggcggaggcgcgctcggtgtcttcggccaggatcgccgccgccctgaagcgagcgggacggcgccggcgcatcaccgagcgagccaaggagatcgaggcggccctgcggagccctcaactcgaggcctcggcgctgctcgctcgggcatacggcgacgtcgtggcctccaccgtgcggatcgtggccgagatgaccgcccagatccagacgctcgctgatcagctcgaagcgaattttgagggacacccggacgccgagatccttcgcagtctgccaggactcggctcggtcctcggcgcccgggtcctcgcggagttcggggatgaccccgcccgctaccccgatcctaaggcccggaagaactacgcggggacctcgccgatcacgaaggcctcgggtcggtcgaaggtggccctggctcggttcgcccgcaaccgacgactcgccgacgcccttcagatgtgggcgttctgttcactcagcttgtctccgggcgctcggcgctactacgacgcccatcgcgccaagggacagaaccaccaacgtgcgctgcgatcgctggcgaaccgatgggtcggcatccttcacggatgcctccgccatcgccagcgctacgccgaacacctcgcctggccgatggcccaaggagccgccgcttgacacctacgccccgtgggatgt

SEQ ID NO: 8037 - DNA, 1341 bp, unidentified
  source 1..1341: mol_type = unassigned DNA; note = element_c8c5d0b
  misc_feature 1..2: note = core
  misc_feature 3..64: note = LE
  misc_feature 65..1090: note = CDS
  misc_feature 1091..1341: note = RE
  misc_feature 1094..1331: note = bridgeRNA
ttatggatggcccgcccctacctcaccgtggtgtagaacggtgacaggagaaaggagcaggaccatgaccatttctgtacttgggatcgaccttgggaaaaacagctgtagcgttgttggccttaacgaggcaggtgccgttgtagtgaggcgtcgtatgcggcgcgaaggtgtcatcgcgttcgccgcgaagcagcccgcctgtgtcgttgctatggaagcttgctgcggcgcgcaccacatgggccgcattctggcggaacagggtcacacggtacggctgatgtcgcctgaatacgtccgtccctatgtcaaagcccagaagaacgatgatcgtgatgccgaggcgattgccgaagctgcgacgcggccgaccatgcgatttgtcgagctcaagtccgaggagcaactcgacatgcagaccctgcaccgagtgcgggaccggctgatctgtgatcggacatccttgatgaaccagatgcgcagcctgctgctggaacgcggccacatcatcccgcaaggccgggctaaactcagagagcatctggctcgactgctcgatctcgagggatcgccgctgaccccgagaatccgggaactgctgctcgatatgcgccagcgctgtgaggcgctgaacaagcggatcgccgacctggatgccgaatttgtcgaagcagctcgtgcggatgagcgaacacaacgactgctgacaatccccggtattggtgcgttgaatgctaccgcgctagtcgcagcggtcggggatgcgcggaccttcaatcgtggaagggacctcactgcctggctgggtctcgtgccgcggcaggccaccaccggaggaaagccgcgcctgcttggaatcacgaaacgaggcagccgatatctacgaaagaacctcattcagggtgctagagcttccttaccggcgctcagcaaaagccagacacggcttggagcgtggcttcgggcgctggctgcaagggcacatcacaatgccgttgtcgtggcgctggctggcaaaatcgcgcgcatcgcatgggctttgttgcgacacgagcggcgatatgaggcaacgccgcttgccgcatgaaacaggatcgttcagcgtgattcgctgaactaacggagtctgcgggaggcgagcagaagatggcctgacagtcgatcggcgttctggaaccctatggcgtaaaatggcactcgatgccggcccccttatgaggaccaggacgcgcggatctccatcttggccaatggcaaactgccaaaaggccggatacgtttttgcagactgatcaatccatcatcaaattgccacttgcggacggggcgggccatacg

SEQ ID NO: 8038 - DNA, 1674 bp, unidentified
  source 1..1674: mol_type = unassigned DNA; note = element_c8cc646
  misc_feature 1..3: note = core
  misc_feature 4..312: note = LE
  misc_feature 313..1305: note = CDS
  misc_feature 1306..1674: note = RE
tattacccgtcttttctgcgaaagacaccaatgcgtcatgaaacatatgcattggctttcgctatctaatttatcttccttctgatattattatgttataagactggcacactacacaacccgaggaggtaagtggcggggctgtatagcggcaaccccgcatatctatatggtgtcggccatccgttaaggcatcaatgattggcgcattgacctagcccgtaaacttatctcttccgaagttgactcgatttcgccggatggccagtcactgtcagctttataactaaaaatatcaggaggttacttttcttgtcttttaaaatcttaaaaaataattgttgtgggcttgatgtccacaaaacctggatctttgcctgcatcggtattactgactccaacaatcgtactgaatataagcaggctcgcttttcttctttttccaaaggtttgcaagagttgtgtgattggcttgcaaaatataactgtactgatgtctgcatggaatcaaccggcaagtactggattcctgtttttaacattttagagcaacacaatctatgggttactctttctcatccaaaatacacaaaaccaatgaaaggaaacaagaccgaccgcaaggatgcgaaatggatttgtgacctttacatgtgtggaatggtaaaaccttctttcattccacctgctgacatcagagaacttagagatcttgtaagataccgatataaactcacctgtatgatcactggtgagaagaatcgtgctcaaaattgtcttaccgtatctaatcttaagcttgatgatgtattttctgatgtatttggtaagtcttcccgttctattacagaacagattttaaaacacccaggagaaaaatttgatgtagcaccttttgttcacggacgctgtaagactcctattgaagaaatacaagctgctgttgatggtgccatttcaaaagaacaagccgttaaactcagacagtgcctttatcacatcgatgaactgaacaagcacatttcagaagtagaacaggaaatccttcgtctcagtgataaatacgagattgctttaaacttaataaggactgttcccggatttaataaaaatccactaactgccattcaagtgctttcagagattggtggtgatatgtctgtcttccccacagcgaaacacctcgtctcatgggcaggatgctgtcctcgcaacgatcaaagcaatcaaaaatcaaatccactcggatttcccgtgctggttcctattttaaaccagttctggtacaagttgcaaatgctttaatcaaatcgaagaaacatttagaatttaccaaccgctacaagcgtatcaaagcacgccgtggtcacaagaaagccatcattgcaatctgtcgtatgatcctgaccgctatctggcacatactctcagatttaaaaccatatacacctgaaggttttctcgaatctcatcctgtgaaggaaggaaaagttctttcctcttcacaagcacttaatcttttttaaacaacggggctacatcataaaggatgagcctttatccgtttcctgattaggtgttgcgttaatattcgatttttcaagctatccctgggatggtttatttgttatgctctatttttctcgggtaacctctacttctttgtttcaaact

SEQ ID NO: 8039 - DNA, 1584 bp, unidentified
  source 1..1584: mol_type = unassigned DNA; note = element_c8d1433
  misc_feature 1..3: note = core
  misc_feature 4..262: note = LE
  misc_feature 263..1459: note = CDS
  misc_feature 1460..1584: note = RE
  misc_feature 26..282: note = bridgeRNA
tttggtactataaaagtgtaattgttgtaccgatacaaatattggtcacgcagttgcacttattctgtataataagggtgtaattggccagacggggtgttatttgggttatcgcatccgttacaaaaactgtctgccctccccttattatatgcattcggttaggcaggttgagactcttggagctttcgtgtaacgaaccaaaatgaatggtaataagtgttggtggaaacaattacaaaattcattgaggaggtcacatatgataagtgttgggattgatgtttctaagggaaagagtacgatatgtattttaaagccatatggggagattgtcagttcaccattcgatgttgaacatacggacaactcattattggaattatccaaaatgcttctgagacttgacggcgaaacaaaagttgtaatggaagcaaccggtgcctaccacatgccgattctgtcatatttaaaggatcaaggactcttcgtatctgtaattaatcctctggttatgaaagaatacaggtgcaagggactaagaaaggcgaagacagatcaattagacgccaagatgattgccaactatggaattgaccattggtttcatttagttgattatactcctgattctgaagtttatcagacactgcggctacttggtcgtcagtatgcacattacatgagaatgaaaatagaaagtattcaggtattgtcaaatatgatggattacacaatgccgggtatacgaacccttctaaaaggctacagcgattgtaacggaaaaaataaggttgccgatttcatggagtattattggcattatgacaacattactaaaaaaacagaaagccagtttgtaaaaagttatatttcatgggcgaaaaaaagaggataccatcaaagtgaatctaaagccttgaagatttatgccttagctaaaaatggtatccccacgttgcgttctacttctccatcgaccaaaatgttagtagtagaagcggcaagagttttaaaagagatagaaaacactctcagaacaattctaacacaaatgcaggaattagcaagagacttgcctgagtatccagtagtgcgcgctatgaacggtgtaggagatgttattgctcctcgcttgatagccgaaatcggggatgtacgacggttttatagccgaaaggctttgattgcttatgctggaattgatgctcctccataccaatcaggtcagtttaccggaagtaaccgtcatataacaaaacgagggtctgctacattaagaaaaataggatatgaaatcatgcaatgcctgaaatcttttaaaccacctgaagacgcagtatacctattcatgatgaaaaaggaatcggaaggtaaggcgccaaaggtcgcaaaaatggcagcattaaataagtttttaagaatttattatgctagagtaactgaagtctatacataatttccaaacgacaaacatatttatttctgatgccagtagaaatagtggtctagttaaagtttgtctattttaacacttgtatagatgtgaacttataaatttacctgttgatttttgttagcagg

SEQ ID NO: 8040 - DNA, 1465 bp, unidentified
  source 1..1465: mol_type = unassigned DNA; note = element_c8d570f
  misc_feature 1..5: note = core
  misc_feature 6..235: note = LE
  misc_feature 236..1450: note = CDS
  misc_feature 1451..1465: note = RE
  misc_feature 1..219: note = bridgeRNA
cacccgttaccttgttggtagccccagttgatggggcgacggtcgccgggcccggcatgacttactgcccctgtcgttgatgatccggggggtgttgtcaccgggtctggtggcgtcgggtgaccgctgatagggacacggcccttgtgaggtctcttcgtaacgtggatgccggcagctgacgcttcaccatcccacgacgaccgtcaccatcgatgaaaggatgatgctcgtcatggaacaagacatcggcttcaacgtttggtgcgggctcgacgtgggcaagcaggcccaccacgcctgcgcgctcgatgctgccggaagaaggatcgccgacaagccactgccgcaggaccaggcccgactcgaggagttgttcaccagcctgctggcccatggccgggtcctggtcgtggtcgaccagcccaacacgatcggagccttgccgatcgcggtcgcctcgtcgatggggatccaggttgcctacctgcccgggctggcgatgcgccggatcgctgacctccacccgggcaacgcgaagaccgacgcccgcgacgcgttcatcatcgccgatgccgcccggaccatgccccacaccctgcgccgggtcgacctcggcgaggaaacccttgcggagctgaaggtgctggtcgggttcgacgaggacctcgccgccgaggcaacccgcctgacgaaccggatccgcggcctgctcacccagatccatccggcactcgaacgcgtcctcggacccaagttgagcaccaaggcggggctcgcggtcatcgagcacctgggcggcccccagggcatcggcaaggcgaccccatccaggttgctgcgaattatcacgaaagccaacccgcgtggcgcgcaggccttcgccgatgcgatcgggaaggccttgagtgagcagagcgtggtcgtggccggcactgccgcggccgaacaggtactgccccagctcgcggcgaccctgcggcagacgctggatcagcgcagccagctcgcggcccagatcgagaaggtcgttgatgcgcaccctcttgccccggtcctgacctcgatgccaggcgtcggggtcaggaccgcagcccggatcctcctcgacgtcggagacgccgccgccttcccgaccgccggacacctggccgcctacgccggcctggcacccgtcacccgccgctcaggcaccagcatccggggcgagttcccagcccgctcaggcaacaagcacctcaaacgcgccctgttcctgtcctcgttcgccgccttgcgatccgaccccatcagccgggcctactacgaccggaaacgagcccagggcaagaagcacaacgccgccctcatttgcctatcccgacgccgctgcgacgtcctctacgccatgctccgcaaccaggaaacctaccgagcctccgaaccctcgaaacagtccctcgcggcttgacacgcaacataggga

SEQ ID NO: 8041 - DNA, 1368 bp, unidentified
  source 1..1368: mol_type = unassigned DNA; note = element_c8dbec3
  misc_feature 1..2: note = core
  misc_feature 3..77: note = LE
  misc_feature 78..1115: note = CDS
  misc_feature 1116..1368: note = RE
  misc_feature 1079..1355: note = bridgeRNA
tgatggggtggacgccccccgacggcatcgatgtgccaaagtggaggtgttgatgacaccacttgagggaggcgtccatgtcagaggttaacacgatcggattggatatcgcgaaacaggttttccaggctcacggggcggatgcctcagggcgtgccgtattccgtaagaagctcaccaggaccaagctgattgaattctttcggtctcaacctcagtgtgttgtcgcattggaggcttgcggcggcgcgcatcattggggacgagagatcgccaagttaggccatacggtccgtttgataccgcctgcctatgtcaagccattcgtgaagcggcagaagaacgacgccgccgatgccgaggcgatctgcgaggcggctcagcggccgagcatgcgcttcgttgcggtcaaggacgaagaacaacaggcgagcggcgtcgtgtttcgagcgcgggacgtgttggtgcgccagcatacgaaatgcatcaacgctttacgagggcacctgatggaatatggctgggtggttcccaaaggggcaacgcatgtatcaaagctgatcgatcagattgaggacccaaactgtcacttacctcaaagtgcacgtgtcatactcaaggttctcattaccaccctgaagtcgctggaggagaacattgcggttctggacgtcgagatcgctcgacgtgctaaagaagaccccgtcgcgcgtcggctgatggcaataccgggcgtgggccccattactgccacggcgatcgtggcgctggtgcctccggtcgagacgttcagaaccgcccgtgactttgctgcctggctgggtctgacgccattgcagaaatcgaccggcggcaaacagcggctcggcgcaacctcgaagatgggtgagcgaacgatccggcgcctgctcatcatcggaggtagcgctgtcgtacgccaagcgtgcacgaggggtgctccggaagggtcgtggctagcgcgcatgctggcgcgcaagccgaggatgctggtgtcagtggcgttggccaacaagcccgcccggattgtctgggcgttgttgtcgaagggtgaaatttacggagctccggtcgcggcggcagaggctcgcccgtgattgtggggtcgtcgagggcgtaggggcggtcggaaggagggtatggcgcaaagggtcgagagacgggatcaggaagccagtttgcaacaaagtgcttcgagcacgcggctctgatttggacctggtcagcgaactcccatacgggcccgcggcacatgacggccgcaacagaggccggacagatgtcagcacccaacccacgcgccacagtctctcgaaagattctccttgctcccgtgggggcgtccacaga

SEQ ID NO: 8042 - DNA, 1417 bp, unidentified
  source 1..1417: mol_type = unassigned DNA; note = element_c8df7cd
  misc_feature 1..2: note = core
  misc_feature 3..82: note = LE
  misc_feature 83..1159: note = CDS
  misc_feature 1160..1417: note = RE
  misc_feature 1184..1404: note = bridgeRNA
tgatgggctggatggcgcccgcttccggcatcgcaatgtgcgacattgggtgtcgtaagatcaccaatgacgggagccatccatgaaagagattagcataatcggggtcgacctggcgaagacagttttccagttgcacggcgttgacgcggaggggaccgccgtcttgtgcaggcatttccgtcgcaatcaaatgctggagttctttcagcgcctgcccggcgggtgcctggtcggcatggaggcctgtgccagtgcgcattactgggcgcgggaactgatgaagctggggcacgaggtccggttgatgcagcccagatatgtcaaaggttacgtcaagcgcgggaagaccgacaaagctgacgctgaagccatttgtgaagctgtcagccgcccgtcgatgcgctttgtcccggtgaagagcgaggcaacacaggccttgctgatggcccacaaggctcgtgaattcctggttcgccagcagacgcaggtcgtcatgccagaggcatgctttcagcatgacgccataagggctcatcttggcgagtttggcatcgtcgtgccacagggtatccataacatgggccgtctgattgcggcctgcgacagggccgatcttcctggacccgcccgcaaggccttgaatctgctggcagatcaattggccgatacgcagagaaagatcgaggacctgacgacggatgttcgtgccgatgccgccgcgaacgaagcggcccggcggctgcagacaatcccggggatcgggccgatcacggcaagcgctctggtggcttccctgccggatgtgtcggacttcaaatcgggcgtcgccatcgtctctcggaccgatggcgcgacgaaggcgaccttgtcggcctggctgggcctgacgccaaggccccactcatccggcggtaaggagcgattgcggcggatttcgaagatggggaaccgataccttcggcgcctgctttatcttggcgcgatcgcccaggtcagcgcccgccgcagagccgaacccggcgacgactggctatggaatatcatccggcgcaagaaaccaaagcaggccgctatcgcgctggccaaccgcatggcacggacggtctatgcgctgctgaagaatggaaccgaattccaggtcgccgaagcgccctgaacgaaaccggggatcgcaccccgacagaaaggcaagtgcattgtgaaatgatggcaaatggcgggaatatcgcgaaggacaccctgttcgaaccggagcgccggagagcgcgtgccattgattgggacccaagcgaccgcggaattcatcagggcgcgcagccgccgagctgcacatcagacgccgtatacatggccgcaaccgaccagtcgccagtcaccagcgatatacacttgccccgcgggcgccatccataca

SEQ ID NO: 8043 - DNA, 1825 bp, unidentified
  source 1..1825: mol_type = unassigned DNA; note = element_c8f536b
  misc_feature 1..3: note = core
  misc_feature 4..238: note = LE
  misc_feature 239..1453: note = CDS
  misc_feature 1454..1825: note = RE
cttatatgttactattgttgcagacccttgtaagcgagggtctgcaggaacaattcctgcgcactagagactgccggggaaagacttctctctccacacggctcgaccggtatgaaaagatcgtacttccccgggcctctttcctgggccaatcgacgattggagggacgtgcttcgagcacccgttatataaggacccgatccccccaggagtgtttctagaaaaggacttaccagtatgtggtacgttggtttggattgggccgacacccatcatgatgtggaggtgctggatgaagcgggcaagcgtgtgggaacgcggcgctttgcccacagccaccaaggcttgaacgagttgatacagtttctgctcggcatagctgctcaacccgaacacctggcctgcattgtcgaaacgaaccacggcctgctcatcacctttctgctggaagcgggcatcccagtctatcccgtcaacccgaagaccgccaatcagttgcggaaatccgcgggagccaaaaccgaccaaatcgacgcccatttgctggcgaagataggccgtcttgacttggccgaactgcgccgactggagccggatagccccagcgtggccgagttgaaaacgctgacccgcgatcaggacgccttgatccagacccagacccgtctggtgaaccagttgacggcttgcctcaaagactactatcctgcggccttgcacctgtttgccaagctgcagcagcgctccacgttggtcttcttgcaaacctatcctaccccccaggcagcgcaggtcgcctcgctcggagagatcacggccaccttgcgcctgggcaagcataccaatccgacgcgcctggcccccaagatcgtcgaggaactgcatcgtccccagctggtcgcgagtgcggccatgatccgtgccaagtcgcgcctgatgctgtcgctggtcaaacaactgctggtcgtgcttgaggatattgccagctacgatgaggccatcgcccccctttttttgagccatgacgatgctgagctgtggagttctctgccgcgtgctggcaagcgcctggctccgcggaggctttccgaatggggcgacgatcgggcgcgttacgtcgctgctggcagtgtccaggcgctggccggaaccgcgccggtgccgttccaaagcggcaactatgccaaagcgcacaaacgcttcgcctgcttgaagccgctgcgcaacgctctgcaccagtttgcctggcaatcgacgcggcaagaggggtgggcacgggagtattaccagcgcaaacgtgctgagggcaagacccacagtatggcgggtcgctccctggccaacgtctgggcacgcattatctatcgcatgtgggtgagcaagaccgcttatcagagcgcgacctttgaagcggcgaagatgactcacgcgccccgccaacgtgtcgcctgagtccagggtcacgtttcgttgggcacgcttagcactgcgaagccctttgctagtgcaggtagtgtatgctccaacggagtcgcccaaacggttcccgccccgtctgctctgccgaccgcgagccgttcccgcgcacctgcctgccgctccaacgtctgccgcagcccgccaccgcgttcccgactcccggtgtgggttattagctacagaccacgccgagtcaaggccgcgcaggaggtgggaaggccgggtgtgggcgcgctcgtcttggccttgaccggtgtggtagacttgtatccccacacgggaggctgcttcacctacgctcaccttgcttttcctttctcgtttttggctcttgacatagagggt

SEQ ID NO: 8044 - DNA, 1612 bp, unidentified
  source 1..1612: mol_type = unassigned DNA; note = element_c8f56b7
  misc_feature 1..3: note = core
  misc_feature 4..242: note = LE
  misc_feature 243..1481: note = CDS
  misc_feature 1482..1612: note = RE
  misc_feature 8..218: note = bridgeRNA
gttcgtaatataaggttaaccagatttctggttgacctttttttatttggtcttattatatcggtagtcggggtagaacgtagcacccgtgggactactgatcccgtccacaaaactgttcaccccctacttgtataaacatgtttcaggctggttgggacaagaaggatcccgtttaacaagcgaacctatgaaggagctaaggggttaccgactaatttattctaggaggagaatcatagatgaatccagttgtaggtctggatgtttcaaaaggagaaagccaagttcaagcattcttaaataaaagaaaaccctatcgtaagagctttagcgttaagcatactcttgatggtttagatcgtttattagaattcttggtagagattacgagattaacgaatggaaagaaaccttcggttattttagaatcaacaggccattatcatcatcctgttgttcagtttctagaagatcaccattatgtgtacattgtggtaaatccacttgtttctcatcgttcccgaagtgcgaatttaaggaaagtcaaaacggacgcagcagatgcttatcagctttgtgaactgttttataaggaagagctagctcctcatcgaaaaagagggatacagcttttaaatcttcgcaaccttacgagacaacaagaaacgatcacaagtaatgcctctcaaaccaagttacagcttcaatcgatactagatcaagtatttcccgaatatagaggcgtttttggaaatttatactcaaaggtttctttacgaatgttagaagcttttccaacatccgaaacggtcttacaagtaagtgaagccgaattgagagataaaattgcttcgttatgtagaagtcgttcagagaaatgggcattggacaaagctcaaaaattaagagaatcagccttgcgtaatccatttcagaacaacttatatgagagtcttatttttaatcttaaaatgctcattaacatcgttcttcaatacgaagagcatctatccatgttagcagcagaaatagatgccctcgccaaagaaattgaagaatataagattatccgatctatccctggtattggagaaaagattgcagcaacaatcatttcagagattggcgagatagaaaggtttaatcaccctaaaaagttggtcgcgctcgcaggcgttgacccgagtgtctattcttctgggagatttacagcatccgttaaccgcatcacgaaacgaggatccagcagacttaggctagccttgtatatggctgtcacctgtggcatccgagatgcccgaaagcttaaaacaacggatgaaattatccctagaaacaagaaactacgagaattctataataagaaacgcgacgaaggaaaaccctttcgggtagcagtcattgcgtgtgtaaataagctcttacactggatctatgcccttttaaaaagcagatcgacttaccaagatatagtttaatatctacatctatccactaaatgaaaaaccttccaagattgaaaatcggaaggttatttgtcatggacaaaattagtataacacgaatatatataggcttttaatgaaaaatgttgacaaactattagctg

SEQ ID NO: 8045 - DNA, 1351 bp, unidentified
  source 1..1351: mol_type = unassigned DNA; note = element_c8f97cd
  misc_feature 1..2: note = core
  misc_feature 3..80: note = LE
  misc_feature 81..1091: note = CDS
  misc_feature 1092..1351: note = RE
  misc_feature 1084..1338: note = bridgeRNA
tgttggggtggacggccccctacggcatcgaatgtgccaggctgtgattgtgtgacaacgcagcaaggggagccgtccgaatgacgattatcagagttggtttggacacgtccaaacatgtctttcagattcacggggtcgacgagaacgagaagccggtattgcagcggcagctgcggcgcagcgaggtcgagaaattctttgccaaactgccgccgacgcgaatcggcatcgaggcgtgcggggcctcgcatcattgggcgcggctgttgcgcggcttggggcacacggtgatgctgatgccgccgcaatacatcaagccctacgtcaagcgcggcaagaatgacaagatcgatgccgaagcgatctgcgaggcgatgagccggccgacgatgcggtttgtgccagtcaaatcggccgagcagcaagcggcgctgacaatgctcggggtgcgtgatgtgctggttaagcagcggacgatgctgatcaacgccatccgcggccacgcggcggagttcggcgtcaccgtagccaagggacccaagcaggtgagcgagctgctgcagcgcttggcaaacgacgagggcgtaccgacgctcgcgcgcgagatggtcagcatgctggccagccagctcgacgggctggacatcaagttgaaagcgatcgaggcgcggctgatggcctggcatcggcaggatcagaccagccagtgcttggcgaccatcccggggatcgggccgatcgccggcgtcagctttgccctcaaggtggccgacccgcgggcctttcgctcgggccggcactttgcctcttggatcggcatcacgccgcgcgagaactcgaccgccgggcgacagaagctcggcaggatcagccgtgccggggacgaggatttgcggcgcttgctggtcatcggggcgaccgcggtgatccgcgccgccaagccgggccgcacttcgccgtggctgctggcattgctggcgcgcaagtcgaagaagctcgcggccgtggcgctggccaacaagatggcccgcatcatccgggccatgatggtgagcggcgagacctaccgccggccggcgcaggcctgagcccatccaccagcaagacctggcacatctcaatctggcaaggacagcaaccgcaagatggcaatcggtcgatccgaggatcgggacaccccgtgggatcctatggtgctcagacatcacttttctgtttgggacccgatccgcgtaacccatctgggcccgcggtcatccgaccgcaccacacaggccggacatatgactgcaaccgaccagaggtcatcgcagctgcacatccttgcgagacgggggccgtccacata

SEQ ID NO: 8046 - DNA, 1204 bp, unidentified
  source 1..1204: mol_type = unassigned DNA; note = element_c8fb896
  misc_feature 1..2: note = core
  misc_feature 3..220: note = LE
  misc_feature 221..1201: note = CDS
  misc_feature 1202..1204: note = RE
  misc_feature 39..200: note = bridgeRNA
tcctttagacttgtaaatgattaaatttgataatataaattaattgagaaagggggcaaggtaaactatgactcgctctaagttaaaaaacttatccgttgatttagaccttgcctcctttcattaattactcaaatagaaattagggctagtgacccattattaaggagttgagtttaattaatgatttctcaatatttattcacttaaaaacaaagttatgaaaaaaagaatttttattggtattgacattagtagtttaacattagacgcttgtgtacttattgacaagtctaaagaatcattagttattaaaaacgaagtgaaggagattaaagctcttttaaagaagttttctaagtatgagttagttattggtatggaaaacactggcagatataattggccattgtttgaggtattggcagactcaactcatttagtttatgtaattaatccacttcatctaaagaaaagtcttggtttagttagaggtaaaaacgacagaatagaggctcttcgaatagcccaatttattgaaaaaaatcatgaagaattaaaaccttggacttgcccatcagagagcatcaggaaactgaaagtgctacttacagagcgcaatttcaggattaaatgtaaacgccagctcatctgtcaaaaacgtgattattctaaaatgaaaaaacttaaattggaaagttctttaagtaaaatgaataaagaaatgatggatcattttgacaagcaaattaaacttatagagaagcaaattgaagaaatcattcaaatggatgaagaattaaatcaacaagctaaattaataaaaacagttccaggtgtaggtaaagttttaagctggacaatgcttgctaaaacagaagggtttaaaactatagtcgagccaagaaaaatggcttgttatagtggtgttgtgccttttgacaatcaatctggaacctcaattagaggtaaaaatcgagtctcaagtttagccgataagaatataaaaagcattctacatttagcagcaatgagtgcaattagactcaataacgatttaggaaaatattatcaaaggaaaattgctcaaggaaaaaacaaaatgagtgtaataaatgccgtgcgaaataaaatcatacacagaatttttgcagtaataaaatcgcaaactccctacaaaatacatttggaattatcatagaaa

SEQ ID NO: 8047 - DNA, 1360 bp, unidentified
  source 1..1360: mol_type = unassigned DNA; note = element_c904e51
  misc_feature 1..2: note = core
  misc_feature 3..80: note = LE
  misc_feature 81..1100: note = CDS
  misc_feature 1101..1360: note = RE
  misc_feature 1079..1348: note = bridgeRNA
tgatggggtggacacccctcgacggcatcgatgtgccaaggtggcaggtgtttaacctccacaacagaggagtgcccgaaatggacgttagcacaattgggttggatctggcgaaaaacgtgtttcaggcgcatggcgccgatgcgtcgggatccgttgctttccgaaaacaattgcggcgtgacaaggtgttgagtttcttcgctagccaaccgcgttgcgtggttgcaatggaagcttgcggcggagcgcattattgggcgcgcgctatcggtgatctcggccatacggttcgtttaatcccgccggcctacgtcaaaccgttcgtcaagcgccagaaaaacgacatggccgatgctgaggcgatctgtgaagcggctcaacgaccgacaatgcggtttgtcacggtgaagagcgaggaacagcaggccagttcggcggcatttcgggttcgagatatcctggtgcggcaacgtactcagttgatcaattccctgcgtgggcatcttaccgaatacggactgatcgtcgcccaagggccggcccacgttgccaagttggttgaacaggttggagatcccgaaagcgatctaccggaagcagcgcgtatagtgcttctcatgatcgtcgaaacgctcaggtctttggaggagaagatcaagcaactcgatcgcgaaatcgtacgacgcacccgggaagacaaagacgcgcggcggctgacgacaatccctggcatcgggccgataaccgcaacggctcttgtggcgctggcgcctaacgccacaacctttaagaaaggccgcgactttgccgcctggttaggcccgacgccactacaacgttcaacaggaggaaaacagaaactcggcgcgacgtcgaaaatgggcgagcgaacgcttcggcgcctacttattatcggcgccagcgctgtggtccaacaagcttgtaaacgcggtagccaacaagaaacgtggcttgctcgcatgctcgctcgcaaaccgcgcatgcttgtgatcgtggctctggccaacaagctggctcggattgcctgggcactgatggcatcgggtgggacatatagagctccggcggcggcatagccgcacagcctgaggcgtcgagaatgtaggaaggtcaaaggaaggtatggcgaaacggtcgatgagaggggccagaagaatcagttcacgacgaagtgcatcaaagcacgctttcgtggtttggatctggtccactaactcccatacgggcccgcgacacttaaaggtcgcttcagaggccggacagatgtcagcacccgactactcgcaaatgatacctgactgaagattcttcttgcattcaccggggtgtccacaga

SEQ ID NO: 8048 - DNA, 1168 bp, unidentified
  source 1..1168: mol_type = unassigned DNA; note = element_c90e048
  misc_feature 1..2: note = core
  misc_feature 3..217: note = LE
  misc_feature 218..1156: note = CDS
  misc_feature 1157..1168: note = RE
  misc_feature 37..223: note = bridgeRNA
cttgtcttatgactatctgcgcttcttcgtgagataaagaagcgccggagaggacggccatccttctccggcgatgggggacggatcggtgacgcgccggtcgtcattctgatgagtgccgggccgagctagagtatgatcgcccccatcttttccaatcgtcctgaacggatacccgagccttgggctcggatgacaagcataggagacggaaaagatgacggacattaccatcggcgcggacatctcgaaagagcatatcgatctgcacagcctaccagatgggcaaacgttgagggccaccaacgatcgcaagggatttgcggccattctccaatggatcggcgcaaagagtgtggagcgcatcgtgtatgaaccaaccggtccctaccataaggccttcgagcggttcatggcagcaaacggcttggccctttccaaggtcaatcctcgtcttgcccggcgtttcgcggaggccactggccggcttgccaagacagacaaaatcgatgccggactgctggcccgttacggcgcgcttcttcagccccgcatccttgaagccaacacgcaactcctcaatgacttgaaagagttgcatgtggcgcggctggccctcgccaaagacaggaccgccgcaaagaacagaggcaaaaacctttccaacccgctgctgaagaaacagaacgccgacaggcttaggcagatcgaacgccagatcacggccgtggacgacgccatcatggctttgattggcaaggacgcatccctcaaggccaggctcgatatcctcgtctcgattccgggtgtgtcggagatcacggccttcacgcttctcatcgagatgcccgaactgggtgaactggatgagaaagccgcggccgcactctccggtcttgcaccgatgtgccgacagtccggacgatggaccggacgcgcatcaatagccggcggaagggccatcgtccggcaggcgctctatatgcccgcactggtcgcaagccgcttcaaccccgacctcaaggccaaatacgacgtcctcacaaaagcgggcaagccgccaaaggtcgccatcacagccatcatgcgaaagctcatcgtgctcgcaaacgcactgctccgaaacaatcgaaaatggaccccaaaacctgcttgatcaaaacggata

SEQ ID NO: 8049 - DNA, 1324 bp, unidentified
  source 1..1324: mol_type = unassigned DNA; note = element_c920c59
  misc_feature 1..2: note = core
  misc_feature 3..8: note = LE
  misc_feature 9..1085: note = CDS
  misc_feature 1086..1324: note = RE
  misc_feature 1087..1318: note = bridgeRNA
ttaataagatggtacgccccacacctgcactacactcagctatgtcgctgaatatgggaggtgccatcatgtcggcaatcaaagttattggaatcgatttaggtaaatctacttttcatctagttggccacgactatagtggtcgtgaacaatatcggcacaaattatctagaagtaaattactacagtttatctctgtgcatgaaccaacattgatagcaatggaggcttgctgtggtgctcactggcttgcaagaaaatgccaagaatatgggcatcaagttaagctgattccccctcaatatgttaagccatatgtgaagagtcataagaatgattttattgatgcagatgctatagccgaagctgcgaccagaccaagaatgcgctttgtttcaccgaaaactgaacaagcacaattaggagtagttattcgcaggattagaacaggctatattcgagagcgaacggcaacgatgaaccgtattggttctatccttactgagtttggcttcagctttccacgcgggcatgcgaatatgaagcgtctttttcaatggttggcagatacagggcagccagttccttctttactagtctttgagttacgagatcagctttgtcattacaatgatcttaatgacaaaattaaagagcaagataagaagctggaaactcttaatcgtgacaatgagttatttactatattacaaaccgtaccaggcattggacctatgacagcttcttgctgcctgtcttccgtctccgaccctaaagacttttccaatggccgtaactttgcagcttggctagggttagtaccatttcaatattcaacaggtggaaagccaagaatgctagggatatccaagcgaggtaacaaagaacttcgtgagctttttatccatgcagctagggctgttttatggcgagatgaaactgctcagagatactttggctcgtggcttacagacttaaaacttcgaaagccttttaatgttgctttagtagctttagccaataagttagcgaggatagcttggtctgttatggctacgaagaaaccatttgaaataagagtataaatcaagtttgcatatgaaaatgaaagatgacaaaacggttagaccaccagattgaagaccttgtggacagaacagcgacatagaacgctttctcatttttgaggacaatctggcgcggatctcatcgtagagctggggctatgtagcatgtaggtgtccccaattagactctgaatacattagcgcaaaccaactccgttatttgaatttttcacttgcaaaacggggcgtaccataca

SEQ ID NO: 8050 - DNA, 1618 bp, unidentified
  source 1..1618: mol_type = unassigned DNA; note = element_c929b10
  misc_feature 1: note = core
  misc_feature 2..276: note = LE
  misc_feature 277..1497: note = CDS
  misc_feature 1498..1618: note = RE
  misc_feature 12..296: note = bridgeRNA
tactacaatgtatttatggttaatatcccttacagccagtaaggaattatccatcttgttgcttaagctgttagaatgagtgaggcaataggtctggccgaaacctcctggaactttacgtccgtttttaagtcagccaaccagccctcattcgcagcattcgttttacgcaggttgaaccatcaggcgttcgtgtgatacacccagtagattgaataggcaatgagtaaaactggcaaaagaccattgctaatactttccataggagtatctgttatgaacgctgttggtattgatgtttccaaaggcaagagcactgtcacaatccgcaggccgggcgatattgtcattatgccgccccgcgacatccctcacacacaatctgcaatcaattcccttattgaacagatcagagcccttgacggggaaacgaaagtctgcatggaacacaccggcaggtactatgagccggttgccacatggctttctgatgccggtatctttgtcagcgccgtaaatcccatcctcatcaaagattttggggatgattccctgcgcactcccaagaccgacaaggccgattccaaaaaaatcgcccgttacacacttgaccgctgggcaaaactcaagcaatatggaagcatggacaaaacacgaaaccaattaaaaaccatgaaccgtcagttcggcttctttatggcacagaagaccgccatgaagaacaacctcattgccctgctggatcagacctacccaggcgcaaacaacttctttgacagtcctgcccgcaacgacggcagccagaaatgggtggacttcgtccatacctactggcatgtggactgtgtacgctccaagacgctgaatacctttacggagcactaccggaactggtgtaaacgcaagggctataatttcagcgcggccaaagcagagaagatttatcaatcctcctctgacctgatcgccgtattcccaaaagatgacagcacgaaactattgatacggcaagctgtggcaatgttgaataccgcctctgagaccgtggaatccctccgcctgaaaatggatgagactgcttcttctctgccggaatacactgtcgtcatggcaatgaacggtgtcggtcctacccttggtcctcaacttatggctgagatcggggatgtgacacggttcacacaccgtggcgcgctgactgcctttgcaggcgttgaccctggaaaaaatgattccggacagcacatccagaaaagcgtacatacgacaaagaaaggttcgccaagtctgcggaggaccctcttccagatcatggacgggcttatcaagcgttcacccattgatgaccctgtttacgccttcatggacaagaaacgagcgcagggcaagccttattacgtctacatgactgcaggtgccaacaagtttctccgcatttattacgggcgggtaaaagaatatctttccacgcttacggaaagcgaaaaacttaaataaatgccattgctttttcatcaggccagcgttctgcggtggtctttttgtaatacctatttttcaacctgtataaaattttcaaagttcatcaatttctgcttgactttttatttgcagactg

SEQ ID NO: 8051 - DNA, 1153 bp, unidentified
  source 1..1153: mol_type = unassigned DNA; note = element_c92bc15
  misc_feature 1..2: note = core
  misc_feature 3..190: note = LE
  misc_feature 191..1138: note = CDS
  misc_feature 1139..1153: note = RE
  misc_feature 44..189: note = bridgeRNA
cttgtatcttggaccgagtgcggcaatgatacgttacatcatcaacccgggcgtgatagatcgaaggtgccgaggtccacagagaccgggggacagcccaggtcgtcacgccctcacagtgcagagcccgaacagttgcgtgggccgttgagcccgtatcatgcaaggccgggccacacaggaggctatgatgacgcgtacaccagtcgttgtcggaattgatgtctccaacgcgcagttggatatggccctccgaccggaagggcagttctccgcccccaacgatgaggccgggtgtgcgcagatcctcacacgcctgagggcggtgtccccgacgctggtggtcttggaagcgaccggcgggctggagatcctgctcaccgggatcttggccgccgctggggtgccggttgtcgtggtcaatccgcgacaggtgcgtgactttgccaaagccaccgggcgcctcgccaaaaccgatgccctggatgcgcagacgctggcgcacttcgccgaggtcatccgcccagagctgcggcctctgccggatgagcagacccaggccctggccgccatcctggcgcgccgtcggcaactcgtcgagatgctgacggcggagaagaaccgcctcggcagtgcgcgcaagcccgtgcgcacgagtctgcgcacgcacatcgcctggctcgaacgggaattgacccacagggaccgcgatttggcccacgcgattcgggagagtccggtatggcgcgagaaggaggcgttgttgcagagcacgcccggtgtggggcccgtggtgacgacgacgctgctggcgaatctgccggaactcgggaccttgaccggcaagcagattaccgcgctggtgggggtagcaccgctgaaccgggacagcgggagctggcgcgggaagcgtacggtgtggggcggccgtgcgcaaattcgggcggtgctctatatggccgcgattgtcgcggcccgcttcaatccagtgatccgggcgttctacgaacgcttgtgtgccgcaggcaaagccaagacggtggccttgacctcctgcatgcggaaactgctgatcatgcttcatgcgatgctcaaacatcggactccctggcgcacggagggggctcaacatgcttgacagccaagacagttg

SEQ ID NO: 8052 - DNA, 1423 bp, unidentified
  source 1..1423: mol_type = unassigned DNA; note = element_c93064d
  misc_feature 1: note = core
  misc_feature 2..90: note = LE
  misc_feature 91..1125: note = CDS
  misc_feature 1126..1423: note = RE
  misc_feature 1186..1421: note = bridgeRNA
taatggaatggtccacctcacttttaccagtctaaaataaggtttagatataggataagaagtgattccaacaatgaaatggggcagatcatgaataattataatgtaaacagtattgttacagtcttgggaattgatatagctaagcaaagttttcagttgcatggcactgataagcacagtaaagcagttcttaaaaagaggttaactagaaataaattatcagcttttattgcaaattcacccccttgtttgattgggctagaggcctgtggaggtgctcactactgggttagaacatttaaagcacaggggcataaagtacgaatgatagctccccaatttgttaaaccctatgttaaatccaataaaaatgatgcggttgatgctgaagcaatatgtgaggctgttcaacgcccaagtatgcgttttgtacctgacaaaagtattgctcaacaagacatccaaagccttcatagagtgcgtagccaactagttgctagacgaacggctcaagccaatcaaatacgcggccttttgcaggaatatggccttattatcccaaaaggtatttctcatgtaagaaaagcaatacctctgattcttgaggatgctaataatacattaacctgtttatttagagagttactcaacgagttatacgatgaattggtacatttagatgaccgtgtcaatacgttggaaaaaaagttagagataatttctcgtgaaagtgatgattgtcaacgccttctaactattcctggtattggcttattaacggcaacggctttgatcgcagcaattggaaatatttcagctttcaatagtggacgtgaactagctgcatggttaggtcttgttcctaaacaacactccactggtggaataccgacattattgggaattagtaaacgaggaaatagttatttaagatctttactcattcatgggggacgagctgttgtgcgagtagcacctttatattcagataagcgaaatacatgggtcaatacgttaaatgaacgccgtgggaaaaatatttcagccgtagccgtggctaataaaaatgcccgtattgtatgggcattactaagcaataaagagaactataaagcagcatgaaccttatgtaatattaatcaattacatgatgattagttttttagataatatttaaattttcttacaaccaaattgtgtggataaattgaagtgatggcataaaagataacatctgcattcctaaaaacctgaagccgtctagggttcatttgaaaccgttgacttgatgaggacaggaatgcgctaattccatcagggccagagataaaaaaacatctcacttaaggccggatatatgggagcaatatttctttatgtttcagtttagtttttcttgaaatacgaggtggaccatata

SEQ ID NO: 8053 - DNA, 1818 bp, unidentified
  source 1..1818: mol_type = unassigned DNA; note = element_c931156
  misc_feature 1..2: note = core
  misc_feature 3..72: note = LE
  misc_feature 73..1110: note = CDS
  misc_feature 1111..1818: note = RE
  misc_feature 1593..1805: note = bridgeRNA
tgttggggtggacggccccacggcatcgagtgccagaattggggctggaagcaaccaagaccggagccgtccatgacccaatataaacgcataggcatcgacacgtccaaagccgtgttcacgctacacggcgtcgatcagcaagatcggccggtgttgcggatcaatcttcgtcgcgcgcagatgattccgttcttcaggaagctccctcgcaccgagatcgccatggaggcctgtggcggcgcacattattggtcccgcgaactcatcgcgcttggtcacgaggtgcgtctcatccctccccaatacgtcaaaccttatgtcaagcgcagcaagaacgatcgtaacgacgccgaggcgatctgcgaagcggcggggcggccgggcatgcatttcgtgcctgtgaagtccgttacgcaacaggctcagggcatggttttgaaagtgcgcgagactctggtcagtcagcggaccctgctggtcaacacgctccgcggccacgccgccgaattcggcgtgatcgccgccaaggggcttggtcaggttggtccattattgactgctattgaacaggagaccgccattccgcctgaggcaaaagacatggcctccctgttgggccgggagattgatgacctcgacgccaagatcaaggaactcgatgtgaaactgaccgccgcgcacaaagccaatgaggtcagtcagcgtctggcctcgatccccggcgttggaccgatcaccgcgttgacgttggcgatcgagatcgatccgcaagcgtttgaatcaggccgtcacctggccgcctgggctgggctgacgccgaaggaacattcgaccggcgggaagcaacggatgggcggcatcagccgggcgggccatgaacggttgcgtgttctactcgtcgccggcgccacctcggtgatcaatgccgccatgcggccgggcagcaagctcatgacagaatggctgcgtgctctgctcgcacgcaagccgcgcaagctcgtggccgtggcgctcgccaacaagatggctcgggtggcatgggtgttgatgacgcgcggtcaagtgtaccggcgcccggccgccgccacggtagcggccgtggcatgacaaacgttccgtcacgtaacggttcagagcggccgcaccggggcggacgcttattacacaatgcaagggagtggacgcatgcctcctcaaccgatcggtgaaaccgccatgaccggcgccgaacgtcaggcgcgttatcgcgccgcgcacgggaatggcgcacccgtcattcggatccgccgcccgaccgaccggcgcagccgaatccagcgctggaacgacaccatcgccgcagccgtggaactacaggccgaatatgccacatggctggacgcgttgccgcacaatcaacaggacagcgcgctcgcggaggccttgcgggcgattgtcgaattcgatctctccgagcttgaggcgattgaaccgccgcgcggcttcggccgtgactgaacacccagatgacccagacggcaggggtcacgatgacgcgcggggcgacttgtcggcatcagccggcgaccgccgggaccgcgggtcgatgccgggatgaaagagctgaatgagatgacgatcggtcgaaccgacgatccagagaacccgttccgtgccacggctctcgaagccgcgttgttgtttggggctggatcgcggaacccatctgggccagcggacatgttgccgcgtcgacaaggccggacacatgatcgcaatcgaccttcccgtcagaagtctcgtttttcctcttgcatccgaggggccgtccacaca

SEQ ID NO: 8054 - DNA, 1609 bp, unidentified
  source 1..1609: mol_type = unassigned DNA; note = element_c932435
  misc_feature 1..2: note = core
  misc_feature 3..241: note = LE
  misc_feature 242..1504: note = CDS
  misc_feature 1505..1609: note = RE
  misc_feature 16..312: note = bridgeRNA
ctcctactatatagttgtagtggttatatacccaacagccagttgggatatagtcctctcattgttaaagctgtagaatgaggaggtagtggtctgacggatccctccttgggtctaagagattagcgcccgtaatcaagcctgtctgccagccgcctcattcgcagccgttcgattgacgcaggttgaactgcaactatacccgcacgttcgcgtgataacccaggagattgaataagcaatggggaacactggtaccattacaaattcacctgatggaggtacgagtatgattaacgcagtaggtatcgatgtatcgaaaggcaagagcaccgtcgcagtcctgcaacctgcaggtgtcatcattaaaaaacctttcaatgtgcttcacacggcttctgggctacgtggactctctgactatatcgcctccctggagggggatacgcgcgtcgtcatggagtgcacgggccgttatcatgagccggtagcaagagccttgtcttcagccggtctcttcgtcagcgcagtcaatccgcatctgatcaaagactacggaaacaactctctccgcaaagtcaagtccgatcctgctgatgcgaagaagatcgcccgatacacccttgacaactgggcggatctccgtcagtatgcaatcatggacgagacacgaacacaactgaaaacccttaacgcgcagttcgacttcttcatgaaaatgaaagtcgctgcaaaaaacaacctgatcgcccttatggatcagacctatccagggatcgataagctcttttcctctccggttcgttcagacggttccgagaagtgggttgatttcgcctattcattctggcatgtggactgtgtcagaaagatcggtctgaaagccttcacggaacgttataagcagttctgcaagcgtcatggctatgattttcaatccaacaagcccgaggaaatcttcaaagcctccaaagagcttgtagcggtatttcccaaggagcaggcttatcggaatatgatccgcatggccgttgaccaactgaacatgacctctactcatgtggaactgcttcgcatggagatggattctctggcgtcaacgcttcccgagtacgaaaccgtcatgggaatcaaaggcataggctccacctatggtccacagctcatggcagagatcggagacatttcaaggttccctcatcgcagttccataactgcttttgcaggtgtggaccccggggtaaatcaatccggtcaaatggactcaaagagcaaccgggcttccaaatgtggcccgccccggcttcgtaaaacgctgttccagatcatgtcaacgctgttacagttacaaccgaaggacgatcccgtatatgaattccttgacaagaaacgcagggaaggcaagccgtattacgtttatatgacggcaggtgcgaataagttcctgcgcatctactacggaaaggtcaaggaatgtatggctgctcaggccaaatctgagtaatactccctcctgtttcagaccgctgttttacagtggtctttttgttgtgtccttgttggctgtttaaaaccttcttcaaaaagtacttgactttttattagcagg

SEQ ID NO: 8055 - DNA, 1184 bp, unidentified
  source 1..1184: mol_type = unassigned DNA; note = element_c94c352
  misc_feature 1: note = core
  misc_feature 2..213: note = LE
  misc_feature 214..1158: note = CDS
  misc_feature 1159..1184: note = RE
  misc_feature 58..224: note = bridgeRNA
tatatctttcgatgggttcaaacttcagcgtgcaggccggttggtgaactgcatgccgatccggttggctggtcgcggtgcagcttgtgtctcctgcgagcgaacaagctccaacaacagcccaaggcgtaccgcggctgcctcgttctgcgtcatcccgaatggttgattgatctcatttcgcatccgtaaggctgggagccggagaacaccatgagccaaccgaacttcgtaggcatcgacgtggccaaggacaccgtggaggtggcttgctcggatgcgtcgacgcattcgttcaccaacaacgaggcgggacacgccaagctcgtgcgctggctgactcgcaaggccgttgcacttgttgtgctggaagctacgggcggctatgagcaggcttgcgcgctggcactggctagcgcggggctgcctgtgtcggtgctcaatccacgccaggcgcgcgactttgctcgcgcgatgggtcggcttgccaagaccgatcgcatcgatgcgagcgtgctggctgagttcgctgctgtgctgcacgctcgtggccatcagcctcgcccgcttgccagtaccgagcagcgcgaactcggtgcactggtggcgcgacggcgccagctcgtgacgatgctggtgtccgagcggcagcgcctgggcgtggcccatgtacgtgccaagcccagcatcgaggcggtgatcgcgttgctgctcaagcagctggccgacatcgacaacgatctgcagcacgccctgaaggagcggcatgccgatctgtctggactgctgcagtccgtcaagggggttggcccaaccaccgccagcacgctgatcgccgagttgcctgagctgggcctgctcacgcgcaagcagatcaccagcctggtgggtctggcgccgctgaaccgcgactccggcactttcagaggccagcgccacatcttcggtggccgcgcgagcgtgcgtcgtgtgctctatgttgccgctttggtcgccacacgcttcaaccccgccatcaagacctgctaccaacggctggtggccgccggcaagcccaagaaggtcgcactcgtggcctgcatgcgcaagctgctcatcacgctcaatgcgattactcgcaccaagacgccatggcgctcggacttcggctcggcgtgacttcagggtcttcaagatggttgctg

SEQ ID NO: 8056 - DNA, 1153 bp, unidentified
  source 1..1153: mol_type = unassigned DNA; note = element_c951b3e
  misc_feature 1: note = core
  misc_feature 2..199: note = LE
  misc_feature 200..1132: note = CDS
  misc_feature 1133..1153: note = RE
  misc_feature 14..209: note = bridgeRNA
ccttgtatctggcgaatcgcgccgccggtgtagattggctgcgctgcgagggggtgggtggccacccaccccctcgtgcggcggctggcgcccgtgaaccctccggccacaaccgcaggtgagctttgggaccgccgccgttgtcacgcacgaccgaacagtcgcccgaggggcagtcgcacgcacaaggcaggttaccgtgacccatgttgtctgtggagtcgacgtttcgtcgacgggattggacgcgcgcatcggacgctcaggcgccttcgcgcatttcgccaacagccccgagggcatcgaggcgctggcggccttctgccggaagcacgaggtcgctctggcggtgatggaagcgaccggaggatatgaaaggcagccattcgcgctgctctggagccatggcgtccccgctgcgatcgtcaacccgcgcgcagtgcggaacttcgcccaggccatgggctggctcgagaaaaccgaccgcatcgacgccggcgtcatcgcctggttcgccgaggccaagggcgtcgagcccatggcgccggcgcgcgatctccaggcccgcctggcggcgctggtcacgcgcctgcgccaactcaccgacctcaggaccgcccagtccaaccagcgacggctcgtgagcgagcccatcgcgctcgcctccttcgacgagttgctcgcgctcatcgcccgccagatccgcgccctcgaaaagcagatcgccgagctgatcgaggccgatccgctctggcaggcgctcgacaaggccttccggtcgatcaaaggcgtcgcagaccgcaccgtcgcgcgtctcatggccgagttgccggagatcggcctcatccccaacaaggcggccagcaagctcaccgggctcgccccgctggcccgcgacagcggaaaagccgaaggacgccgctccgtccgcgggggccgcgccggcgttcgggcgactctcttcgtcgtcgccgagatcgtcagacgatacgacccagactttgccgacttccaccgccgcctcaaactcgccggcaagccaaagaaggtgatccgcgtcgcgctcgcccataaactcctcgtccgcctcaacgccaaagcccgagacgcccgagcctctctccttgcgtaagcttgacaagccagacagtcg

SEQ ID NO: 8057 - DNA, 1308 bp, unidentified
  source 1..1308: mol_type = unassigned DNA; note = element_c957128
  misc_feature 1: note = core
  misc_feature 2..67: note = LE
  misc_feature 68..1090: note = CDS
  misc_feature 1091..1308: note = RE
  misc_feature 1103..1294: note = bridgeRNA
taatgggatggactacctcttccctctgcgcttaactgaacagaattcatccagcaggagtgtgactatgaacatcgtatttatgggcatcgacctggcaaaaaatgttttccagctttgcgggctgaatcaggcaggcaagccggtttatacccggcgtgttgagcgaaaaatattacttcagacactggtcaatatacccgcctgcctgattggcattgaagcatgtacgggagcattttactggcagagggaatttgaaaaactgggacataaagtgaaaatcatcagtccccagtatgttaagccttttattcgcgggcagaaaaacgatggtaatgatgcgcaggccatcgcggtggcactgatgcaaccaacaatgcagtttgtccccccaaaaagcccagaacagcaggatatacaggcattacatcgggccaggcaacgaatagttaaccaccgtactgcaacaatctgccagatacgagggcttttacttgatcggggtatctcaattggtgctgcgatgtccagagcccggcgtgctgtaccactgatacttgaagatgcggaaaatggattaagcatcagaatgcgacggactgtcgctgaactttatgagcttttcatcgatctcgagaaacggattaacttttttgataaagagatcgaaactgttttcaggcaatcatcagaatgtcagcgcatagccaaagttaaagggattggcccgaaaacggctacagctgttgttgctgcgataggtaatggccaggagtttaaaaacggccgtcatttttcggcatggcttggacttgtcccacggcagcattcaagcggagacagacaggtgctgatgaacatcactaagaaaggcgataagcacctacgaacgcttttaattcacggagcccgcgcagttgtccgggtagcaacaaataataattgtggttctctaaacccatgggttaatcagttaaaagaacgacggggtttcaataagaccactgtcgctgtggcaaacaaaaacgcccggattatctggtcgatccttcgacatgaaacggaatatcaacccgccttgaattaaggcttaccttatgaaagttgcagcgtactgaaaatggtaacaggttgctcctgcacagtcggaacctgatttttatactggtccctgagaccgtccaagtgttgaggcgactgtgtgcggatttcccatttgggcacaggcatattcctgatgccggatagatgttagcaacaacctaaacctgattcagtgcttgcaaaacagaggtagtccataga

SEQ ID NO: 8058 - DNA, 1598 bp, unidentified
  source 1..1598: mol_type = unassigned DNA; note = element_c95f2de
  misc_feature 1..2: note = core
  misc_feature 3..263: note = LE
  misc_feature 264..1475: note = CDS
  misc_feature 1476..1598: note = RE
  misc_feature 12..283: note = bridgeRNA
ctattacaataaatttggacaggaaagccgggcagccagtccggctttctttccatctcatgcctaagctacaataaggggagcaactggctgaccaatgcctccttgggcttctatgtccgtaacaaagactgtcagccatccccttattgcagcgttcgatttgagcaggttgagccttggagttcgcgtcacccaatagattgaatcggcaatgagaaaaagatggattccggttgcaaattcgtgttggaggaatgcaaatgaactctgttggcatcgacatttccaaaggcaggagcacaattgccgtcatgcgtccctttggagaggtcgtcatctcaccctttgaagtccgtcacaccggcagtgaactgagcaagctggcaaagcagctcaaaagcctggacggtgagactcgcgtggtcatggaggccacaggaaattaccatgcgtcggtggcaaagctgctccacaacgcagggttatatgtttccgtcatcaatgcaaagctggtgcacggctacgggaacaacgaattacggcgtgtcaaaaccgataggaaggatgctgtcaaactggctaactatggccttgaccgctggcttactttgccgaggtatatcccagaggaagatacccggctgctgctgaagaactgctaccgccagtaccggcagtattccaaggtgcagacggttctgaagaacaatttgatctcgctgctggatacggtgtttccaaacgccaaccgtctgttttcaagcccgatccgtggggatgggagtgaaaagtgggtggattttgtggctgaattctggcattgccgctgcgccagcgagaaatccgaaagagctttcacaagcaaatacctgcgttggtgcaggaagcacggctacaacttcagggaagcaaaggcgcacacaatttacgccgaagccagcggacatattggcgtcatgccaaaatccgaaacaacgaaactgctcgtgaaacaggctgtatcccaacttagggcgacttctaccgcgcttgcggctctcaagcaggaaatgcaatcattggcttccgtgctgccggaatatcccgttgtcatggatctgttcgacgtaggcccgacgctcggcccgcagctcatagctgaaatcggggatgtgcgccgcttttattccaagaaagcgctcgtagcctacgctgggctggatgctccgccaaatgattccggcgatgtgaccggcaggcacaaatccatgagcaaaattggtgcgtcatcgctgcggcggacactgttccttgtcatgagcgtctatttgcagaacgctcctctggatgagccggtctaccagttcatggacaagaaacgcgccgagggcaagccctaccgcgtctacatgatggcttccgccaacaagtttctgcggatctactacgccactgtaaaagcctatttggagtcattggaacacaccgcctgatcttcgccataaagccattggctggccgccgtttcattttgagatgcaaagcggcttggtttggtgcggcatttttacaagctgcattgccttgaaatttctacttgacttttcttagcaggt

SEQ ID NO: 8059 - DNA, 1124 bp, unidentified
  source 1..1124: mol_type = unassigned DNA; note = element_c972168
  misc_feature 1..2: note = core
  misc_feature 3..170: note = LE
  misc_feature 171..1100: note = CDS
  misc_feature 1101..1124: note = RE
  misc_feature 1..169: note = bridgeRNA
cctgtgtatcgacattgtgctataagagatgtgggcggaaggccgtcggaatcgtggtcattaagaccgtttgctggctttcggacctccgcccacccttgatgatcccaacctgaacagttgatggaggccgctaaccccggacctcgtagcacaggatgaggcttgccatgatacaccctgtttccatcggatgcgatatctcgaaagcatttctcgatattgccgatccgcagaccaagcatccaatccgcctacccaatacgacgtctgacataggagaatggctcgatacgctcgccgggcgcgaggtcgtcatcatcttcgaagcgacaggacgctatgaccagctcctgcgccaggcgctggacaagcgccacattccctattgccgcgtcaatcccgccagagcccgtgattttgccaaggcaaccgggcggatggccaagaccgacaggatcgatgcaaagatgctggcgcggatgggggatacactttcgccacccttgagcaaaccggtcgaccccgcccggcaggagctgaaaatcctgcatacgcgtcgcgatcagttggtcgcaatgcgcaaacaggaacgccttcgcatccatactgccgagcctttcgaactcgatagcatcgagcgccacctaggctggctcgatgcggagatcaccgcaatcgaaaaacaatatcaggctcatctgaacgcccacgaggaactgcaggagcaaggcgccctgctttgctccatccccggcatcggtcatatcacaagctgcacgctgcgggcccacatgccggaactgggtgaaggcaatcccaaacacatggcagcactggccgggcttgctcccttcaatgccgagagcggcaagcatcagggtgagcggcgcatcatgggcgggcgaaaacgcgtgcgcgatgcactctatatcgccgccctggttgtctatcgcctgaagacaccctttgccgacttcatccagaccatgcaggccaagggcaagccattcaaagtcatcatcatcgcaatcgcccacaaattgctgtccatcgcaaacgccatcataagagatagaacggcattcaaaaaagcttgaaaattaaacccgacaatacagttg

SEQ ID NO: 8060 - DNA, 1485 bp, unidentified
  source 1..1485: mol_type = unassigned DNA; note = element_c9763b1
  misc_feature 1..2: note = core
  misc_feature 3..240: note = LE
  misc_feature 241..1464: note = CDS
  misc_feature 1465..1485: note = RE
  misc_feature 7..237: note = bridgeRNA
ctaatgggggtgcaccagctggttcaggtcgagactggtgtccgagccgccgccgggtgagcactgactgtcccaggcccttgaggtctacgcctagatcgtgcccctgtcggttggtgaggaggtcgtagggctggtgggatgacgtgccgctcgttgcgggtcgagcactgaaccattaggtcgcccagatcttctccgacggctcatgtccgtgcaggtccgagcggaggaggacgggtgctgttcctgggtgacgactgggctgaggcccatcacgacatcgagatcgaggacgaccagggccgggtgctggtccggcgccggctaccggaaggggtgtcgggcctggcgaccttgcacgcactcgtcggtgatcacctgcaagagggtgaggagcccgagcaggtgctggtcgggatcgagaccgaccgcggcccgtgggtccaggcattgatcgcggccggctacaccgtctacccgatcaacccgctgcaggcggcgcgttaccgagagcgccacggtgtggcgggggcgaagtctgatcccggtgatgcgcacgtgctcgccgagatcgtccgcctcgaccgggcccaccaccgcccggccgcgggcgactcgaccgtcgctgagggcgtgcggctggcggcgcgggcgcaccagtcgatgatctggatgcgccaacgggcggcgaacacgctgcgttcgctgctgcgtgagtgttacccggccgcactggccgcgttcagcgacgacctcgccgggcgtgatgcgctcgccgtcctcaccgccgcgccaggtccggcgccagggcgcgggctcagcgtctcccgggtcgcgggtctactgcgcaaggccgggcgtcagcgcaacatcgacgcccgagccgccgagatcgtgaccgcgctgcgttccaagcagatcccggtccgtgacgagctggccgtcgtgaacgcggccagcgtgtccgcgctggtcgcagtcctgaccacgatggtcgcccagaccggcgccctcgaggagcaggtgaggctgggttttggccagcacccggacgcggagatctacctgagccagcccggcctcgggacgatcctcggcgcccgggtgctcgctgagatgggcgacgaccccgaccgctacgccgacgcccgggcgaggaagaactacgccgggatggccccgatcacccgcgcatcgggcacgaaacgcgtcgtcttggcccgctacgcccgcaaccggcgcctcgccgacgccctctaccaacaagcgttcagcgccctcaccagctcacccggcgcccgcgcctgctacgaccgacaccgcgcccgcggcgccacccaccaccaagccctccgggccctcgccaaccgcctcgtcggcatcctccacggctgcctcagacaccacactcgctacgacgaagcgaccgcctgggcaaccgagcaccagctcgccgcttgacaccttgccgccgtgggatgt

SEQ ID NO: 8061 - DNA, 1360 bp, unidentified
  source 1..1360: mol_type = unassigned DNA; note = element_c97c2b2
  misc_feature 1..2: note = core
  misc_feature 3..84: note = LE
  misc_feature 85..1098: note = CDS
  misc_feature 1099..1360: note = RE
  misc_feature 1127..1347: note = bridgeRNA
tgatggagtggatggcgcccgcctgcggcatcgcaatgtgccacattgggtgctgtagacgtcaccaatgaagggagccatccaatgaatgagattaccacaatgggggtcgatttggccaaatctgttttccagttgcacggcattgatgctgaaggccgcgttgttttgcgcaaacagctgcggcgcggtcagatgttggaattctttaagcgcctgccgggctgcctgatcggcatggaagcctgtggcggtgcgcattactgggcgcgtgaattggcgacgttcgggcatgaggtgaggcttatgcagccctcttacgtgaaaggatatgtcaagcgtggcaagacagacaaggcggatgcggaggcgatctgcgaagcggtcagccgtccgtctatgcgatttgtccccgtgaaaagcgaggacactcaggccttgctgatgatccacaagaccagggagttcctggtccgccagcagacccaggtcgtgaatgccatccgagcgcatttgggcgaactcggcattgtcgttcccaagggtatccataatgcggagcgcctgatcgcagcctgcggcaaggccgaacttcctgccgcagcgcgcaaagcgctgaaccttctggcagatcagatggtcgatacgcgcaagaagcttgacgagctgaccgcggatgtccgcgcgagcgcatccgccaacgaagaggcggggcgccttcagacgatcccgggcatcggcccgatcaccgcaagcgctctgattgcaacgctacccgacatatcagacttcaaatccgggcgcgatctatcggcctggctgggcctaacgccgaagccacattccagcggcggcaaggaccggctggggcgtatttcgaaaatgggcaaccgatacctgcggcgcctgctgtatctcggtgcaatggcgcgggtcagcgcgcgtcgtcgcggcgaacctgatgatgattggctgtggaacatcatccagcgcaagaagccgaagcaagccgctatcgcgctggccaaccgcatggcccggacggtctatgcgctcatgaagaacgcaacagaataccaggcagcaaggcctgcctgatcagaaccgggggcgtcactcccccaaacgaaaggcaagtgcatcgtgagatgatggcaaatggcggagaaatcgcgaaagacaccctgttcggaccggagcgcttcaaagcgcgtgccattgattgggaccagagcgaccgcggactttcatcaaggcgcgcagtcaaagcactgcaattccgacgccgtatacatggccgcaaccgaaccatcgccaacattgaccgatttactcttgcccagcgggtgccatccataca

SEQ ID NO: 8062 - DNA, 1202 bp, unidentified
  source 1..1202: mol_type = unassigned DNA; note = element_c97d1ef
  misc_feature 1..2: note = core
  misc_feature 3..221: note = LE
  misc_feature 222..1199: note = CDS
  misc_feature 1200..1202: note = RE
  misc_feature 40..200: note = bridgeRNA
tcctttagatttgttttttgaaaattgattagatttatgattgagaaaggaagcaaaagtaaactatccttacgtccgagcttatgactcttatttcgattaagactttcgcttccccttcatcaaagactcgaatagaaatttgggatagagacccattattaaggagttgagcttatgatgaatttctcaaatcattgttgaatcgtaaaaacaaagttatgaaaaacattattattggcatagacattagctgcaagactttagacatctgcatcaaaaatgaaggaacattgaattacctggcgattgaaaataaaattccagccatcaaacgcttttttaaaaaatacaactatgaaaacgtgatggtagctatggaaaatacaggcagatacaattggaatttacttgaagtacttgaaagttttgacttcaaagtatatgtaatatctcctttgcatcttaaaaaaagtatgggtttgacaagaggaaaaaatgacaaaattgattcccttcgtatctgtaattttattgaaaaaaaccatgaatgtacaatgccatggaaaccatgctcggacacaattaaaaaaatcaaaatattgcttactgaaagggcactacgagtaaaaatcaaaaaacagtttacagttgttcaaaatgactataaactgatgaaaggtatcggattggataaaaggctcattgccttgaatttaaaagcaattagacatattgaatcacagattgcggttatagaaaatgatattgaagaaacaatccaaaaagatcaagagcttgccaattatcagaaattgataaaatctgtacctggggttgggaaagtcctttcctggatattattatccaagacagaaggttttacatcgataacagatccaagaaaaatggcctgttatagtggagtagcaccttttgactatcaatcgggaacttctttaaaaagaaggcccgccgtatcaatgtttgcagacaaaggcataaaagctattttacatctggctgccatgagcgctatcagattggataatgatttacgaaaatattacaggagaaaagttgaagaaggaaaaaataaaatgagcgttttaaacgctgtaagaaacaaaataatccatcgggtttttgcggtaataaaaaaccaaatcccttatcaaaaagatttggttttatcatagaaa

SEQ ID NO: 8063 - DNA, 1365 bp, unidentified
  source 1..1365: mol_type = unassigned DNA; note = element_c97eda3
  misc_feature 1: note = core
  misc_feature 2..87: note = LE
  misc_feature 88..1107: note = CDS
  misc_feature 1108..1365: note = RE
  misc_feature 1143..1363: note = bridgeRNA
taatggaatggaccctctctaccccaaacggcttcaaatgagccatattgataagtgaaagaaatcaataaaggaagagaggagcatatgaatagcgtaacagttggattagatactgcaaaatctatttttcatgctgtagagaagagccaacacggtagagtgctcaaaaaaacaaagctgacaaggaaaaagctgattgagtacttttccaacaaagaaccatccacgatcgctattgaagcttgtggagcgtgtcactactggcatcgactctttactaagctagggcatacagtaatgatcataacccctcagtatattgcacaacatcgcattggtaataagaatgattttaatgatgcctcagcgctggcagacgtagcacaaagagaagatgttcggacagttcctgttaagagtattgaacaacaagatgttcaactactccatagggttcgagagcggttggttaaggaaagaacggcactaggtaatcaaattcgtggttttttagctgaatatggcattgtcatcccgaaaggaatagcctcactgcaaagagagttaccttttgtgttggaagaccccaataatgaacttacagaattagggcgagaaattattagagaccttaaaggtacactcagccaattagataaaaaagtgaagcaaattgataagaagtttattcagcaaagtgtagataatgctcagtgtaaacagcttcaaacgatgacaggaataggtcctttaatctcttcgattctgtgggttgcgttaggtgatgggaaaagttttaaaaatgggcgtcattttgccgcatggtgtggtttagtgcccaaacaacattcgaccggtgataagtcacgtcttctgggcataagtaaacgaggcaatgcctacttgagaacaaagttaatacatggagctcgaagtgcgttgcggcatgctaaaaacaaagatgaccgtttaagtctctgggtcgcaaacctggaggcacgagtcgggttcaataaagcatgtgtcgcgttggctaataaaatggctcgtataagttgggcaatggtcagtaagaacgaagaatacaaagtacaagcgcagtaagtagtaataagcaattataaagaaatattacctttcactccaaattgctaaagaaataaaatgatgacggaaggctcatgacaacctagttctaatcagctaataccaagggctccatgaagccgaggcgattgatatgaaagctaggttcggatatccatcatggcgggtagtctgatacccaaatccgaatatatgggagcaattgagtatcagaagttgtcagattatctcttgcaataagagagggtccatata

SEQ ID NO: 8064 - DNA, 1386 bp, unidentified
  source 1..1386: mol_type = unassigned DNA; note = element_c9834b9
  misc_feature 1..2: note = core
  misc_feature 3..80: note = LE
  misc_feature 81..1106: note = CDS
  misc_feature 1107..1386: note = RE
  misc_feature 1152..1375: note = bridgeRNA
tgatgttgtggacggccccacctacacggcatcaagtgccaaacgtggtcgccggagcgccacaaaaagggaggccgtcaatggagaagtttatcagaacagcgattgatctgggcaagaactattttcaggttcacggacttgagagcgaaggcggccgatcgatttcgcgtaagataaaacgttcgaagatgcatgaggtctattcgcagatcgagccctgccgggttggcatggaagcctgcggttcggcgcactattgggctcgccaactggccgcgatggggcacgaggtggttctgataccgccggcttacatcaaaccctacgtcaagcggggcaagaatgacgtggtcgatgcggcggcgatctgcgaggcgatgtcgcggccggatatgcgctacgtaccgatcaagagtgccgaccagcaagccgttctgatgctgcacaagacccgcgaactgctggtcaagcagcgcacgatggctgtcaacgccctgcgcggccaccttgccgagttcggtattgtcgctgccaagggcataggccgcgtcgatgaacttttggcgctggcgaaggcggatgccgaacttccacatattgccggcgcggcggtggcctgtatggctcaacatctggaagggctcgacctgtcgatcgagaccgtggacgaggagatcgccagggcgcacagacaaaatccgaccagccgcttgcttgatgagattcctggcattgggacgctgatcgcgtcggcaaccgccgccagcgttcccgatccgggcgtgttcaagtctggacgcgacttcgcggcatggcttggtctgacgcccaggcaaaattcgagcggcggcaaggagaagctcggcgccatcaccaaacagggcaaccgctatatccgcaaaatgctcgtcacgggcgcgacttcggtgctgcgtgtcgcaggcaagcgcaaaggcgctctcgccgactggatcaacgcgctgcgggccaggaagcctgagcggctggtggccgtggctctggccaacaagctggcaaggatctgctgggcgatcatgaacacaggcgagggattccgcaccgatacctatgtcaaagcgtgagccgtctcgccgtctcaagcagcattccaagaggagtttgccggttcaagtttggtaagcacgaaagacgtgatgaacgatacggtcaccaccgaaagccatggacaccccgacaacgtcacgagccgcaaaagctcgccgcaatgatagggaccaaggcaatcggatttcatcagggccagcggtcataaaaccgcaccaacaggccggacatatgaccgaagcagaccaaatcgttcgatacgtcaaaaagggcttgccaataggggccgtccacata

SEQ ID NO: 8065 - DNA, 1425 bp, unidentified
  source 1..1425: mol_type = unassigned DNA; note = element_c99173f
  misc_feature 1: note = core
  misc_feature 2..80: note = LE
  misc_feature 81..1112: note = CDS
  misc_feature 1113..1425: note = RE
  misc_feature 1202..1419: note = bridgeRNA
taatgagatggtccgccgcttgattcacccgcgagagcgggtgatcgaggtggcagcatttaataaggaggatcatcgacatgcagatacactcggttggcatcgatttagggaagacaacgtttcatctggttgcactcggcgctgccggcaaggtgattgtgcggaagaagttcaaccagaagcagcttctggcctataccgcgaacgtcccggcatctctgattggacttgaggcctgctctggggcgcactttctcgggcgcgcgctacgccagcaaggccatgatgtccggcttatcccagctcagtttgtgaagccgttcgtaaagtccaacaagaacgactttgtggacgcagaggcaatcgccgaagcggtggagcgcaagaacatgcgctttgtcccgatcaagaccgatgaccaactcgatctgcaagccatccaccgcgttcgcgatcgcctgatctcccggcgcactgcggtcatcaaccaggtgcgtgcgttcctgctcgagcgaggcctggttttcgcgaagactccagcgaaactgcgggctgcgttgcccgacattcttgagaacgccgacctcgacctgacaccgcagatgcggagcctgatcgatcttctttcgaaggagtggaagacagtcgaagaccagattgaaggactcagcctcgagttggaacggatctctgccgccgatccgggttgtactcgcatccggcagattccggggattgggcctatcgtggccacggccattgttgccgccatcggtaacggcgctgcctttcggaagggacgcgactttgctgcgtggctcggtgtcgtgccacggcagtattcgactggaggcaaggcaagattgctcggcatcagtaaacgcggcaacgtgtacctgcgcaagatcctcatccacggagcgcgggctgcggtgttgcgcatcaagcgggatcgggcgccgatcggagcctggctcgaagcactcgatgccagagctcccaaaaatgttgttgtggtcgcgatggcaaacaagctcgcgcggatcgcatgggctgtgctgtcgagcggggaggactaccggcccatggggaatatggttgccgcatgagatagtgcggaaaagacgcctgcggcttggaagcgctgacgcgctcccactttcccgcactgctacgacgacggattgaatttacccaccgaggtctgcagagaaacagcaaggacgaaagaacagtcacaacagcgtgtctgggaacctgatggacgaaatggttgataacgaccgaccgactaataaggacagatacgcgcgcaactcatcatggccaggagcgttaagctccaccaaaggccgaatacatttgcgcagacttgtcttctcgaccacgcttttcccttgcagtcgcgcggcggaccataca

SEQ ID NO: 8066 - DNA, 1610 bp, unidentified
  source 1..1610: mol_type = unassigned DNA; note = element_c999ab8
  misc_feature 1..3: note = core
  misc_feature 4..272: note = LE
  misc_feature 273..1490: note = CDS
  misc_feature 1491..1610: note = RE
  misc_feature 11..292: note = bridgeRNA
actacaatatatttatgattaataccccttactgccagtaaggaattatccatcttgttgcttaagctgttagaatgagtaaggcaataggtctggccgtttcctcccaggactttacgtccgtagaacagtctgccaaccagccctcattcgcagcattcgttttacgcaggttgaacccataggcgttcgtgtgatacccagtagattgaacaggcaatgagtaaatctggtattgaccattgctaatacattccaaaggaatacctgttatgaacgctgttggtattgatgtttccaaaggtaagagcactgtcaccatccgcaggccgggcgatgttgttgtcatgcctccccgcgacatcccccacacacagtccgaaattaacgccttgattgagcaaataaaagggcttgatggtgaaacaaaggtctgcatggagcacaccggaaggtattttgaaccggttgccacatggctctctggcgccggtatctttgtcagcgccgtaaaccctgtcctcatcagggacttcggggatgattccctgcgcactcccaaaaccgacaaggccgattccaaaaagattgcgcgctatacccttgaccggtggacaaaattaaggcagtatggaaacatggataaaatacgaaaccagttaaaaaccatgaaccgccagttcggtttctatatgaaccaaaaaactgccatgaagaacaaccttattgccctcattgaccagacctatccgggcgccaatgatttctttgacagccctgcacgcagtgacggcagccagaaatgggtggatttcgtccacacctactggcatgtggactgtgtccgctctaaatcaccggttgcctttacagagcattaccggaactggtgcagacgaaagggctataacttcagcgccgctaaagcggagaatatctaccggctctcctctgacatgatcgccgtattcccaaaggatgacagcacgaaactgctgatacggcaggccgtggcaatgctgaatgccgcatctgcgaccgtggaatccctgcgcctcaaaatggatgagaccgcttcctcgctgcctgaataccctgtcgtcatggcaatgaatggtgttggtcctacccttggcccacagcttatggctgagattggggatgtgacacgtttcacgcaccgcggggcactgactgcctttgctggcgttgatcctggaaagaacgattccgggcaacatatccagaaaagtgtgcctaccacaaagaaaggttccccctatctgcgcaagacccttttccagatcatggacgggctcatcaagcgttcccctgctgatgatgccgtttacgctttcatggataaaaagcgggcgcagggcaagccctactatgtctacatgactgccggtgcaaacaagttcctccgcatttattacgggcgggtaaaggaatatctttccacggttgcagaaaccgaagaaacttaaataaatgttcccactttccataaggccagcgttctgcggtggtctttttgtagtgcttatttttcaacctgtataaaatttccaaagttcacaaatttctgcttgactttttatttgcag

SEQ ID NO: 8067 - DNA, 1486 bp, unidentified
  source 1..1486: mol_type = unassigned DNA; note = element_c9a0c27
  misc_feature 1..2: note = core
  misc_feature 3..245: note = LE
  misc_feature 246..1466: note = CDS
  misc_feature 1467..1486: note = RE
  misc_feature 45..241: note = bridgeRNA
ctaatgagtgctgcgggcctgccgtgaggcaggctcggtccggtagctgccggtgggtgagcactccttcccccaggcccagcatggaggcctgaaaaagatcgtgcccccaccggtagccgggagacgtgatcgctgatgggatgtcgtgcccgccgccctggcgtgagcacttgatcattaggtcgctgacggttctcccggtagctgcccaggtgcgtgcgagctgggtgaggggagatgcggtgctgctcgtcggcgatgactgggccgaggaccatcacgatgttgagctgatggatgcggcgggcaggcggctggcccgagcccgactgcccgagggcgttgcggggatcgcggcgctgcacgagctgatcggccagcatgtgggtgaggaccccgacgccgccgaggtggtcatcgggatcgagaccgaccgaggcccgtgggtggccgcgctgatcgcggctggataccgggtgttcgcgatcaacccgctgcaggtcgcccggttccgggaacgccacaacgtctccggtgccaagagcgacgcggcggacgcgcacaccctggccgacatggtgcgcaccgatgcccaccagttgcggccggttgccggtgacagcgcggaggccgaggcgatcaaggtggtggcgcgggcgcacaagacgctgatctgggaacgcacccgccacagtcagcgactcagacacgcgttgcgggactacttccccgccgccctggaggcgtttacggatctggccgcactcgacacgctgctgttgctgggcaaggccccggacccggtctcggcggcccggctgacgatcccgcagatcagcaaggcactccagcgggcccggcgccgcaacatcgccgagaaggccaccgcgatccaggccgcgctgcgcagtgagcagctcagccaaccggcggtggtcaccaccgcctacgccgcctcggtgcgcgcccaggtcgcgatcctgaccaccctcaacgagcagatcaagactctgcagggggaggtggaggcccattttgggcggcacccggacgctgagatcatcctgtcccaacccggtctagggatgatcctgggcgcccgggtgctcgccgagttcggagacgaccccgaccgctacacctcggccaaggcccgcaagaactacgccggcaccagtccgatcacccgcgcctccggcaagaagaagaccgtgctggcccgctacgtccacaacgaccggctcatcgacgccctgtcccaccaggcgttcgccgcgctcagcgtctccccaggtgcacgcgcctactacgaccggctccgcgcccgcggcgccggccaccccggcgccctgcgccaactggccaaccgactcgtagggatcctgcacggctgcctcaccacccgaaccctctacgacgaaacaaccgcccggtcacaccacaccgacaccgccgccgcttgacctccaaaccgatgggatgt

SEQ ID NO: 8068 - DNA, 1557 bp, unidentified
  source 1..1557: mol_type = unassigned DNA; note = element_c9a2081
  misc_feature 1..3: note = core
  misc_feature 4..260: note = LE
  misc_feature 261..1466: note = CDS
  misc_feature 1467..1557: note = RE
  misc_feature 25..232: note = bridgeRNA
tttggtactataaaagtgtaatgattaattacgaaaatgtaattgattattacacttctttttattatgatgaaagtgattggataacgtgtgtcttttagagataaagttctcgtcataaaaagtgttatccaaccttcacatagtatattcgattaagcaagttgaggatgaaataatactcgtgtcaagagccaaaatgagtatatgtagaagagttggaaccagtcataatataaagaataggaaggaaaagaaaaatgaaatacggagttggtattgatatctcaaaaggtaaaagtactgtagttatactttcaacagctggtgaagttattgaagaaccttttgaaataactcatgatcttgaaggtttaaaaactttagaggacaaattaaaaggaatttctaaagaagatttaaaaatagtgatggaagaaacaggaacatatcatttgccagtatttagctatttaattgataaaggatattttgttgtttcagaaaatgcattaaaaattaagaaatatttagatcgtggattaagaaaagcaaaaacagataaaaaagatgcttataaattggcagagtattgctgcgataattggtacaaattaaataagcaatacgaaaatgaagaaatatatgataatttaaggtttttatctagacaatatataacaagtatagaaatacaagttcaagaaaaagttaatttttctaatttatgtgatttattgttccctggatattatcaattattagatgataatacatttattttaggtctagaagtatttaagaaatattatcatccggaaattgttacaaataaaaaacaatctcagtttgttaatgagattgatatattagccaaaaaattaggacataaaggagctggaataacattagctaacaaaatttataatctagctcttaacactataagtgttcgtcctaataataaatattcacaactttcagcaataaattgtgcagatgctttaatattacaaatcaaaacatctaaagaaattatatcaaatatggacgaacttgcaagagaactgcctgaatataataaaataagtgaaatactaggatgtggtaataaattaacatctagaattattgctgaaattggagatattagaagattcaaaaatgctggtagtttaattgcatatgcaggacttgatgcaccaccttatcaatcaggacaatttgaagcaacaaacaaacacatatcaaagcgtggtaatagatatttaagaaaaaccggttatgaaataatgaaatcaataaaagcaagttgtactgaaaatagtgaaataaaaacatatatattaaaaaaggaaactgaagggaaagcaaagaaagtagcaaaaatagcaggattaaataaatttttaaggcaatattacggaatagtaaaaaagaaatacaaagaattagaaatttggtaaaatttaaaaaatgaccatttaggtcaatttttgtcgtggaataaattaatatttaaaaaaattaatttaggtattgatttttattagcaag

SEQ ID NO: 8069 - DNA, 1297 bp, unidentified
  source 1..1297: mol_type = unassigned DNA; note = element_c9a8356
  misc_feature 1: note = core
  misc_feature 2..230: note = LE
  misc_feature 231..1286: note = CDS
  misc_feature 1287..1297: note = RE
  misc_feature 10..192: note = bridgeRNA
ctcagtgtcattttgggtggtgccgctgttgacgcggtggttggatccggatcactggtcggctgactcgtaggggtgctgcctgcatggcgttcataggttttgtcgccggtcagtgtgaaggaccggccggcgtgacttgataggagcgtggcaccgcccccactgagatgtgtccgccgaccggcccgaccgtccctcactgatcagggtgaaaggaggcaaccaccatggttgtcgtcggagccgatgttcacaagcgcagccacacgttcgttgcggtcgaccagaccggccgcaaactgggtcagctgaccgtcgaggccatcaccgcagggcatctgaaggccctgggctgggcccgccgggagttcggtgacgagctggaatgggccatcgaggactgtcgccacctgtcgtcgcggctggagcgtgacctgttgggcgccgggcagacggtggtccgggtcccgcccaagatgacgggccaggcccgcgcgatcgcccgcacccgtggcaagtccgacccgatcgacgcgttggccgtcgcccgggccgcgttggccgagccgaacctgcccagggcttgccacgatgaccaggcccgggagctgaagctgctggtcgaccggcgcgacacgctgatcacccagcgcaccgccacgatcaacagcctgcgctggcgggtccatgaactcgaccccgagtacccgatcaagccgtccggcctggaccgggccaagcaccagcaggcgctcgccgcttggctggccgcgcagacgggcatcgtggccgaactggccaccgacgagctggaggacgtgatcgccctgaccgggcggatcaacgtgctggagaagaggattgctgctctggtcgcccaacgggcccctgaactggtggcgctgcccggttgcggggcgctgaccgcggccaagctggtcggcgagatcggggcccttgaccggttcgacaacgaggcccagctggcccgccatgccgggatcgcgccgatcccggtctggtcgggccggaccgagggccgggtccggatgacgcgctcgggcaaccgacagatcaactgcgccatccaccgcatcgcggtcacccagacccggctcaaggacagtctgggtcgggcctactacgacaagaagaagtccgaaggcatgtccaaccgcgaggccctgcgctgcctcaaacgccacctcatccgcctggtcttcaccaccctcaagaacgcccgacgatcagccccccagccctgtctgccggccgccgcttgacataggagaaa

SEQ ID NO: 8070 - DNA, 1395 bp, unidentified
  source 1..1395: mol_type = unassigned DNA; note = element_c9aa87d
  misc_feature 1..2: note = core
  misc_feature 3..79: note = LE
  misc_feature 80..1120: note = CDS
  misc_feature 1121..1395: note = RE
  misc_feature 1118..1383: note = bridgeRNA
tgttggggtggacggctcccaacggcatcgcaatgtgccacgatgaggtcgttgccagcctcatatgaaggagccgcccatggagaagattatcagagttgggatggacacgtcaaagagtgtcttccaggtgcacggtgtcgatgccgcggaaaggccggtgttgcgccggaagctggcgcgcaaggaaatgatccggtttttcgagaagttgcccgcaacattggtagctatcgaggcttgtgctggctcgcatcactgggcgcggcttctgacttcgctgggacatgaggtcaggttgatcgcgccacaactggtgaagccatacgtcaagcgcggcaaaaacgatgccgcagatgccgaggcgctatgcgaggcggcaagccgtccgaccatgcgctttgtgccggtgaagactgccgaggagcaggcggctctgatgctgatggggatgcggacccggttgatccgcaaacgaacccaacttgccaacgccattcggggatacgcctcggaattcggcattaccgcggcgaccggcatgtgtcggatcgagccgttgctcgacagcattgccgaaaatgacgctgtccccagcttggcacgcgagctcttcgcgctgcatgccggggagtacatgcagctgaaagccgagattgaacgggtagagaagaagctgatggaatggcatcgtgaaaacgagtgcagccaacgccttgcgcatatccccggcatcggcccaatcggcgcatctttgctcatgatgaaaaccccggatccccgcctattcaaatccgggagagactttgccgcctggatcgggctgacgccgagagatcattcgaccgcaggcaaggtaagatcaggaggtataacccgcgctggcgatgagctgctaagaagtacgctcgtcgtcggtgcgactgccgtgatccggcaagtacgccagaaaaacgggcgccacgccacgccttggctgcttggcttgatcgagcggaagaagccaaagataatagcggtagccctcgccaataaaatggcgagaattgcatggaagcttatggtcagcggggagaactactcgcgtagatcaaccgcgccagagctattaccagtatagaaattcgattgtacagcgtcggtagctatcgacgatcctgtactaattgaaaggaaatcttgcaagaacagcagttggtgtgatcgatcgatctaaggctcgggacactctggtcactacattggccgtcaaaggccgttttcgtgttaagaacccgtgctgcggataccagcttggccagcgaccatatgtggccgcacccaaaggccgtacatatgaacgcaagcgatcaaaataccgccgctcatatcttgcaagagggagccgtccacata

SEQ ID NO: 8071 - DNA, 1592 bp, unidentified
  source 1..1592: mol_type = unassigned DNA; note = element_c9b05cd
  misc_feature 1..5: note = core
  misc_feature 6..358: note = LE
  misc_feature 359..1567: note = CDS
  misc_feature 1568..1592: note = RE
ctcactgggctaccctgccacggagatgttcgaagaacgtcctgttcgaggggatatcgagatattgcccggtggccgatcgtcgatcctgcaggcaatgcgcgatcgtatttcttgggcggcgcccgcgtgaccgcgcatcctggggcggagtggacctggacgggttcggggagagccaaggtcgcttgccgcgcgacggccaccgtgagacctgctcccccgactcaaacaatgagaggcccagaccggccacagggtgtcgcgccaagggcaactgaagcccggagcgcctatcagtgagcgaccggcaggacctctctccgcgcagtgtctcgcgggccccgggaggagcgcaatgaatttcttcgtcggcctcgactgggcgagtcaggcacacgccgtgtgcgtcctcgatgtcgcgggccaggtgtgctggcagggcagcgtggagcactcggccgaaggcttggcggagctgcgccgacgtctggcgcgcttcggcccgcccgcctccctccccatcgccatcgaacgcccctcgggcctcgtcgtcgataccctgatggacgccggccatccggtcgttcccatccaccccaacgccctgaaggcgagccgtccccgctactccgccgcgggcagtaagagtgatccgggcgatgccttcatccttggcgatctgctccgtaccgacggccatcgcttccgcccgctccagcccctgtccgacgcgacgcgcgcgctccgcgccctcgtgcgcagccgcgacgatctggtcgctgcgcgcgtcgccctcgccaatcagctccgggcgctgctcgactgcttctggcccggggccgcggcgatcttcgccgacgtcgattcgcccatcgccctcgccttcctgagccgctatcccaccccccacagcgccgagcggcttggcgagaaacgcctcacgcgcttcctggtgcagcacgcctactgcggccgccggccggtccccgagctcctcacgcggttgcgcgcggcgcccattgcgcagacgggtgagctcgaggcggaagccagtggggaggtcgtccgcgcgctcattgcggtgctgcttccgctcgtgagccagatccagcagctctcggcggccatcgccgccgccctgccgcagcaccccgacggccccctcctgcaatcgctgccgcgcagcggcagcgtaaacgccgcccagatcctggccgagctcggggatgaccgcacccgcttttccaccgacgagcagctggcggccgagggaggcgtcgcgcccgtcacccatgaatccggcaagcaccgcgccgtcagctttcgctgggcgtgcaacaaacgcctccgtcaggcgctcaccaccttcgccgacaactcgcgccacgcctcgccctgggcggcggcgatctacgccgccgcacgtcggcggggctgccatcatccccacgcgatccgcgtgctggcccgagcgtgggttcgcgtcctgtggcgctgctggcaagaccaccgtccctacgacgtcatgcttcactgtgccgcccagcgcgcggccgccgcatgacaactcgagggttgacacaggatgt

SEQ ID NO: 8072 - DNA, 1390 bp, unidentified
  source 1..1390: mol_type = unassigned DNA; note = element_c9c2aa7
  misc_feature 1..2: note = core
  misc_feature 3..86: note = LE
  misc_feature 87..1115: note = CDS
  misc_feature 1116..1390: note = RE
  misc_feature 1089..1377: note = bridgeRNA
tgatggagtggatgcccctcccgcctttgctgcggtgtggcacaatggcagcagcaggatcagctgcagcggagaggaggaaagaaatgaacaacgtcaccatcatcggcatcgatttagcaaagcgcgtcttccacgctcacggagcatacatcgatggtagcgtcgcattccggaagcgactgtcccgcgctcaagtgctcccgtttctggctacgcaggcgagttgcgtggtcgccatggaggcgtgcgccagcacccatgaatggggccgcgcaatccaacagcttggccacgacgtgcggctcataccgcccagttatgtcaagccatatgtgaagcggcagaagaacgatacagcggacgcagaggctattgccgaagctgggtctcgaccgacgatgcgtttcgtcgctgtgaaaaccgaagaacagcaggcgcggtcaatggtcttccggacgcgcgacctacttgtgcgccagaggacgcaactgatcaatgccttgcgtggccacctcgcagaacacggtgtcgttgcgccacaagggccggctcagttgaagacgttgtccagcgtactagaaaatgccgacgtcgccgtgccgcaacttgttcgtgacatcggtcgtgtttacctggagcagatcgaacagctaagcgcccgggtcgcctccctggaaaagacacttcgccacgaagcccaatgcggcgaagaaacgcgccgcttgcagatgatgcctggaatcggtccgatcacgaccatggctgtggaggcgttcgcgccgccgatgaaaaccttcaagcgcggccgcgactttgcagcttggcttggacttgtgccggctcaacactcgaccggcggcaaacagcggctcggtcgaacctcgaagatgggtcaacgcgacatccgacggctcctcatcatcgaagccatggcggtgatacggtgggtattccgccgtggcgcacggccaggctcgtggctcagccacataatggaccgtaagccgctgatgtcggtcgccgtggcattggccaacaagatggcgcgctctatctgggcgatgctgacaaaaaaggaagactatcaagatcccgatctcgcagcggcctaaacaagcgctcggatgctgtgagatttggaggggtgggcatgtgaggaaggaggtcgtgaacgtcaagggcaaaggatcggtctgatcaggatcaggaaaagcaccgaggctccaagagcgaaaagctcgtcgagttgatctgcgcctgctccgcgtatctccatgacggccggcggcaaccatagagccgcataaacaggcctgacatatgaccgcacccgatcacatgcaccatggcggaaaaagacacttgcataaaccggggcatccacaca

SEQ ID NO: 8073 - DNA, 1644 bp, unidentified
  source 1..1644: mol_type = unassigned DNA; note = element_c9c95f3
  misc_feature 1..2: note = core
  misc_feature 3..301: note = LE
  misc_feature 302..1483: note = CDS
  misc_feature 1484..1644: note = RE
ctggtatattgtaaatgactcatttaacagtcattttatacatataccaattcctttctatcaatcttttttcaactgtgattgataacagttttggttgtttgtatattgaatatgtgaatgtggatttgtattttctccttgtagctttgactactttagttaggttcttaccacagcttattcctaaataatgattagttagatgagtctttgaattcgtatttttcaccaggttttatggtttaagtttcgtggtgttaaacacttcacatcgcatttatagaaaggatgtatttttatgtttttagttggtattgatattggtaaattcaaacactctttttgtctagtcgataaggaaacaggtgaaatcgtcatagaacctatgttctttgagaacaacaaaggtgggttcgatatattgttatcttctatcaaaaagatatccaaaaataatcttcttattggtatggaagatactggtcattatcatcttaatcttttgaaatttcttttagacaagcagtatcaagtcgcactgattaatcctatagctaccaatctaactcgtaagatgcaaggttgtatcacgaaaaatgataaattagatacacttaccatctgcgatgttctatcttctaaccaacgcatgaaatcttttcgtatcactaagttaaatcgttttgatttatacgaacaaaaacaattgacaagagaacatcataatctaaaagaatcattaaaccaatactctaatcgtctacagaaatgcatagatatcgttttccctgaattcaacagcttattcaaatcaaaatacggtgtcgtatatatgaatgtattaagagaatttggaagtgcagatgcaatcgcacatacagatatccgtacacttcgtaaatgctttgatattggaagaggcatgcgtatctctcttactcccgaaaagctgaaagaagcagccaaaaattcgattggttttccttctttatctgaagtgctccaaatcaagcatctggttgctcagattgaactattaaatgagcaaatcgctgaaatagataaaaaaatagaagagttttccgtcaaaaacaactctcctatcctcagtattccagggatttcacatttctctggtacttctatcttagctgaattaggagatattggcaactattcaaagccttcacaaataattaaatatgcaggtgtagctccattagcctatgaatcttcacagtttactgcgcaacatacagcgattaccaagaaaggttctaaatacctccgtaagaccctgtatcaaatcattacacctgttattcaacataatcctgtttttaaaaaattctatcaattaaagatatcgcaaggaaaaggtcatcgctgtgcgcaaggacattgtgttagaaaacttatgcgagttatctatcatctcttaagcacaaacactcagttcaatccagaacttcttaaataaagaataaaatgatatatctaattataagcttcatcagaagttgttttcatcatgcctaaatattcacattttcaaagaacaaatgcatttaaagctaatttttaaatcagcagatattttcaaactatttcataatttactgttgatttttatatagttag

SEQ ID NO: 8074 - DNA, 1313 bp, unidentified
  source 1..1313: mol_type = unassigned DNA; note = element_c9d2bc8
  misc_feature 1..3: note = core
  misc_feature 4..215: note = LE
  misc_feature 216..1172: note = CDS
  misc_feature 1173..1313: note = RE
  misc_feature 37..185: note = bridgeRNA
gcttgtgtcttgataggggattagaatctggagtgagagcggtgaatggcaagctgaatgccgcgtgtgccttgagcacgagtgggagcacaagctgccattcaccgttccactttggcgagagcccgaacagttggatgcggccttgatctcgaatcacaagcgtgggccaagccaaagtcctctcactctgttgagtctaggagattttggtgatggtttcctttgtgggtatcgatgtttctagtcgcacgctggacatagcggtccgtccccagagcctcacgatcaatgtcaccaacgatcgggcaggtttcgaggtattggagaagagccttcgaggtctcaaggtcaagcgtgtcctgctggaggcgacaggcggatacgagcgtgaggtgctgagctttctgcagagcgctggctacaaggtcattcgcgtcaaccccaggcgagccaggtcgtttgccgagtccatgaatatcaaagctaagaccgacgccatcgatgcagcggtattggcgcatttcgccgaagtgatccccgataaacctactctgcaggtcagtccgcagagggcgttgctgcgcgagctgctgccgcagcgtgatcgtctgattcagcaacgggacgacgatcggcggcgcctgaaacaggctcagtctgaggtggtcgctcgcttcctgaagtccaacctccagcacttcaggtctcagatcagacagattgaacatgagatcaagctgcacgccgaagggctgggtgatgaacgaattgctcagttggtccaggtcaaaggtatcgggctggtgacggctgggaagcttgtaacgctgctgccggagttgggccatgtggaggcccgagaaatagcctcgctggttggggtggcacctttcaatcacgacagtggaacatccgtaggcaagcgctcgatctcgggaggccgtttcgggataaggtgcgcgttgtacatgtcgtgtttggtggccgtaaggcaaaacccctcgctcaaggcgaagtaccaagcactgcgtgaaaggggcaaggcagccaaggtcgcgcttgtggcctgcatgagagttttcatcgtacgactcaatgcgatgctaagaacgggtaccccctggcaggatgtggaattgcctcagtgcaagagcgcaccaccggcgtaaatccgaacgccgtacgtgtgggagcgggtttacccgcgaaaaagacaccgcgctgcctggcacgggctacgcccgtgttcgcgggacaagcccgctcccacaggggattgggctggtctttagattttggacaagacagtt

SEQ ID NO: 8075 - DNA, 1483 bp, unidentified
  source 1..1483: mol_type = unassigned DNA; note = element_c9d48d1
  misc_feature 1: note = core
  misc_feature 2..109: note = LE
  misc_feature 110..1126: note = CDS
  misc_feature 1127..1483: note = RE
  misc_feature 1176..1406: note = bridgeRNA
gaatgaaagggacttccccgtcccgagctagccgcgaagcggcgaccggcaacaaagtgccacgatgggaagtacgaagtctcatcaactcactcggaaggggaagtccatggctattctgaccgttggcattgatctggccaagaacgtcttcgcggtgcacggagtgaacggtgcaggcaagtcagagctggtgcgctctgcggtgcctcgcgacaagctgtatggactggtcgcgacgctgccgccgtgcgtgatcggcatggaggcgtgctcgggcgcgcaccactgggcgcgactgttccaggcggctggccacacggtgcgcctggtggcgccgaagttcgtcacgccgtaccgcatgagcggcaagcgcagcaagaacgatgcggccgatgcggcggcgatctgcgaggcggtgcagaggccgcacatgcgcttcgtgcccatcaagagcatcgagcagcagtcgcgactgatggtgcaccgggcgcgtcaggggttcgtgcagcagcgcacggccacgctgaaccgaatccgggggctgctcagcgagtttggcatcgtgctgccgctgaaggcgtctagtgtgcgccggcgcgcttgcgaatgcctggaggatctgccgggttacgccaacaccgtgatcggggatctgctcagcgaagtcacacgtctggacgagcgcatcacccagtacgaccgacacatcacggcgatggccaaggatgacgcaagggccaagcgcctgatgcagctcagcggcgttggcgcgaccaccgccacctgcatgctagcgatgatcggcaacggccacgagttcgacagtggccggcagttcgcagcttggctggggcttgcgccgagtcaatacagctctggaggcaagagccggctggggcgaatcaccaaggccggcgatgcctacttgcgcacgctgctgatcctgggcgcgcgatcgatgctggtggcggcaaagaacaagatcgacgcggtcagtcgctgggccgtggcactggctgagcgaagaggctactggagggcagtggtggccattgcggcgaagaacgcgcgcatggcctgggcggtgctgcgcaagggtgaagccttcgcgctgccagcctgatccacaggcatcgaaccccacaacacgcaacagcagcaaaggaattcgattcgaccgccgcgtgacggcaggcgttgatgacaacaggtttggacctgcgcgggcagtgaccgaatacgtcaagggcggcgaacagcttgccggctaacgaaagggtctcccgcgtgcggttctcatcagggtccgcggcgaacgacatgccgcacgaatgaccgtttgtagtttggccagttcgcaccttgttgtcctcttcaccgtctgacctgagccggccggttgactttgaacgacgcaatgcaggcctgctgccgcaggccaaaggtcacctgtcgcttgacgaacggggaagcccttgta

SEQ ID NO: 8076 - DNA, 1437 bp, unidentified
  source 1..1437: mol_type = unassigned DNA; note = element_c9ec8c8
  misc_feature 1..5: note = core
  misc_feature 6..225: note = LE
  misc_feature 226..1419: note = CDS
  misc_feature 1420..1437: note = RE
  misc_feature 1..229: note = bridgeRNA
cccccgttaccttcctcgtggtccccgggtggggactcctggctgctgggtccggcatgacttgcttcccctgtcgtcgatgatccggggggtgttgtcaccggtcctggtggtgtcggtggatcgctgatagggacatggcctgcgaacctgctggtctcttcgtaacgtggctgccggacgctgacgccgtgctggccaggatcgcgaggggaggtcccgttgatgtcctacgacgtggtgatcggcctggatgtcggcaagcatcgccatcacgcctgcgccctggacccggatggcaagcgcctgctggaccaggaggtcgagaacaccgagacggccctgcgggaggtgttcgcgcaggctgccgcggaaggtcgtgcgctggtcgtggtggaccagctccattcgatcggggccctgccggtgaccgtggcccaggcgatggggctcgacaccgcctacctgccgggcctgtcgatgcgacgattggcggacctgcatccggggaacgccaagaccgacgcccgggacgcgttcgtcatcgcgaatgccgccctgaccgttcctcacacgctcaggaggctggacgtaccgagcgaggcgcaggcggacctggcgatgctgctgggctacgacgacgacctcgccgcccaggtcaccgcggcggtgaaccggctgcgtgggctgttggtccagatccatcccagcctggagaaggcgctgggagacaacgtctcccacgacgccgtcctgcatctgctcatcaaggccggcggacccgatgggctgcggaagatgggtcgggcacggatcgacaaggaactggccaagcacgcaccccgcatccacgaccgcctcgccggcgagatctgggccggcctcggagcgcagaccgtcgtcgtgccgggaaccaccgcagcggccaaggtcctgcccggactcgcggcccagatcctgcagctgcgcgaccagcgcaaagagatcggcaaggacgtggagaaggtcctcgatgcgcaccctcttgcccgggtcttgacgtccatgccaggagtcggcgtcaagatcgcagcacgactcctggccgagatcggcggcgacgtctccgcattccccactgcggcgcacctggccgcctatgccggcctggcaccggtgaccaagcggtccggaaccagcatccgcggcgagcacgtcaaccgcggcggcaacaagcggttgaagaacgccctgttcatggccgcgttcacgtcgcttcgagccgaccccgccagcagggcctactacgaccgcaagagagccgagggcaagaagcacaacgctgccctcatctgcctcgcccggcgcaagaccgacgtcctgttcgccatgatcagagaccacaagccctacacccccgcccagcccgctgccgcttgacgaacgacatagggacac

SEQ ID NO: 8077 - DNA, 1255 bp, unidentified
  source 1..1255: mol_type = unassigned DNA; note = element_c9ed431
  misc_feature 1..2: note = core
  misc_feature 3..101: note = LE
  misc_feature 102..1232: note = CDS
  misc_feature 1233..1255: note = RE
taccttagatttgcagctgaggattacagataaaatagaaaggataaatttgtgaatcgaagaaagaatgtaggaagtgaacctgtaaaagactacggtttatgagaaccattgccatagacggacttcctgcttgtttgaacccagacccagatagtaggttaacatccattgttaaggtagttaggttaagttcaatccctttctttcctaaaagattaaaagacaaaagtatggaaagtttttattttattggtgtggatgtgtctaaaaagaagttggacttctgcgtgatgttcgaaggggaggtggtgcatgaggaaaaaacagccaatcatccaagtgcaatcatggcgttgatacatcatttggaagaaaattatggaatagagggcagtcggatgcttgtctgtgcggaacataccgggcaatacacatttcctttggcttgcgcttgcaaggcgttggaatgtaagttatggctcgagaacccggctgaaatcaaatactcctccggcgtacagagaggaaagaatgacaaggtggatgccaaacgtatcgccatctatgcctgtcggtttcaagacaaggttcaatattatgaacgccctacggaggatattgaaagattaaagcagctcgaatcggaacgtacactgtatgtcaatgatttggcaaaatataaagggcaattgaacgaccaaaaggattatatgccaaaagatttgtacgagcgtaagataaaacgcttgaaggctttgatggaggacttggaggaagccatacaatctattactgatgaaatggatgaagtgatagcttcttgttcggtattgtccaggcagagggaactgctgatgtccatagacggtgttggacgtgtggtggcaaccaacatgataattgcaacggaagcctttacacgttttgatgatccgaggaagttcaactgttatgccggagtagcacctttctcttattcttccggaagttccctacactcgaaagcaagggtatcacaccgggcagacaaagtgatgaaaagactccttcacttggctgccgtggcaataacacatcggattggtggagaactgaagaaatattatgaaaggaaagttgccgaaggcaagaacaagatgtctgtaatcaatgcgttgcgagctaaaattgtggcaaggatgtttgcagtcatcaaaagaaatgagaaatataaacctattttatcataaataatttgcaaaaatcatagtag

SEQ ID NO: 8078 - DNA, 1372 bp, unidentified
  source 1..1372: mol_type = unassigned DNA; note = element_ca0d84e
  misc_feature 1..2: note = core
  misc_feature 3..84: note = LE
  misc_feature 85..1110: note = CDS
  misc_feature 1111..1372: note = RE
  misc_feature 1087..1359: note = bridgeRNA
tgatggggtggatgccccacccggcggcatcgcaatgtgccagaatgatagcagcttaaactgtcatacaaaggaagagcatccatggagaatgttagcatagtaggaattgatttagcaaaacggagcttccagctgcacggggctgccgctgatggttctgtcgtgttccgcaagaaattgtcgcgccctcagcttaccgcgttcctgagtgagcttccaaagtgcgttgttgcgatggaggcttgcgctacatcccattattgggggcgtgagattggcaagcttggccacgaggcgcgccttattccacctgtttacgttaagccgtttgtgaagcgtcaaaagaacgacgcaaatgacgcagaagcgatcgctgaggcggcatcgcgcccgacgatgcgctacgtctcggtcaaaagcgcagaacaacagtcgcagggcatggtctttcgaacacgcgatttatttgtccgccaacgctcccagttggtaaacgctttgcggggtcatttagcagaatacggtgtcgtcgtcgctcaagggatggttcagtttagacgaataatagccagctttgatgaagtcgcggttgacctgcccgcgcaaattctaagcctttgccaagcatacattgatcagatcgctctttttgacgaaaggattgtggtgctggatcacgagatcaaaggccgagcaaaaacagatgaagcaacatcacggcttatgacgatccccggagttgggcctatgtgtgctacgaccattcaggccttcgcgccaccaatggaagaattttctaatgggcgtgagtttgcagcttggtgcgggcttgtaccaaggcagaagtcgaccggtgggcgacaaatcctgggtagaacctcaaaaatggggcagcgcgatataaggcgattgctgatcacaggcgcaatggccgtcatccgttgggccatccggaaaggtccaccacctggatcatggcttgccaagatgctggcgcgcaagcctcgtatgctggtggcgactgccctggcaaacaagcttgcccgtaccgtttgggcgttaacaaccacaaaagagaactatcgaattccaccgctggctacataagctttgcaccatgcgttggagtaaaccggcaatgtgagaagggcgaaggagagtaaggaacaacggtcataagacggggttgggaaaaccagatagaagccaggagccttgtgctcgcatcaacgatttggacccgatccacggacaccatacaggccagcggcgtgtgaaagccgcattcaaaggccggacacacgactgcactgatcacttgttccaagcaatctgaaaaacttcttgcattgaaaggggcatccacaca

SEQ ID NO: 8079 - DNA, 1265 bp, unidentified
  source 1..1265: mol_type = unassigned DNA; note = element_ca133d5
  misc_feature 1: note = core
  misc_feature 2..292: note = LE
  misc_feature 293..1120: note = CDS
  misc_feature 1121..1265: note = RE
taatgagatggtccgccgcttgattcgcctgcttggcaggccgattgtggtggcagcttctaataaggaggatcatcgatatatgcatatagtttcggttggcatcgatcttggcaagacgacgtttcacctggtagcgcttggtgtagccggcaaggtgcttgtgcggaagaaattcacgcaacgacagctgctgacgtacaccgccaacatgcagacgtcgctgatcgggctggaggcatgttctggagcgcattttcttggacgctcgttgcggaagtaaggtcacgatgtgcgtttgatcgcagctcagtttgtgaagccgttcgtaaagtcctacaagaacgacttcgtggatgcagaggcgatcgccgaagccgtggaacgcaagaacatgcgcttcgttccgatcaagaccgatgaccagctcgatctgcagaccatccatcgagttcgcgatcgtctgatctctcgacgcactgcggtcatcaaccaactgcgtgcgtttctgctcgagcgaggcctggttttcgcaaagactccagcgaagctgcggaccgcgttgcccgacattcttgagaacgccaacctcgacctgacaacgcagatgcggaacctgatcgatcttcgttggaacgagtggaagacagtcgaagcccagattgaaggactcagccttcagctggaacggatctccgccgccgatccggggtgtactcgcatccggcagattccaagggtcgggcctatcgtggccacggccatcgttgccgccatcggcaacggcgcagccttccggaagggacgcgactttgccgcgtggctcggtgtcgtgccgcggcagtactcgactggaggcaaggcgaggttgctcggcatcagcaaacgcggcaacgtctacctgcgcaagatcctcatccatggggcacgggctgcggtactgcggatcaagcgggatcgggcgccgatcggagcctggctggatgcgctcgatgcccgcgccactttaccgcactacggcggcggcttgaaattacccaccgaggtctgcatgagaacggcaaggacgaaagaacagtcacaacggcgtgcctggaaacctgctggacgaattggttgataacgcccgaccggtttataaggacagatacgcgcgcaactcatcctggccaggagcgctgtgctctaccaaaggccgaatacatttgcgcagacttgtcttctcgcttctagcttttccttgcagtcggacggcggaccataca

SEQ ID NO: 8080 - DNA, 1390 bp, unidentified
  source 1..1390: mol_type = unassigned DNA; note = element_ca1ae18
  misc_feature 1..2: note = core
  misc_feature 3..89: note = LE
  misc_feature 90..1142: note = CDS
  misc_feature 1143..1390: note = RE
  misc_feature 1089..1377: note = bridgeRNA
agatggggtggttgccgccctccccagacggcatcgcaatgtgccaggatgtggtcctgaaagagccacaaaacggagaggacggcgatatgaacgatacaatgattggggtggacttggcaaagtctgttttccaactccacggtgcgtcaatgacgggccagctgaaataccgcaagaaactgacgcggccgcagtttagaaagtttatggcagaccagccgccttcggtggtggtgatggaggcctgcggcagcgctcactactggacgcgtgagatggttaggtttggccatgacgtgaagctgatcgcaccgcaatacgtgctaccttttgtgaaacgtcagaagaatgacgccgccgatgccgaggcgattgtgattgccgcgcagcgccccgagatgcgctttgtcgagccgaagtcgcaagagcagcaggcaagagcagtactgtttcgggcccgggagcgtttggttcaccagcgcaccgagttggtgaatgctctgcgtgcggtactctatgagttcggccacgccgtcccaaagggaatcggaaatatcaagcagttcgatgtaattctggaggacccgaactgcgatctacccgcgttggttcgcgatgaatgcggggatcttgtcaaacagatcgcagagcaaacgatccggatcgacgccaaaactaagacagcaaaagaaatggctacgacggctaatactgcccggcggttacaaacgatgccgggggtcggtccgctgaccgcactggcaatagaggcattcgcgcccgcgatgcaaagcttcaaacgggggcgagacttcgccgcctggcttggacttgtcccccggcagcattcctccggcggcaaggagcgattagggcgcgtctccaaggccggtcaaaccgatatccggcgactgctgatcatcggggcgatgtcgcgactgaactggatggggcgcaagacgatcactgagggatcctggctggcgcggatgttggcaaggaagccacgcatgctggtggcaatcgcgttggccaacaagatggcgcgcggtatctgggccatgctgacgaagaatgaggactatagggatccggtgccggccgtggcagcacgatcaacatgtgccgcaacgacctgacccggtgaagggagtgtgagaaggcgacgacccgaatgggcgcaatgatcgaacagatctggatcgggaaaaccagctacggacttcgagccaacaaagctcgtttgtaagatttggacctgatccgcagatcaccataccggcccgcggctcgtgaaagcgccgcacatcaaggcctgacagaagaccgcactcgatcacttgttcaaagggaaaaaacttcttgcatcacgggcggcaaccacaga

SEQ ID NO: 8081 - DNA, 1379 bp, unidentified
  source 1..1379: mol_type = unassigned DNA; note = element_ca22ea9
  misc_feature 1: note = core
  misc_feature 2..284: note = LE
  misc_feature 285..1364: note = CDS
  misc_feature 1365..1379: note = RE
  misc_feature 1..294: note = bridgeRNA
cagtcagaagatggttgccagctcccggacggtttgtctcaaacactgatcgaccacggtagactggcgctgcgaggtgcccggtgcggtctgacccgcactctgatcgaccgttgtgtctttccctggacctgtctaccgcccgggagcacctcgcggagaggctttgcctcggccattgcctgtgacccgagaagggcctgacctgactggtctcgtgactgtcctgtccatgcagcgggccgcggctgagccattgacagcgatcagccgggggcacggtcatggatggaaacgaaaaaacgacgcgcgtggtcgttggtggcgtcgatacccacaaggatctgcatgttgcggccatcgtcgatgagcaggatcatgtgctgggcacacagagttttcccgcgacacgacagggttatcgacagatgctggcatggatgcgcgcggcgggcgatcttctgcgtgtcggggttgagtcgaccggcagctacggcgccgggctgctgcgctttctgcaagccgccggggtcgaggtactggaagttacggcgcctgatcggcatgatcgccgccggcgtggtaaaagtgacgacctggatgcccagagcgccgctcacgccgcctttgcaggccagcggactgttaccccgcgccgccgagacggcatggtggaatctctccgagtcctgcgggcatgtcggaaaaccgctgtaagcgcgcgaaaaatcgcgttgcagatgatccaaaatacgatcgtcgcggcgccggatgcgctgcgggagcagctacgttccatgacccggatgcagttgatccgcacgcttgcggcgtcccggcctgacctcaccgcttaccgcaatctcgaagccgcttatcggatcagcctcaaatccctcgcacgccgctaccttgaactgcacgacgagatcgccgagttggacctgatgatcaaggcgattgtcgaagaactggcgccggaacttgtcgcccgcaattccattggtcacaacggagccgcccagcttctcctgacggctggcgacaatcccgacaggttgaaatccgaagcaagcttcgctgccctttgcggtgtcacccctgtacccgcctcgtcggggaaaacgatccgccatcgactgaaccgaggcggtgaccgggcagccaacagcgccctgcatctcatcgccatcggccgcctgcgaacggacgaaaagacacgtgcttatgtcgccaggcgtgtcgcggaaggtcactccaaactcgaagtcatccgcatcctgaaacgctacatcgcccgcgaggtctatggcgtcatcatacgccgccatcgcgaggtcaatgcatcgcgtttcgccgcttgacaaacagaagggcgt

SEQ ID NO: 8082 - DNA, 1733 bp, unidentified
  source 1..1733: mol_type = unassigned DNA; note = element_ca44db7
  misc_feature 1..2: note = core
  misc_feature 3..69: note = LE
  misc_feature 70..1230: note = CDS
  misc_feature 1231..1733: note = RE
  misc_feature 1268..1487: note = bridgeRNA
agatgctatggggcggcggcgaggattattgcatccatcggcgctgatgtgaatcgatggagcacccccatgcagaagttgaatgacctgagccgatgcctcacccccctcgaaccggacagcacgctgatcgccgtcatcgagatgagcctgtcgagctggctcgttgccggcatcgtgcctggcgttgagcgccagccgttgaagaagctcgcggtcgacgagagtgtattgttgaagctgttgcatcgatggagagaggaagccaagaaggcaggatacatgatcaaacggatcgctgtcgctttcgaggctggccgtgacggcttctggctggcgcgctgcctcagggctcgcgacgtcgaggtccatgtcattcatgcatcgagcgtagccgtatcgcgcgagcaccggcgtgccaagaccgaccggctcgacaccgagttgctcaaacgcgcctttcttggctggctgcgcggcgagcgtgatcactgcaagatggtcgcaatcccgacaattaaggacgaagatggcaagcggcccaaccgcgagcgcgagagcctcgtcggagagcaaagtcgggtcatcaaccgaatcaaagcaacattggtccggctcggcatccgcggcttcaatcccaagctgaagaaagctcccgaacgacttgaaggcttgcgcacgcccgagggcgagcggatcccgcccaacacgttgtctgaactacatcgcgacatggagcgccgacggctcttgcgcgatcagatccggcagatagagagcgcacgccgggatcgcctcgagcatgcacccggcgagggagcgcatgccatggtgcgcctgctggcgcgtgtgatgggcattggcatcgagacggccgacatgctggtgcaggaggtgctgtcgcgaaacttgcgcgatcgacgcgccgtagcgcgttatgcgggcctcactggctcgcccgacgagagcgggaagaagcgccgcgagaaaggactggcgcgatccgggaatcctcgggttcggcggggcatgatccaattggcgtggcgatttctcctgttccagaaggacagcaccttggcacagtggttccgagcccgcaccgagaacgcccgcggcactcgcaagaccatgatcgtggccttggcgcgcaagcttctgatcgccctgtggcggctcgtgcgggagggcgtggtgccggacggcgtcattctgcgtcccgcacaatgacaggaggacgtagaaggcacccaacagttttggcccagtctgtccactcgtgacgggtcgccaatgacggttcgaggtggcggtgacccgatggactccatggcttatcacgccgtaacagagaatgggtccgccgcttcggagcttcgctaccgatgcgcatgactgcatcatggttcgggtccttggacccaccgaatacaaggttgtggcgcgatagatccgcgctcgaacgcgggctcccctctgatcgtcaactctgatcgtcaacttgcggattgcggacccagcccgactgcattcgatggtgcagccgtgctcggaactgttaaggccaagccctgcgggtggtcgccgaagaggcgcagccttgacagctcctgcgcgcgacgggcttcgggtcagagacgaagaaacgggctttcagatcgaacaaagaagctgacgaaggaagaaagatgcgccactctgctgaaacttcttgacaaaaaaagccccataca

SEQ ID NO: 8083 - DNA, 1382 bp, unidentified
  source 1..1382: mol_type = unassigned DNA; note = element_ca58ee9
  misc_feature 1..2: note = core
  misc_feature 3..86: note = LE
  misc_feature 87..1118: note = CDS
  misc_feature 1119..1382: note = RE
  misc_feature 1152..1370: note = bridgeRNA
tgatgctgtggacggctcctccaccggcacgtgagtgccatggatgtgggcgctgttaaggctcccacgattcggaggagccagctatgcaaacggtcacgacaatcggtctcgacatcgccaagtctgtctttcaagtgcacggcgttgatgctgccgggcaagtggtcgtccgccgtcagttgaagcgtcgctacgtcctggcgttcttcgagaagctgccaccctgcctaatcggcgtcgaggcttgcgcctcatcgcatcattggtcgcgcgagctccaggcgctcgggcacaaggtgcgcctgatgcctccggcctacgtgaggccctacgtcaagcgccagaagaatgatgccgctgacgccgaggccatttgcgaagcagtcaccagggcaaacatgcggtttgtggagaccaagacgccggagcagcagagctgcctgatgctccatcgcacgcgccatctattcatccgccagcagaccgcggtgatcaatgcgatccgtgcccatcttgccgagttcgggatcgtcgcgccggtcggtcgcaatggtgttgaggaactgctcggggtcgtcgctgacgcaagtgacaagcggttgccggaaattgcgcgcgcctgcctcgccgcgctcggcgcccagctgcggatgctcaaggcgcagatcctggagttcgaccgaatgatcaacgcctggcaccgatccaacgagacgagcaaacggctcgatgagattcctggtgtcggtccggcgctggccacggctctggtcgccagcgttgctgatccgagggcgttccgatcaggaagagacttctcggcctggatcgggctcgtgccgaagcaacactcgagcggcggcaaggacaagctcggcggtatcagcaagcaaggcgatcgctacctgcgtagtctgttcaccgccggcgcgctggccgtgatccgttacgccaaaatccatggcgccaagcaccggccctggctcacggcattgttagcgcggcggccgacgaaggtcgctgccgtcgcgcttgccaacaagatcgccagaatggcttgggccatgatggccaggggcgagcgatacaaagaacccgtcgcactcgcggcgtaatagcgatcgcgctgggaatcatccggcgtgatgtgaaggttgggagggcgaacagcacgtaatgcagagccggtcgatccggcgatcaggacaacccacatgtgccagtgcattgtcgaatgcgggcttttgaccgggacctgatccgcggagggcattatggccagcggtcatgtgaaccgcactaacaggccgaacacatggctgcaccgaccagcgacgcgccgtgaagattctccttgccaactcggagccgtccacaca

SEQ ID NO: 8084 - DNA, 1357 bp, unidentified
  source 1..1357: mol_type = unassigned DNA; note = element_ca59c9e
  misc_feature 1..2: note = core
  misc_feature 3..83: note = LE
  misc_feature 84..1103: note = CDS
  misc_feature 1104..1357: note = RE
  misc_feature 1119..1343: note = bridgeRNA
gatgaggtggatggctcctgctccaccggcatcgaacgtgccaaagtgcagttgtcatgaactgcgaggaaaggagccacccaatgacagtaaagactgtaggcctcgatttggccaaggacgtttttcaagtgcacggtatttcggagaatggccgcgtcatcttcaacaaggccattaaacgcgcaaaacttctgtccttctttgggacgcttccgtcctgcagggtcggtatggaggcgtgcggatcgtcccatcactggggccgccagctgcgtaaacttgggcacgacgtgaagctcatgcccgctggctacgtcaaaccttacgtgaagcgtggcaagaacgacgctgttgatgctgaggcgatctgtgaggcggttcggcgtccgaccatgcgcttcgttgagatcaagactgaagaacagcaggccatcctttcaatccatcgcacacgcgatctggccgtccggcagcgcacgcagatggccaatacgatccgtagcttgttgcgcgagttcgggcatatcttgcccattgggatcgaagcagtgacggcatttgcaaagcgccacttgggcggtgaccacccggacatgccggagatcgctaatggcatgctcggtatccagtgctatcagttcatcggcttgaatgaacgcatcgaaggttattccaagatgatcgagcaacacgctctgctcaacgctgacgcgcgcaggttgatgcgcatgcctggaattgggccgatcacggcgtcagcgatcgtcgcgacgataggtgacgcgcatcaattccggacaggacgtgatctggcggcttggttgggcctgacccctctcaacaaatcgagtggcggcaaggaacgccttggcaagatcaccaagaaaggcgatcgctacattcgtaagctgttggtcgtcagcatgacatcgcgtgcggtcatggcgaagcgctcgccagaaaaggtcgatctctggacagccaatatcatcgccgacaaaccattccggctggcaacaacggcgatggccaacaaggcagccaggatcatctgggcgatgctcaccaaaaaacaggaataccggcagcccgcgttctgaccacgccagctgtccaacgagatgcaagacgttgaagtgatgatgcggaattaagtcaaccaagagcaaggacactccgggaaggtccgcggccctcagaggtcgataagccgaatggaacctcgcttgcggaattcatcagggccagtggcgacaacaccgccacgcaaacaggccggacagacgactgtactgacaaaaacgaccgctgaaatcgccaaaaaactcttgcaatgcaggagccatccacagag

SEQ ID NO: 8085 - DNA, 1552 bp, unidentified
  source 1..1552: mol_type = unassigned DNA; note = element_ca5c218
  misc_feature 1..3: note = core
  misc_feature 4..249: note = LE
  misc_feature 250..1362: note = CDS
  misc_feature 1363..1552: note = RE
  misc_feature 8..223: note = bridgeRNA
gttcgtattataaggtcaaccggagaaatctggttgactatttttattcaatttatagattgatagtagccggagtagaacggaagcacccgtgggacttgatcccgataactaaactgttcgccctctacttgttaacacatgattaggctggttgggacattgcgatcccgtataacaagcgaagatatgaatgacaaggtagatagaggttactggtcaatccacttcataaggaggagataatttatgaatccagttgtaggtctagatatagcaaaaggtgaaagtcaggttcaaatgttcttggataaaaaaataccctataaaaacagtgtgaaaatcgaacatacggtggaaggacttaaagagttacactcttatttactagatttagagcgtcaaacagggttaaaaccacctgttgttttggaatcaacgggtcactatcatacccctgttgtacaatttttagaagcgagagaatacgtcgtcattatcgtaaatccccttgtttcataccgagccaaaagctctagtttacgaaaaaccaaaacagatgccatagatgcttatcatttaggtgaactatattataaaaaggatttagaacctcagaaaaagcacggtattcagctgttaaatcttcgacatctcacaagacaacatgaaaatatgacaggaattatggttcaaacaaagttacagtttcaagctgtattagatcaagttttccctgagtataaaggaatttttggtgatttgtacgctgagatttcattaaggactttacagtccttccctacatctaaatcagttctagaggcaggtgttgaagaaatcgcacaattcattgatacacattgcaaagcacgttcgtttaattgggcgctcgaaagatcggaaaaattaatcggagctgcagaacgcaatccatttcaatcaactctttatcaaagtcttctagtcagtttgaatatgtataatgatttacttcaagtgtaccaccaacaactttctacgttggagcgtaagattgatgagctagcggcacaacttgaagaatatgaattactccaatcaattcccggtataggtgaaaaaatcgctgccacgattatttcagaaatcggagaaattgatcggtttaatcatccgaaaaaattggtggcttttgcgggactagatccaagtatatttgaatcaggacgctttaaaagcacgaaaaatcatattactaaacgtggttcagctaggcttcgccacatgctttatacagctgttcgttgttctattcgagatagtcggaaaaagactatagcaagaaataaacgattacgaacttgctatgatttaaaatgagaagaaggtaaaccatataaagtagctataattgcttgtgctaataagcttttacactggatttatgccatgttaaaaacgaaaacaccattccaagaaactatataaaaacagaatttgagttgcgctttttagtatagcatgaagtgttttttaacttaaaagatttttattgacaatctattagctg

SEQ ID NO: 8086 - DNA, 1569 bp, unidentified
  source 1..1569: mol_type = unassigned DNA; note = element_ca5c4df
  misc_feature 1..2: note = core
  misc_feature 3..248: note = LE
  misc_feature 249..1424: note = CDS
  misc_feature 1425..1569: note = RE
  misc_feature 3..226: note = bridgeRNA
ctcgtattataaagtagtagtgtttatagtccctctccaaggactgtatgctatactgttggagatactgtggattggttaaattctcctaccactagatggttacagaaaggctccaaccacagtctctttgtatatttgttaatcagttagataccgcatgacggtttatttagaacgaggttacaatcgcaaagagtaccagtggttccaaacagtatcaaatacattttcaaaggagtattgctatgatatatgcaggaattgatgttgccaaggataagcatgattgctttatcactaactcagatggtgaagtgctttttaaagcatttaccattcccaataaccgagatggttttgatgcattctatcagaagattacagccgttaccgatgatttagctaaagtaaaagtagggcttgaagccactggacactacagttataacatcttgggttttcttcttgataaaggtctgaccacctttgttatcaacccgttacataccagtcttttcagaaaaagtctaagccttagaaagaccaaaacggataaagttgattcccatacgattgctaccatgcttatgtctgacgtgaacttaaagtcctactcagacacatcttatcacaatgaggaattgaagtcactaacccgttatcgttttgataaggtaaaagaacgggcaaaactaaaatcctctgtttctcgtcttattaccatcctttttccggaactggagaagctcgttccaacactccacatggcgtctgtttatgcgcttctaaccgagctgccaagtgctgctgatatcgcatcggttcatttgacccggctgacaaatctcttggctaccgcttcaaaaggtcgttatgacaaagatactgccattcgcttcaaggaagctgccagaacctctatcggctctcatatgccggcaaagtccttggaactaaagcataccatcaaactgattcaggaactcacctccgagattgatgaaattgaagcagaaatcaaagccataatggatgaaattaactcaccaatccttggtattcccggtatcaactaccgcatgggtgctatgattattgctgaaatcggtgattttggcaggtttgattcccctgataagatacttgcctacgcaggactttccccatccacatatcaatcaggacagcttgatgggtgttattcccacatggagaaacgtggctctagatatcttcgctatgcattatttaatgccactaaatttgtctgccactgggattcgacttttgcctcttatcttgccaagaaacgagcagaaggtaagcattataacgttgccatttcccatgccgcaaagaaactggtcagagtaatttaccaacttgaaaaatcagggcaactctacatcaaagcagtttagtctttctgttcaaatatctccctcttgggcacctgtaaagatgctctgtttatcatgcagttttcaaagtactactatatctgaaatgcatcactgcaattcatacaaaaaactttctttttagacttgacttttaatagttagt

SEQ ID NO: 8087 - DNA, 1570 bp, unidentified
  source 1..1570: mol_type = unassigned DNA; note = element_ca5c52a
  misc_feature 1..2: note = core
  misc_feature 3..161: note = LE
  misc_feature 162..1424: note = CDS
  misc_feature 1425..1570: note = RE
ctcgtattatatagtagtagtgtttatagaccctctccaaggtctgtatgctatactgtttggagatactgtggattggtttcattttcctaccacttgatggttacggaaaggctccaaccacagtctctttgtatcgttgttaatcagttagataccgcatgacggttgatttagaacgaggttacaagcgcagagagctctgtggtcctaaacagtatctaaatctattactaaggagtgttcttatgatctacgttggaattgatgtcgctaaggataagcatgactgctttatcaccaattcagatggcaaagtcctttttccggtttttaccattcagaataaccgggatggatttgatgttcttttttccaggattcaatcctcttcttcagatgtgtccaatataaaagtaggactggaggccactggacactactcttacaacctgctcggttatcttattgacaaaggtctccacaccttcgttatcaatccgctccacacaaatctttacagaaaaagtctcagccttagaaagacgaaaacagataaggttgatgcccgaaccattgctttgatgctcatgtctgacgtgaacctgaagtcctactcagatacatcataccataacgaggagttaaagtcactcacccgttatcgttttcgtaaggttcaggaacgcgctcagcttagacagtctgtttccaggcttgttaccattctctttccagaattggaaaaacttgttccttcgcttcatatcgcttctatctacgcccttctttccgagtttccttctgccggaacgattgcctcctgccatttgacacacctgacgaagcggttggaaaacgcttcaaaaggccgttacagccgggagaaagcgattgaaatacggaatgctgccagagcctccatcggttccaacatgcctgccaaatctctggaattaaagcacacactccggctgattggtgaactggattccgaaatctcagaaattgaatccgaaatcaaacggatcatggatgaaatccattctcccatcctgaccattccaggaataggctaccgcatgggcgccatgatcctggcagagattggagatttctcccgctttgattcgccggataagatcctggcagatgccggagcttctccatctacctatcaatccgggaagatggaatcctcttattcccacatggagaaacggggatcgcgctatttacgttttgctctgatcaatgccaccaaatacgtctgccaatgggatgaaactttcggtgcataccttcagaagaagatttctgaagggaaacactacaacgtcgccatcacccacgccgcaaagaaacttgtacggttaatttacgcaatggaaaaatccggcaaaccttacataaaaacggcataactttttctgccctataacactcttttagagcaccgatatccgatgctctgtttgtcgtgcgattttcaaggtacaacgatctatgaaatgcgttcccgcaattcattcaaaaatcttcattttagacttgacttttaatagttagt

SEQ ID NO: 8088 - DNA, 1431 bp, unidentified
  source 1..1431: mol_type = unassigned DNA; note = element_ca60319
  misc_feature 1: note = core
  misc_feature 2..209: note = LE
  misc_feature 210..1415: note = CDS
  misc_feature 1416..1431: note = RE
  misc_feature 4..214: note = bridgeRNA
cgttgatactgataacgccctgctcgggtctgactctcgaagcgactgacgtgatgtcttgaagctgatccgtcggcccgggcggggtgtcctcagtgtggccggccaggcggacatgacctcataggagcctggcttagaggccccgccaacgtcttgtctgcccgcctgaccggttcgctatcccgactaaaggaagcagaaccatcatgacaactcctgcccgtgaagtcgtcgcgggtgtcgacacgcacgccgacacgcaccacgccgccgtgatcgacaccgtcggccgccgcctcggcgatgcccagttccccgcgaccggggagggctatgccgcactggcggcgttcctgatctcgttcgggaccatcctgcgtgtcggcgtcgaaggcaccgggtcctacggcgccgggctgtcccgtcatctgcggggcctgggcatgatcgtggcggaggtgatccgcccgaaccggcagatccgccgcctgcgaggcaagtccgacccgatcgacgcctacgccgcagcccagaccgcgctggcgcagctggacctgccgaccccgaagaccgccgacgggcaggtcgaagcgatccggcagctgctggtcgcccgccgcggcgccgtcaaagcccgcaccgcggcgatgagccagatcaagatgctgctggtcaccgcgccggagctgatccgggcaaagttccgcggcctcaccgatgacaacctcatcgacggtctctcacgctcccgcccctgcgcatccgatgccgtcacctccgctgccggccatgcactgcggtccctggcccgccgtcaccagcgcctgggcaaggagatcaccgacctcgaggctctgctgcgccccctggtgaaagccgagaacccggcgctggtcgccgcattcggcatccacaccgtcactgctgcgcagctgctggtcaccgccggggacaacccggaccgactgcatcacgaggccagcttcgccgccctctgcggcaccaacccgatccccgcctccagcggcaagaccacccgccaccgcctcaaccgcggcggcgaccggcaagccaacgccgcgttgcaccgcattgcgttggtccggatgggccatgaccccagaacccgcgactacatcaccggccagatcgcccgaggcaagaacacgaaggaagccatgcgctgcctcaaacgcgccatcgcccgcgaggtcttcaccctgctcacaaaccccggcgaagtccccgtcgtcgacgacctgcgccccctgcgccaagcccgcggcctcaccctccagaccgtcgccacacacttcggcacctggccctcgaagatctcgagcatcgaacgcggcacccgccgcgacgacaccctcgccaacgcctaccgaaactggctcaacgccgcttgacaggacataggagcat

SEQ ID NO: 8089 - DNA, 1287 bp, unidentified
  source 1..1287: mol_type = unassigned DNA; note = element_ca77d20
  misc_feature 1..2: note = core
  misc_feature 3..240: note = LE
  misc_feature 241..1275: note = CDS
  misc_feature 1276..1287: note = RE
  misc_feature 29..243: note = bridgeRNA
ctgacttgttgaatgacaaccggataccgcgaagatctttgtttttcgcagtgtccgagggtgccggacggcgttggctcgcactgctccttgccgcctgagggctggctcattgatagcgtgccgccgccgtctggcacccgtgcggtgtggctcgacagaggcatgcaagtagatcgacttgaagtcagggtgcccaccgcgcacgtcccatcccaacgagcgcaaggccgctaacccgtgattctgatcggtattgatccgcacaagtccacccataccgcagtcgcaatcgacagctcgggcaaaaagattgctcaacgccgcctcccggtcaacgccgggactttccggcagttgatttcctggtgccagcactggccgcagagaaggttcgccgtagagggcgccgccgggttgggccgcggtatcgcccagcagctcgctgcggccggcgagcacgtcgtcgatgttccctccacgttgtcggcgcgagcccggatgcttgccaccggcggcaaccgcaagaccgacgctgccgacgcgctgcacgtcgcccatgtcgcgttgttccgcccggatttgcgccgcgtctgctctgaagaccagaccaccatcttgcggctgcttaccgaacgtcgcgatgacctggtcagcgagcgcacccgcctgctcaatcggctccacgtcctgctgcgcgacctggtccccggaggagcgcccaccgcgctatctactgacaaggccgccgacattctcaagtggatcaggccgatgaccgcgaccgactgctgtcggcgcgacctcgtccgtgaccttgtcgccgacctgcggcgcttcgaccggttgatcaaaggcagcgaaacgcagatgcgtgatgctttgaacgccaccggaactacgctcaccgaactgccgggaatgggcatcgtccttgccgccaaagtcctcggtcacgtcggaaacattgaccgctttccgaccgaacatcacttcgccagctacaccggcagtgccccgctggaagcctcgagcggcaacacggtccgccaccgactcaacactggaggcaatcgtgccctcaacagcgtgctgcacatcatcgccacctgccaaatccgcgaccccggaatcggacagaactactaccgacgcaaaatcgcagaaggaaaaacacccgctgaagcacgccgcgccctcaaacgcaggctctccaacgccgtctaccgcacgctcaagcgtgatcaacggaaactccttcccgaagccgcttgacacacagaggcg

SEQ ID NO: 8090 - DNA, 1155 bp, unidentified
  source 1..1155: mol_type = unassigned DNA; note = element_ca7c54c
  misc_feature 1..2: note = core
  misc_feature 3..210: note = LE
  misc_feature 211..1143: note = CDS
  misc_feature 1144..1155: note = RE
  misc_feature 12..213: note = bridgeRNA
cttgtcttatgctgatcccggctcttgtgcgaagaaagagccagcgcgcgctacgcgatttatggcgcgcgctggcggtggctggatcgtcacgggcttggtcgtgatggaccgttttagagtgtgatcagccatcgtcttcgcctgaggcctgaacggatacagagcggcgtaaagccctctacgacaagcataggacacgcgaggacaatgaaagataccatcggaatcgacatctcgaaagccactctcgacgcgcatcgtctgatcgatgacgaagcgcggcaatttgcgaactccccagccggcctgcgggcacttcgtcgctggatcggcaccaaaatgcctgacttggtcatttatgaatcgactggtgcctatcacgccgccattgaacgcagctttggcggcgtcttgcctctcgtgaaggtgaacccgctgcaggcgcgccgatttgcccaggcccgcgggacacgggcaaagaccgatgccgttgatgcgcgcgttctggccgcgatgggtgcggctctcgaccttgcaccagatgtcccggcaggcaaaaatcaacacgacctcaaggagttgcagatcgcccgcatggccctgatcaaggaacgcacgcgattgctgaaccggtccaaaacgcagtccctgaccgtgctcaaacgccaatccaaggctcgccttgcgcagatcaagcgccagctcggcgaactggaagacgcgctgctggacctcgcgcgccagtgcccgaaacgcgcacgcgccttcgatattctgtgctcgatcccggggctgggccgggtcacagctgtcgcgatcctcgtcgaatgtccggaaatcggcaccatgacccgcaaacaaatcacgagccttgcgggccttgcaccgatgacgcggcaatcaggacagtggcgaggtaaggcgttcattcaaggcgggcgcaagttcctgcgcgacgcgctctacatgccagcgctcgtcgccgcccgctacaatccggatctgcggcagaaataccaagcgatgatatcagatggaaaacccgcaaaagtcgcgctgaccgccctcatgcgaaagctcatcgagctggccaacgcactcgtccgacaagaccgcgaatggacgccaaaaaccgcttgatcaagacggata

SEQ ID NO: 8091 - DNA, 1693 bp, unidentified
  source 1..1693: mol_type = unassigned DNA; note = element_ca80f54
  misc_feature 1..2: note = core
  misc_feature 3..129: note = LE
  misc_feature 130..1236: note = CDS
  misc_feature 1237..1693: note = RE
  misc_feature 1274..1503: note = bridgeRNA
agacaatatggaatgaccggcccgctatcgtaacgtcgtagtgctgtcgcactcgacaaggtggtcagcgccaccgaaatcgcgggttaacgcctcgcggcgccagagccgcatcgataggagccggtcgtgaaacaggttactacgtacgtggggatcgacgcgcacaagaaggacctcttcatcgccatgctggtgggcacggacaagacgccggttacgtggacggtgccgaatgaatcgaacgccgtgcggcgcttggtgcggaagcttgagcgagacgcacctggcccggtgcaggcgtgttacgaagctgggccgtgcggctatgcgctgcagcggcagatgacgacgccccgcgtcagctgccaggtgattgcgccggcgttggtgccgcgcaaaccgggcgagcgcgtgaagacgaatcgccgcgatgcccgcaagctgggggagctgctgcgcgccgggttgctgacggaggtccggccgccgacgccggaagaagaggcgggccgcgatctgtgccgagcgcgcgacgacgcgcgtgccgatctgcagcggtgtcgccatcgattgggcaaactgctgctgcgccgcggactgcatttcagcgggcggaattggacgcgcgcccatcgccagtgggtcgacggcctcacctgggtgcacgaagccgagcgcgtggtggtcgaggactactggcttgccatcgatcaggtcggggcgcggctcagtgagctcgatgctcggttgatggagatcgcgcaaacggagccgtaccgagagccggtcgcgtggctgcgctgcttccgtggcatcgacacgttgacggccatcttgatcttggcggagctgcacgacttccgacgatttcagtcgccgcgggcgctgatggcctatctcgggctggtgcctggtgaggactccaccggggagaagcaccggcgcggccgcatcacccgcaccggcaacgcgttggtacgccggctcctggtggaaaccgcctggcattatcaacaccgaccggccgtgggcgtcgccctcacgcgccggcggaaagggcagccgacgcgtgtgattgcggtggcggacaaagcgcaacaacgactgtgtcgtcgtttccgaaaactcgccgcggaacacaagccacccccgaagatcgcggtcgcagtcgcgcgcgagctggcggggtttctgtgggccgtgttgcagcccgcgccggcccacgtgaattgacggcagggagcgcgagaggaacgaggtgatgcggaccggcgacggaccgcgaagacggcggatgatcagaggcacgattgcgaggatcggcgagctagacatgcgatacggaccctcgtcccaactcgcgaccctagactgcacgtcctcccgacgaagcactgtcatgtgtgctctgccgcgggcgaccacggtaaccaccgaatatcagcgtgactcgtcgtcgaagcgacctcgagcgtccgtcgtctccgcggcccggccgccgacgcgttgtcgtaccacgcggccgacacggcgtccagggctgcgcgccctgcgggcggcacctacggtgcccctggacaccgcgtcggccacgtggtgggaagcacctatgcgagtaagctgacgcttcctagctctcgtcaagccgccgtcgaacaaatcggggcttgactgagggtcattccatatc

SEQ ID NO: 8092 - DNA, 1530 bp, unidentified
  source 1..1530: mol_type = unassigned DNA; note = element_ca998a2
  misc_feature 1..2: note = core
  misc_feature 3..82: note = LE
  misc_feature 83..934: note = CDS
  misc_feature 935..1530: note = RE
  misc_feature 1276..1516: note = bridgeRNA
tgatgtggtggacggcccttccacctgaacagcggggtgtcaaactgcggtcgtcgaagaaaccaccttaagggaggcggcaatgagcgcggtgacgacggtagggctggatctggcaaagaacgttttccaggttcacgggattgatgaaaccggcaaaatcatgattcgacggcagctccggcggaatgaagtcgtgaagttctttagggaattgcctgcgcgccttgtcggcatggaagcatgcggaaccgcccattattgggggcgggagattgccgccttgggtcatacggtgaagctgatgccgcccgcctacgtcaaaccttacgtcaagcgcggcaagaccgatgcggcggacgcggaagcgatctgcgaggcggtgacccggccaaccatgcggttcgtcgcggtcaagaccgcagaccagcaggcagtgctgatgctacacaaaacacgagacctcctagttcggcaacggaccatgctgatcaacgggttgcgcggtcatctggccgagttcggcattatcgcggcaaaggggccggctggcgtcaaggccgttattgaggcgctgcacgccgccaaagatcaattgccggaaccggcgcggctggcgctccatgggattgtcgatcagctgcgcctgttgggcgccgagatcgagcggctggagacacgcattgtcgagtggcatcgctctaatgacgtcagccgccgattggccacgatccccggtatcggccccatcaccgccagcgccatcgccgccgcggcgcccgatggcagcctgttcagctccggccgtcagttcgcggcatggctcggcctgacgccgaaagcacacagcagcggcggcaaggaacgacaggtcggcatcagcaagcagggcgacggctccgccgcttgctcgtcgtcggcgccacggccgtgatgcgatatgcccgtaaggacaacgccggccgaagctgggcaacgaaactgctggaacgcaagccggccaagctggccgccgtcgcgctggccaacaagacggcgcgggtcgcctgggtgatcatgacgcgggggacgacttatgtggcgcacgcagcatagacccggcgccgccatccttcagcgcgccgcatccgacgccgattctgctggacgcggggggcatcgtaaagcctggccctgcgggccatcgcctgcggcgactgcgggcttgggcgcccccgcgtccagccctcgttccaccatcggatgcatggcgaagtgacgctgaacgacaaagggcttgccgcccgggaaaccgagcggcgaggtgggtgggaagggtgaaacgacgtgatgacgaaccggctgggccggggatcggctaaacccacggggaccaagcgcatcaaagcgcgatgaggtgatttgggcgtcgatccgcggaattcatcagggccagcagctttcggctgcagcaaaaggccgaacacatggatgcatccaaccgaccgtcacattacctttttcacttgctcccaacgggccgtccacaca

SEQ ID NO: 8093 - DNA, 1747 bp, unidentified
  source 1..1747: mol_type = unassigned DNA; note = element_ca9bab5
  misc_feature 1: note = core
  misc_feature 2..369: note = LE
  misc_feature 370..1602: note = CDS
  misc_feature 1603..1747: note = RE
  misc_feature 61..344: note = bridgeRNA
tcgtataataagtttatagttaatagttacatagtaccttgacaacttaatagataccgaaaataaatcaatcggtttgataatacccatgatataattgaacatcgtgtcaatcaggtataagttcttccgccccctgttgagcccataaataagggttacttcaagggaagtctgttcccctgacatggaagttaacttcaaaccaactggctgtttgctggagttcatggcctgccctttagcagtggggttcgcatcagaccatctccagccgaattctaataccgcgagggtgttgatgctccatgatcgtgggtgttatcaaaccgattgaccaaaaatccaactacgaaagaaggtgattccatgagccaactttacgtcggtattgatgtgagcagcaaatccaacgtggcttacctgatgaagcctgatggttccaagcacagcacgttcttggtcagaaactcccttgatggttcacgccagcttgttaagcgcatccataatgctatcacttctgaatcccttacagatgtcatcatcggacttgaatccacctcggtttatggtgacaatctcgtctgtttcctaagggaagatggcaccctcacgccgtataacaagaagatccatgtcctcaacccgaagcaggttgccaaatttaaactggcttataatgacctgcccaagaatgactatgtggatgcatttgttattgcggactgcctgcgcttcggcagaatcaacaaagaggtttacctggatgattaccgctacaaagcgctccagaacctcacaagagcccgtttcttcgctgtccagaacctcacaaaggaaaaacagcgtttcctgaactacctgtttaagaagtattccacgatggcgcaggagaaggtattttccgataccttcagtactactgccctggccgtctacgaagaattcgattccgcagagaccctggctgaaatggacttacaacagctcaccgtttttattaaggaaaaagggaaaaaccgcttccctgatcctgatgcggtggcgaaagccatccagaaagccgcccggagttcctatcgcctgcccaagacggtaaatgactccgtaaaccaagtgctttccatatccataagctcaatgagagcgatggagcaacagatcaaagcctttgataaggcgatcgccgatcagatggagctgatcccgaacaccctgacgtccatcaaggggatcggaccggtctactctgccggcattattgcggagatcggcgatatcaaccgattcccgaaccaggcttccctggcaaaatacgccgggcttgcctggcagcaacaccagtccggtgattttgaatcgcaaaacacgcgtatgatcaaatccggaaaccgatacttaaagtactatctgggcgaagcagccatgtctcttgtgagatgcgacgcagagtacagccgcttctaccacctcaaatacaacgaggttaacaagtatcaacataaacgcgccctcgcattaactgcccgtaaattagtgcggctcgtctttcgactgttgaaagacaactgcctatacagggcaccggagtccaagtaacacaggacagtttcggtaaattccagcctggctttcaaaaaaattgaaatcagcgaggcttggggaagtgcgcccatatatcaggaaatatagcaaaacaaacgtaaattttatttattttccccttgacatatcaccgctggac

SEQ ID NO: 8094 - DNA, 1449 bp, unidentified
  source 1..1449: mol_type = unassigned DNA; note = element_ca9ec14
  misc_feature 1..4: note = core
  misc_feature 5..231: note = LE
  misc_feature 232..1431: note = CDS
  misc_feature 1432..1449: note = RE
  misc_feature 1..235: note = bridgeRNA
ccccgttacatttattgggtccccgagtgccgggggcatggtcgctggacccggtatgactttcctgccctgttattgatgatccggggggtgttgtcgccgggtccggaggcacttgttgaccgctgatagggacacggccggaccagcgggttcaggtctcttcgtaacgtgggtgccggcatcgggtgtcgtgactgcggccatatagtggtgcaaaggagcgccagtatggatcagggattcgatgtttactgcggactcgatgtcggcaaaagcgaacaccacgccaccgcgctgaaccgcgccggcgaacgcctttttgataaaccgctgccccaggatgaggcccggctgcgggagctcttcacgacgctgcagcagcacgggaaggtgctgatggtcgtcgaccagcccaacaccatcggcgccctgcccgtggccgtggcccgggattgcggctgcgaagtcgcttacctgccgggcctggcgatgcgtaaagcggcggatctgcatcccgggaaatcgaaaactgatgcccgggacgcgttcatcatcgccgagacagcccgggcgatgccgcacacgctgcgggccgtggaccgggacagcgaggtcctctccgcgctgaaggttctcgccgggttcgatgccgacctgacccacgaatgcacccgtgccatcaaccggctgcggtccctgctgctgcagatcttcccggcactggaacgcgcctttcccggcacggtcctgacccgtccactggtcctggaactgctgatcaaatacgccggcccgaccgggctgcgcgccgcaggacggtcgaacgtgctgcgctgggcacgcaaccacagccggaaggaccccgtccagctcgtcgatgccatcttcaccgcgctcggcgagcagaccgtgaccgtcgccggaaccgaagccgtcgaactcgtcatcccgcgcgttgccgcccagatccaggaactcaaacaccagcgcaccatcgtcgccgccgaagtcgaaaaactcctggacgacttccctctttccacggtcttgatgtccatgccgggagtcggcatcaagaccgcagcgacgatactcctgaccatcggcgacgcgagcagcttccgcacttccgggcacctcgccgcctacgccggcatcgcacccgtcacccgccgctccggcacctccatccgcggcgaattccctgcccgcgcggggaataagcaactcaagaacgcgctgttcagatccgcctggatcgcctcctgccacgacccgctctccaaggcctactacgaccggaaacgcgccgacggcaagaaacacaacgccgccgtcatctgcctggcccggcgccgctgcgacgtcctctacgccatgctcaaaaacggaaccctctaccaggcaaagactccccaagccgcttgaccaaaagcatagggacac

SEQ ID NO: 8095 - DNA, 1384 bp, unidentified
  source 1..1384: mol_type = unassigned DNA; note = element_caa5d28
  misc_feature 1: note = core
  misc_feature 2..88: note = LE
  misc_feature 89..1126: note = CDS
  misc_feature 1127..1384: note = RE
  misc_feature 1148..1376: note = bridgeRNA
caatgggatggactcctcctcaacttgaattgttgacctttttttggtcaatatgatgagttaccaatattcaaatcaggagaagcccatgagtcagatcactagagtcggtgttgatattgcaaagtctgtttttcatgtccacgcagttgatagatttggagaacggcagtggaaaggtaaatactctcgaaccaagtggctgaatgccatcacagacaaagtgcctcaaggtgcagaagttgcgatggaagcgtgtggttcgtcgcactattggggaagagagttacaaaaacggggttataaagtcaaaattatacatgctcagtttgttaagccttatgtaaagagcaataagaatgatgcgattgacgcagaggcaatttgcgaagccatgagccgcccgaacatgcgatttgtatgtgtaaaatcaaatcggcaacaagacattcagtctatgcatcggatcagggataaactgatggtgcaaaaatcctccaaagcaaatcaaatacgtggtttggtcagtgaatatggattggttgcgccagtaggtatcaataagctgagagaagcgatccctctttggcttgaagatgtcgaaaatggtttgtcagcactatttcgttcgttgctattagatttgtttgatgacttacggcgacttcaagagcgggtagataaactcgacaatctaattcagcaagaagttaaaaacgacccagttgcacgttcactacttgagttgagaggagtgggagttttatgtgctagtgctttatcttgtgcaataggagatgctaaaggttacaggaaaggacgagattttgcagcttctattgggctcacgccgagacaacatagtacaggcggcaagccaagattgctaggtatcagtaaacgaggcgatggctacttgagaaaactattggttcatggggcccgctctgtcatcaggcatgctcatcgacatgatgacaatctgagcaaatggatagcaaagctgtgcgcttacaagcatgtgaatatagttattgttgcactagcaaacaaaacggcacgagcagcttgggcgatggtaaataagagtgaaggttatcacccagaattaatagcaagcgcatagacgagtttataagtaaaaatgttcatcccagttgcaaagtaagatgtgagatggctaacaggtaagaccgacacttgaaaaaccttacctagacgtagagctttaaagctcgtgtaagcgttaaggagcaagtgtgcgaatagcccatagaggttcgatgcaataacagaaaagcatcattaagaaaccggatacacgttggcaatcatacctaaagttattgaacaaattacttgcaaaagaggaggagtccataca

SEQ ID NO: 8096 - DNA, 1354 bp, unidentified
  source 1..1354: mol_type = unassigned DNA; note = element_caa9b6f
  misc_feature 1: note = core
  misc_feature 2..69: note = LE
  misc_feature 70..825: note = CDS
  misc_feature 826..1354: note = RE
  misc_feature 1121..1352: note = bridgeRNA
taatgagatggtcacccccacccggtgagcggtacgctgacagggtggattattttagagggcaccatcatgcaaaacgttgcgcttattggtatcgatctcggtaaacattcttttcatattcattgtcaggataaatctggcaatgcgcttttgcgtaagaagtttacgcgtacgaagttgatgcagtttctggcaacatgtccatcctcagtagttgttatggaagcctgcgctggtgcgtattttatggcccggcgtatcagcgacatcggtcatgaagcaaaacttatctctccgcaattcgtgcgtccgtttgtcaaaagtaataagaatgattttattgatgcagaagccatatgcgaagcggcttcacgaccatcaatgtgttttatccagccaagaacagaaacccagcaggctatgagggcattacaccgggtcagagaatcgctcatcagagataaggtgaaaacaaccaaccagatccacggtttcttgctggaatttggaatcagtctgccgacaggggatgccgcaataaaacggttgtctctggtgttggctgaacacgaagtagctgaatatctgagtcgcttgctgatgaaattacatgctcactatctttatcttattgagcaaataacagaactggaatcagagttaaaccagtcaatcaaagctgacgctactgcgcaacgcatcatgacaatccccggtgttgggccgatgacggccagccagctctcatcccagcttggtgatggtaaacaattttcgtgcagcagggatgttgcagcatccacaggacttgttccccgataatacagtaccggtggtaaatcaacgctgttggggatcagcaaacgaggaaacaaaaatttgcgtcggttacttgttcagtgcgcccgctcgttcatgatgcggctggagcatcaatagggtagactcgctgaatgggttcgaaagcaactcgacaacaagcattcaaatattgtcgcctgcgctctggcgaataaactggcccgaatagcctgggcaatcactgctctgcaaaaagaatatcaggcctgatatagatactgacaaaactcaattggctcattttaaacaataagatacaagttacctgtctggttttgcgaagactgattattgatgacatgaacggcaaatagacctgattaaaaacctgtcagaaaaaatggctcgctgaagccgagggtctttttaggattatcaggtgcggaactcatcgaggcgcgggcctccttgcccacagagacgccggatagatttaagcaagcccaccattaatcaaaaatcagtgttgcaaaaagagcctgtacataga

SEQ ID NO: 8097 - DNA, 1402 bp, unidentified
  source 1..1402: mol_type = unassigned DNA; note = element_caabec7
  misc_feature 1..2: note = core
  misc_feature 3..84: note = LE
  misc_feature 85..1128: note = CDS
  misc_feature 1129..1402: note = RE
  misc_feature 1149..1390: note = bridgeRNA
tgatgtggtggaacggcccgctccacagcatcaacgtgctagaacgtggtcgttgttcgaacgccacaaaggagggaccgttccgtgaaacaggttatcaccattggattggatctggccaagcacgttttccaggttcacggcgcggatgcggatggctcgcccgtattcaaccggaagctgcggcgcagcgaagttatgcgcttcttcgaaaagctgccaccatgcctggtgggtatggaagcatgcggtagcgcccactattgggcgcgcgcgataacggctctcggccatgacgtcagactgattccgccagcttatgtgaaacccttcgtcaagcgaggtaaaacggatgcggcggacgcggaggccatcagcgaagcggtaatccgaaagaccatgcgcttcgtcccgatcaagacggccgagcagcaggctgccgcaatggtgctgaagacccgcgctcttctggtgcggcagcgaacgcaggcggtcaacgccctgcgcgcgcatctggccgaattaggcatcatcgccaccgccggcctggcaaaggttgaggcgctggtttcgatcgtgcgggatgagaccgatgctcgcctacccgcagcagcacgcttcgctctgatggctattgccgatgtgatcgaagcttcggccgaccagatcgataggctcgagcgcgcaattgtcatggaggccaaacgcgacgaggacatgcgccggttgaccacgattcctggcgtgggcgctattaccgcggcgaccatcaaggcgcttgtgccggatcccggcggattcaagtcagctcgccactttgccgcctggctcggattgacaccgcggtctcattcaagcggaggcaaggagcgactgggccgaatatcgaagatgggaaatccggacctccgcgctctcctcgtcgtcggggcaaccgccgtcttgagggttgcccgaaacgacgctcggacgcggccgtggttgaaggcgattctcgccaggaggcccttcaaggttgcagcggtcgcgcaggccaacaagacggctcggattatctgggcgcttctgaaccagggcgggacttatcggcgtgccgctccactggcgattaccgcggccgctgtctgatggacgcagtgaccgccaaaatgatctgaccggcgcagggctggcagagggcaaggtgcaataacaggcgatgaaccatgggacgaaatcccgaaacgagtgaagctactgcccccaatgcgctcaagcgcgtaaacttgattcagctcctcgttcgcggatctcatcaaggccagcggccatgtgccgcgcgcaaaggccggacatatgaccgcaccgttccaatgtatgaaatcgactgaaaaagctcttgccatgcgggccgttccacata

SEQ ID NO: 8098 - DNA, 1386 bp, unidentified
  source 1..1386: mol_type = unassigned DNA; note = element_cab67a3
  misc_feature 1..2: note = core
  misc_feature 3..87: note = LE
  misc_feature 88..1128: note = CDS
  misc_feature 1129..1386: note = RE
  misc_feature 1153..1372: note = bridgeRNA
gatggggtggatggctcctgctcacggcatcagagtgccaaagtgtggaagctatcatgcaaccacgagccaaaggagccatccgccatggagattactacagttggccttgacctggcgaagaacgttttccaggtccatgcgattagcggcgccagcaaagttatattgaggaaggcgttgcgccgttcgcaggtgcgaaggtttttcgagcagctcgatccttgtctggttggtatcgaggcgtgcgcgaccagccactactgggctcgggagatcaccaagttgggccatgaagtgcgcctgatgccgccggcctatgtgaagccctacgtcaagcgcgggaagacggatgcgagcgatgccgaggcgatctgcgaggcggtgacgcgacccacgatgcggtatgtcgcgatcaaggcgcccgagcagcaggcggcgctggcgttgcaccgaacgcgggacctggtcgtcaaacagcgcacccaactggtcaatatgatccgcggcctgctggcggagttcggcattgagatcggccgtggcgttgagcaggcactgaagctcgctaagcgcatcgcatcgggcgacgtgccagagattccgcccctcgcggcaaaagtgatcgcaggcctagctaggcaggtcctggatctgcaggcccggctgggtgagatcgaacacgacctgctggcctggcatcgatcgaacgacgtcgccaagcggcttgcaacgatccccgggatcgggacggtgggtgccacagcgcttgcagcctctgtcaccgacccgcatcagttccgttccggacgacagttcgccgcctggcttggcctgacccccttacagcattccagcggcggcaaagagcggctgggagggatctcgaagatgggcgataagtacctgcgccggcttctcgtcgtcggcatgacttccctgatccggcgcgccaagtacaagcccgaggctgtcgatccttggcttgctgacctgttgtcgcgcaagccagctcgtctggtcaccgtcgcgctcgccaacaaggcagcgcgggtggtctgggcgatcatggtgcgcggcggcgtttatcgcaggccagcagatgcgggtgtcatggcccctgtctgacgacacggtcaagcaaacaccacccagaagttgtgaggacgatgcgatgtgatggcgaaccggtcagactggggatgaggacaacccgccaaatgtccagggcgtcacagcccgataagcagaatgggacctcatccgtgcataccatcagggccagcggtcatgtgcaccgcaccaacaggccgaacacaagactgcacccgaccaccacgccacaccatcaaatcaacccttgcaatgcgggagccatccacacag

SEQ ID NO: 8099 - DNA, 1570 bp, unidentified
  source 1..1570: mol_type = unassigned DNA; note = element_cac86de
  misc_feature 1..2: note = core
  misc_feature 3..167: note = LE
  misc_feature 168..1460: note = CDS
  misc_feature 1461..1570: note = RE
ctaatatatatatgtagtcctcaaatatacattagatctccttcttttagatttttttagacggactattttataattgaattatagatcacatcacagactagtttatttcatccttacagcgtttgactggttcggaaaggatatagctgtgactttaattaaatatggtaatgagttggatacagcacattgactggttatttcttattaggttacatcgattaaagattcatagcgaaagcatgtgttggtctatagaaaggattggttttatgatttatgtaggtattgatgtcgcctcaaccaaacatgacatcgttatttcaaacgaatctggagaagtctttaagaaagctttctcgattaaaaatgatttagagggatataaaaaactccttagtgaaataagttacgctaaagagttcttcaatgatctaaatgtacgtatagggcttgaatcaactggacattacagtagaaatattctacactttctcatccttgcacggtttgaggtgatgttcattaatccattattaaccaatatggaccgtaaggctgcctctgttcgtaagacgaagacagattctattgacgccaaggccatttgtatgtttcttattagaaatcaaaatgatttcaaaccctatacactttcatcttatcacattgatgaactcaaaacacttgttaaattaagaaaatctcttaaaacccaaatcaataaagaaatgaacttacttcatgcttatgtgattcaggcttttcctgaatactataagatctttaagaaaattagttctaaagcctccatggaggtgttaagtcgttatgcttctttatcagaattcaaacgcgtcaggttgaaaaccctcaaagaattgattagaaaatcatctcaaggacaccatggaatcagagaagctcaaatgattaaagaacttactgcatcttcaatcggcatcgatagttcagcgttatcgttttcaattaaacaaactatagaacggattctggtgatcaaagatcaggtctctggtattgaacacgaaatcattcatcatgtcgatgaatctaaaacaaagttgttatctgttcctggtgtcggttataccactggtgcgattattctcgctgaaatcggcgatattcatcgtttcaaaaccgatgatcaacttctagcttatgcaggattagatccatccgtttatcagtcaggaaactttgaaggtaattataagatttcaaaacgaggatcttctattttaagatgggcaatttatcaagctgcacaggcagctgttaagtttgattctgtttttaaggcttattatctcaaaaagaaatctgaaggtaaacgtcatcgcgtaattattggtcatgttacgaaaaaacttttacgagttattcgttcaatcatgaagaataacattacttattcaataaatactcattaacatatttaaatttcaaagaccttaatgtgtctttaggcactctttttagtatgccttcatatcattaccactatttatttcttttctcttgacttatattaaatagttgg

SEQ ID NO: 8100 - DNA, 1673 bp, unidentified
  source 1..1673: mol_type = unassigned DNA; note = element_cacf14c
  misc_feature 1..2: note = core
  misc_feature 3..78: note = LE
  misc_feature 79..1284: note = CDS
  misc_feature 1285..1673: note = RE
  misc_feature 1405..1660: note = bridgeRNA
tgttggggtggacggcccccgacggcatcgctgtgccagaatgaggtcgttttgagatctcaaacaagggagccgtccgtgacgaagattatccgcattggtatggacacgtccaagagtgttttcgtgctgcacggcgtggatgcggcggagcagccgatcctgcgcaggaagctgcggcgcaagcaagtgcttgagttctttgcgaagctggagccgaccaaggtcggcctggaggcctgcggggcggcgcattattgggcgcgcgagctgcgagcgttggggcacgaggtcgttctggtgccgccacagtatgtcaagccgtacgtcaagcggaacaagaacgacgccgccgatgccgaggcgatctgcgaagccatgagccggccgacgatgcggttcgtgccggtaaagacggccgagcaacaagctgctttgatgctggcgggcacgcgcgatgggctgatccgccgccgcacacagctgaccaacacaatccgcggttatgctgccgagttcgggctgacagccgccaaggggctcgacaagatcgagcctctgttggcccggatcgcggaggcagcattgcccaagctcgcaaaggagctgtttgccacccatgcccgggaatatgcgcggctgaagatcgagattgcgaagattgaagccaagttgatggcttggcacaagcacaatgaactgagccggcggctggaggaggttccgggcgttggcccgatcggggcttcgctggcggccatgaaggtccccgatcctcacgcgttccgctgtggccgggacttttcggcctggctcggagtgacgccgaaggatcactcgaccgccggcaagacgcggctcggcgtgatcacccgcgccggcgacgaggctttgcgcagcgtgttggtggtcggcgccaccgccgtgatccagaaggtgaagcaaggaaaagggcaaccctcgccctggctggtcgagcttctcaggcgcaagccgcccaagctcgcggccatcgcgctggccaacaagaatgcccgcatcatctggaagctgatggtcagcggggaacgctacaatccagcgcgcgccgtggcggccaggggcgagggggtggaggtcccatcctgcacaagcgtgacaccatgctcgccgccgtcaaggacgctgcgcgccgccgcaggcggtggcccaagagggccatccttgaccgcggctgcgctcggtgtcactgggccacggcaggtcgggacgcagaaacggcctcaggtcgaacaaagaaactgaccttaaagaagctggagaacgtcgctccagccgccgtctagcggtcaactcaacccccagaagcggacaattgatgtgctaccaaaacctgacaacttgaaaagctaccgacagccataaccagttcaggtgagtgcgactatcgcctcaccctgaggccggagcttgctcgagagggagcagatggtgcgatcgatcgatccgagacgtgagacactccgtgcaatccagtggcaatcttcgaaaccgccatactgtttggaactcatgtcgcgaaacccatcttggcagcggtcatgtgcgaccgcatcaacagaccggacatatgatcgcaagcgatccgatccgcgcgctgcacctcctcttgcgggccgggggccgtccacata

SEQ ID NO: 8101 - DNA, 1258 bp, unidentified
  source 1..1258: mol_type = unassigned DNA; note = element_cae7fc0
  misc_feature 1..2: note = core
  misc_feature 3..204: note = LE
  misc_feature 205..1122: note = CDS
  misc_feature 1123..1258: note = RE
  misc_feature 3..227: note = bridgeRNA
ctcgtattataaagtagtagtgtttatagaccctctccaaggtctgtatgctatactgttttagatactgtggattagtttgatacccctaccactagatggttctcgaaaggttctaaccacagtctctttgttaatttgttaatcagttagataccgcatgacggtttatgtagaacgaggttacaatcgcaaggagtacccgtggttctaaaacagtatcaaattatttctaatgaggtgctttctatgattttagttggtattgatgtcgcgaaagacaagcacgactgctttattatgaattcagatggtgaaattcttgctaaagcttttacttttcccaatactcttgaaggttttaattttcttaaggttcaggaacgtgctaaactgaaaacttctgtttctcgcttagtacaaatactttttcctgagcttgaaaaactagtaccaacgcttcacataccttccatgtatcgtttattagaagaatatcctggagcgtcttatatagcttctgctcatcttactaaacttactaatctattgagagaatcttctcatggtcattataaccgtgatacagctattaaaattagagaagctgcaagaaattctattggttctgttatgccagcaaaatcacttgaattaaagcatactattaagcttattcgtgaacttagtagtgaaattgatgaaatagatgctgagattaaaataatgatggaagaaattgcttctcctattactactattcctggtattagttacaacatgggagctatgattatttctgaaataggtgatttcagccgtttttcgtctcccgataaagttcttgcttacgcaggagtctctccatctacatatcaatccggaaggattgataactgttattcacacatggaaaagagaggctcacgatatttaagatatgccttatttattgctgcacaatatgtctgttgttgggataataccttttcagaatacttatctaagaaacgatcagaaggcaagcattattttgtagcaatatctcatgctgtaaagaagttagtacgtgttatttttcatttagaaagaaccaggcagccttatctaaaagccgcctaaatataataaattcaatactgtcttttagagcaccagcaatgatgctcttttggtcatgcagttttttgattaattgtattattgatatatttttttcaaaaatagcttatttatatcttgactctttatagttagt

SEQ ID NO: 8102 - DNA, 1338 bp, unidentified
  source 1..1338: mol_type = unassigned DNA; note = element_caea550
  misc_feature 1..2: note = core
  misc_feature 3..70: note = LE
  misc_feature 71..1093: note = CDS
  misc_feature 1094..1338: note = RE
  misc_feature 1072..1318: note = bridgeRNA
cgttggggtggacggccccgcggcatctggtgccaaagttcgctgtcaacgctgaacaggagagccgtccatgacagagcttacgcgagttgctgtggatacgtccaagtctgttttcaccttgcatggggtcgatgcgcaggaccgtcctgtgctgcggcgcaatctcaagcggggcgagttcgtggcgttctttgagaagctggcgccggtggaggtggccatggaggcgtgtgggggctcacaccattggggccgcatgctgacgaagtatggccatcgcgttcggctcattccggcgcaatatgtcaaaccgttcgtcaagcgcggcaagaatgaccgcaacgatgccgaggcgattagcgaggcggcggcacggccgggcatgcgcacggtggcggtcaagtcagccgacgcgcaggcgggcgccatgctgctgtcggtgcgcgaattgctggtgcggcagcgcacccagctggtcaacgcgctgcgtggccacgccagcgaaatgggattggtggcgccggtgggcaacaaagggctggcaaagttgcaggccgagatcgcggccgacgcgacgctgccggcggcggcggccgaggcgcttggtttgctgggtcgcgaaatcgatcggctggaagcacggctggccgaggtagaggccaagttgaacgcgcaacacaagaaagatgccgacagtcgtcggctgagttcgatgccgggtgtgggaccgatgattgcgctgaatttcgtcctgcgggtggatgcatcgcaattcgaatcgggtcggcatttcgcggcctggcttggcctggtgccacgcgaacgctccacgggaggcaagacgcggctgggaggtatcagccgcgcgggtgacgagcggttgcgccagcttctggtcctgggggccaccgcggtgatcaagactgccaaaccgggacgaaagggtgtctcgccatggctgttgaaattgctggagcgcaagccgcgcaaggtggcggcggtggctctggccaacaagatggcccgcgcgttgtgggccatgctgacgagtggggaagcgtatcggccggctgtgctggccgcagcgtaaccctgttcgtcatgtcgctggtgtaagaggctaacaggagaagatgctgatcggtcgaaccgatgatccacagaacccgcgtagggtggcggccttcgaggtcactaatccgtttgggtgtggatcgcggaacccatctgggccagcggccgtgcgccgcaccaacaggccggacacacgactgctctcgcaccagatcagatttcttttcccgtaccccttgcgccaaaagggccgtccacaca

SEQ ID NO: 8103 - DNA, 1562 bp, unidentified
  source 1..1562: mol_type = unassigned DNA; note = element_caee69e
  misc_feature 1..2: note = core
  misc_feature 3..269: note = LE
  misc_feature 270..1445: note = CDS
  misc_feature 1446..1562: note = RE
  misc_feature 5..247: note = bridgeRNA
cttgtataatggaactatagtaattccattaaattattttcttttcttgattattttctatataatcttttatagacgctgtggattagttttccctcctacagcagctgtaaaaaacagccgactgttgcttttaggctctaaccgcagctctatgtttatttgttaattagttagataacgcatgacgttttatatatagcaaggatacattcaacatagagttcgtggaaacatagcgtataacatttacaaaggagatatttactatgatttttgttggtattgatgtttccaaagcgaaacatgattgttgcatcatcgattcaaatggctcagttattactaattccttacgtgttgataattcaaaagaaggttttgaatgcctgtattcaaccatcctatctgcacttaattccaaggatcttagaaatgtaaaaataggacttgaatcaacaggtcattacagcactaatatcacaaattatctgtattccaaaggctttcaggtacacaccttaaatccattggctactaatctttttcgtaaggctggaacccttaggaaaactaaaacagataaaactgacgccaaagtcattgcgactatgctcttttctgatgaatctaaatcctattcaccagtatcatatcagattcaagagctaaagtcactaacaagacacagatttcgtttaattggctaccgttccaaacttaaagtttctgttacaagattaattgatattatttttcctgaattaccatgtcttttttggtcaatacatcaagcttccagttatgctttattacttgaattaccatcacctaatgatattaagtcttgtcatttaactaaacttaataatattattactaagtcttctaatgggagatatggtaaggataaagctcttgccttaaaagaattagcatctaattcaattggttctgctaatcgttctgttgcttttgaattgcaacaaactattcgtctaattcattctgttcaaaatgaaatagatattttggacaagcaaattaaaattgttgtagatgaaatcaattctcctattattacaatccctggcatcgggtataccttagccgctatcatattggctgaaattggcgatattgaacgtttcttaacacctgctaagcttttagcttttgctggtatggagccttctacttatcagtctggtaaatttagtgcttccaatactccaatggtgaagcgtggttctacttaccttagatgggctatattacaagcagctcgcttagtccctatgcgtgattcaactttttcagcttatttaactaaaaagcgttcggaaggtaaacatttcaatgttgctcaaagccatgtaggcaagaaacttttaagggtcattttttaccttcttaaaaacattacatttgttccacaaatgtaatgttttaaatattgccatgttttttaggacaacttagttgttctatttgtcatgctcttttttctttaattttttaatattaaattttcaaatttctcttgacttcatatagttagt

SEQ ID NO: 8104 - DNA, 1201 bp, unidentified
  source 1..1201: mol_type = unassigned DNA; note = element_caf5859
  misc_feature 1: note = core
  misc_feature 2..210: note = LE
  misc_feature 211..1176: note = CDS
  misc_feature 1177..1201: note = RE
  misc_feature 35..202: note = bridgeRNA
tcttaagtttaaattctctaaattttgatagttaaccagaaagaacaaaagagaggagtaaggttatatgaaccgtaggaacttaagattccgtcaacattgataatcccctctcttttctactttaatttcgtttagttctatgagacgtggatctcgtttttaagtcgatgaaaaccaaagtaggtgtcctttcttaatcaatttcttatgaataaaaataatcaaatttatggagtagacatcagtaaaggagtatttgatgtggtcaactccacgggagaacattttcaattcaaaaataatgtctcaggctttaaaagttttttaaagattttaataaaagaagatctggtggttatggaagctacgggatattaccattataggttagcacaatttctttatgagaaggggatcaaggtctcggtagtaaaccctttgtctgtgaagcgttttatccagatgaaattatcaaaaattaagactgataagtctgatgccaaagcgatatgtgaatatgctagcaccaatgaagttcctttgtacacagcaagagacaagagtcaggccgaggctctgcaaatacttcgtttaatagctatctatacaaagcagagtaccgctttaaagaataaacttcatggagaaaaggtacttggtaaaccttcaaaagtagtttatcactcgctcaaccgatcgcttaaagtattgcaaaatgagataaaaactttggagtccagattaacagagattgttaaggatgatcagcaaaaacaactgacgcttctaaaaagtatacctggattgggtaataaaacagccataatgttaatagtgttaacccatggttttaccagctttgaggacgcaagtcaattatgctgctatgctggaattacgccaaccatccgtgcctctggatctagtgtacgaggtaagagtaggatcagtaaaataggaaatccaaaacttagaaatctactctttatgtgcagttttacagcctgcaaacacaataaagcctgtagggatatctatgaacgaataatagccaagggtaaaagtaagaagcttgcgcttattgctgtatgtaataaactattaaaacaggcatttgctgtggctacatcaggtttaccatacgatgaaaattatgcgtcaagattaggataaaatgcttggaagttagcttagttct

SEQ ID NO: 8105 - DNA, 1554 bp, unidentified
  source 1..1554: mol_type = unassigned DNA; note = element_cafa773
  misc_feature 1: note = core
  misc_feature 2..263: note = LE
  misc_feature 264..1439: note = CDS
  misc_feature 1440..1554: note = RE
  misc_feature 1..244: note = bridgeRNA
tgtatgataaatacataaagtatttattatacaacctcctttcatagtttattttatttattattttttatataatttatttatactgtggactttttatatttcactaaagagcttagctactttttaaaggagactactgccacactcttttaactcatatacttatagttggataagtctttaaactttcatatatcgcaagaatgtattgttttttaagatgtggataccacagttattttttttaaggatgtgattttatgtttttactaggtattgatattgctaaacttaaccatgttgcttcttgtattaattcttctactaatgaagttattttttccaattttaaatttaaaaatgattttaaaggctttagcgcccttttagataaaatcaaaagtcttgatgttaaaaatcttattattggcttagaatcaacttctcattatggagaaaatcttatcaattttttatttaaacaacattttaaagtagcgcttattaatccattacaaacttcacatctaagaaaagccaatattagagatgctaaaaacgacagactggattctcttaatatcgctagatctctaatttttggtaaacttaattttgtttctgagaaaaatattgattgtttttctttaaaaaaacttactaggtttagaagtaatctaattaagcaaagaagtaaagctaaaattcaattaacatctttacttgatttactttttccagaattacaatatctttttaaaagtaaaattcatagcaaaacaatctatactcttcttaaaaaatatccttcagcagaggaaatagcagccctaaaagatgatgaaatttctaatcttttatatgcttcttcaaaaggacatttcaaaagagaaaagtccattgagcttaagagtcttgctaaaaccactgttggaattaaggatacttcagtatcattacatgtaattcaactaatagaattaattgaattatttgatagacaaattaaagatattgtaactaaaataactgatacagttaataaattagacacaaagttactatcagttcctggaataaatattattgcctgtgcgataatattaggtgaaacaaataattttgataatttctctaatgctacaaaattactcgcttttgctggtcttgatccaaagataagacaatctggcaattttagtgctacttcctgcagaatgtctaaaaaaggttctccatatttaagatatgctttaatttttactgcttggaacaccgttagacattcagaaaagtttaataaatactattgtttaaaacgctcacaaagcaagtcacactacaatgctcttggacatgttgcgcataaattagtgagagttatatttacattgataaagaaagacatttcttatcaagaagaaaaattagaatagtatttattaagttttaactatctaaaaaatcaagagtttagaaactctagttttgttatgccaaaaattcttatttaaattttttttaaaaaagttcttgacttttcatagttgg

SEQ ID NO: 8106 - DNA, 1660 bp, unidentified
  source 1..1660: mol_type = unassigned DNA; note = element_cb0298c
  misc_feature 1..4: note = core
  misc_feature 5..255: note = LE
  misc_feature 256..1464: note = CDS
  misc_feature 1465..1660: note = RE
ctcattggtgcaccttggcttgcgaacacatcacggcgtacgcggtgatgtatttgcgtcccggtgtcttccgcgatggcccgtctggctcgccgcttgacggcccacatgagacccgccgcgcggaaggcgctgggaggttgcgacgggctacagggtgaagcgccaggttgccgacgccagagcgccggtcaatgagcaacccgcaagacctcccagcaagggaaactctagtccatcctgggggaaggtgacatggcctattgcgggggtcttgattggggcagtgccgagcacgggatctgcatcattgagcacgacagcggcaaaatcatcgcgcgattcccagtgccgaacgatgcggccggtattgccgatctgatgcgacgtttggcgcggctcgcgccaccggccgatttgccgatcgcaatcgagcgaccaagcggtctgatcgtcgacgcgctggtagcggccgaccatccggtcgtgcccatccatcccaatgtcgtcaaggccagccggccgcgctatcgcgccgccggcggcaagagtgaccgcagcgatccctacctcctggccgatctgctgcgtaccgacggccaccgctttcgccggctcatgccctgctccgacgagatcaaggcgctgcgtgccttggtccgcggccgcgacgcgctggtggcgcagcgcctcgtgcttgccaaccagctgcgcgccctgcttgacagcttctggcccggcgccgtggcgatctttgccgacatcgacagcccgattgcgcttgctttcgtgcagcgctatcccacgccggacagcgctgcacggctgggcgagaagcgcatcaaagccttcatggcgcagcatcgctattgcggccgacgcagcgccagcgagctttggcgcgcttgcggcgcgcaccgccgggtctggccggcgacagcgaagccgatgccaagggtgaactcgtgcgcgcctggaccgccgtcctcacccgtgctggtcgctcagatcgccgagctggcctcgcgcattgaacacaccatcggcgaactgcccgatggcaaaatcgtaacctccttcccacgcgccgggcgcatctgcgccgcccagatcctggccgaactcggtgacgtacgcgagcgcttccaggccgaggaccagctcgccgctgaggccggcgtctgccccgtcacccaccaatccggcaaaagccgcggcgtcgtcttccgctgggcctgcaatcaccgcctgcgcgccgccatcacctgctttgccgacaactcccggcatagctcgccctgggctgccgacatctaccagcgcgccaaaggccgcggctgcgaccacccgcatgccatccgtatcttggccagagcctgggtgcgcgtgctctggcgtgcctggcaagaccgaaccctttacgatccggcgcgacatcgcagctctcgtgcaagcgctgcctaaccccggcttgaactgcgtttctttgttcgaccgctgcggccgtttcttcgtcccgaccggcaatccaccgaccaggatgacggcggcggggtcaaagagcgccgaaggcgaccggcggcgccggcgcgaagcgtctttgatgccgccgccgtcatcctgccaccctgccgcagcgagggaccttgacacagggtgt

SEQ ID NO: 8107 - DNA, 1390 bp, unidentified
  source 1..1390: mol_type = unassigned DNA; note = element_cb0a1ea
  misc_feature 1..2: note = core
  misc_feature 3..89: note = LE
  misc_feature 90..1121: note = CDS
  misc_feature 1122..1390: note = RE
  misc_feature 1092..1373: note = bridgeRNA
agatggggtggatgccgctctctcccctacggcgtcgcaatgcgccaagcttgtgatgctgaagtcacaagagaaacaagagggcatccatgaaggaaattagcatcatcggcgtcgaccttgcaaagaacgtgttccagctgcacggcgcggccgcggatggttcggtcatgtttcgcaagaagctgtcgcgcccgcaattccagcgcttcatggcggagcatccgcaatgcctcgtggtgatggaggcctgcggtggtgcgcatcactgggcgcgggaactggtgcgggtcggccatgaggtgaaactgatcgcaccgcgctatgtcaagccgttcatcaaacggcagaaaaacgacgcggcggacgcggaggcgatcgtggaagcggcgctgcgcccgaccatgcgctatgtcgagccgaagaccagcgaccagcaatcgcgctctatcctgttccgcacccgcgagcagttcgtgaaacagcgcacggaagcggtcaatgcgctgcggtcgcacctgtacgagttcggcttcatcgcgcccgaggggatcggctatcttccgcgcctcgacgccctcatcaaggacgcaaactccgatttgccgccgctcgcccgggaaatctgtagtgaactgctggaccaggtcgcgcatctgaccgcccggataaatgtcatgaaaaagaggatcgacgcgattgccagggaaggcgagacatctcgccgcctgcagaccatgccgggtgtgggtccgatcagcgccttggccgtcgagaccttcgcgccgccgatggcgcagttcaaacgcggccgcgactttgcagcttggcttgggctcgtgccacgacaggcgtcgaccggcggcaagcagcggcttggaaaaacctcgaagatgggccagcgcgacattcgccgtctgctgatcaccggcgcgatggccgtgatccgctgggccctgcgccgtggcgcaccgcaaaacccctggcttgagcgcatgttggaacgcaagccgccgatggtcgcggccttcgcactggccaacaagatggcgcgcggcctctgggcgatgctcacgcgcggtgaagactatcgcgatccggtgatcgccagcgctgcctgatccggcatcaaaacgcgaaaacggaacgcagagttgtgaggaaggcatgatccgaatgggcaaatgatcgacatgatccgggttgggcaaaccagaaaccttctcagagcttcgagctcgctgttggagatttggccccggtccgcgcatctccatctcggccagcggcatctatcaggccgcgctaacaggcctgacaagagtccgcactcgatcacatgtctaaggttcagaaattccttgcaaatgagggcggcatccacaagaga

SEQ ID NO: 8108 - DNA, 1171 bp, unidentified
  source 1..1171: mol_type = unassigned DNA; note = element_cb0b97b
  misc_feature 1..3: note = core
  misc_feature 4..205: note = LE
  misc_feature 206..1168: note = CDS
  misc_feature 1169..1171: note = RE
  misc_feature 7..181: note = bridgeRNA
ctcgcttgtatgtttagacttgaaggggtgggtgggactaaagctcgtcatctgactctgaccagtacagaccgtgggagacttcgtcccaccccttcacctaatgcgccgataaggaatgcatcggctcggaccgacgatagaaacaagccagcgcaacggtgaaccccaacaagtctttaaaccctagctcggagggtgggccatgacaatccttgattctcaggtggtcgttggtgtggatgtggcgaaggacgagattgttatctatcgatccgacctggaacgaacccgaaatgtcgcgaacaagcgatcagccctgaagcaatggctcaagacgctacctgcgaacagcgctatcgcgcttgaagcgaccaatatctatcaccttgatacaacggaaatagcccatgaaatgggccatgacgtttatgtcatcgatggctgtcgcctcaacaaataccgcgacggaataggcatgagggcgaaaacagatgccttggatgccgaactgctggcgcgttacttgagcagggagtccgacagactgaggatctggagtcctccgccgaaggcttacacccaactcaaaagcctgcttcgtcgccgggctcagttggtccggggctgtgtcgcactcaagcaaagctggaaaaacgaacccctgctcaaagaacagttcaagcagcttctggccgccattgcccagttcgaaaaaacgattcagaaaacactcaaggagattgctgaggacgccgggatgcaggatcaggtgaagcgctgccaggccgtcgagggtgtcgggctcctgacagccacagcagcggccacagcgtttttgcgtggaaaatttgctaacagcgacgaatacgtggccttcctcggcatggatccgcgggtgaggcagtcaggacaaaaggatcaaaggcgtcgactctccaagcgaggagactcggagttccggcgcctgtttcacaacagcgccatggccgccagccgttcgccgatctggaaaccgtactacgagagttatctggccagaggcctaaaaggtactcaagccttggttatcctggcacgcaagctggccagagtgatgttcgcgttgatgaaaaaccaaagtgaatacaagcctaattctatgcttgggggttccccccaaacatagaat

SEQ ID NO: 8109 - DNA, 1628 bp, unidentified
  source 1..1628: mol_type = unassigned DNA; note = element_cb1a52e
  misc_feature 1..3: note = core
  misc_feature 4..276: note = LE
  misc_feature 277..1488: note = CDS
  misc_feature 1489..1628: note = RE
  misc_feature 14..299: note = bridgeRNA
tctattacaatataatcagaccggaaagccaggcagccagtctggctttcatctgtctttagcctaagctacaataagaggagtaaccgactgacctttcctttctggggcttccatgtccgtaattaagacagtcagccatcctcttgttgtagcattcgatttgagcaggtagagcctacccgtataccggagtgttcgtgtcacccaatagatagaatcggcagcaagaaaaagatggatcccggttgcggaaaattgtattggagtgattttatgaacaactgtgtaggtattgatgtgtccaaggggaaaagcatggtggctatcatgcgtccttgtggcgaggtagtggctctgccttttgaggttcatcacacctcttatgaactgaccaagctttcaaagcagatcagaagtcttgagggtgagactcgtatcgtcatggaagccaccggcaattaccatttgcccatagcgcagtggctttcagacgacaacttttatgtttcagtagttaatcccattctcattcataactacgaaaacaactcattgagaaaagtcaagaccgacaaaaaagacgcaatcaagattgcaaattacggtcttgatagatgggacaagctgagacaatttatcccaactgacgaaatacgcgcgttattgaaatgctgctgccgtcaactacagcaaacatcaaaggtacaaaccatgctgaaaaacaaccttatttcactgcttgataacgtattccccggagttaatgaattgttttgcagtcccgttagaaaagacggcagtgaaaagtgggtcgattttgtagctaagttctggcactgtgaatgcgtttgcggtctttctccgaaagctttcagcgaaagataccggaaatggtgcaataaatgtggttaccattacagtgaagacaaggctgaggatatttacgtttctgcatgcggtcatgtctgtgttatgcctaaaaccgattctacaaaacgaatcgtactcggggctgtttctcaactacaatcagttacaacttcggtggcaaaactaaaagctgagatgacctttttagccgaacagctacctgagtatggtattgtcatgcagatgttcggtgtcggttcttcgctcggtccccagctcatggctgagatcggcgatgttcgccgttttgcttccaagaaatctttggtcgcttttgcgggaatcgattctccgccttgcgactcgggtaagatttacggcaatcaccgctcaatcaccaaacggggatcagcgtctctacgaaggacattatttattctgatgactgtttaccttcaacgatctcctgtcaatgaacctgtttaccaattcatggacaaaaaacgttcagagggtaagccataccgtgtttacatgatggcatctgccaacaagttccttcgtatctactatgctacggttaaaaaatacttagattccttagaggaaagctaaacccatacctttattaacctattcggttcgccgcctcctctgaaaaatgaggtgctcagcggtcagctttgttatactcttttatctgctaaacaaaattttcatttttctcaaatttttacttgacttttgttagcagg

SEQ ID NO: 8110 - DNA, 1520 bp, unidentified
  source 1..1520: mol_type = unassigned DNA; note = element_cb1c22c
  misc_feature 1..4: note = core
  misc_feature 5..259: note = LE
  misc_feature 260..1510: note = CDS
  misc_feature 1511..1520: note = RE
ctcactggtgcaccatccttgtgtcggtgatcttggatgggttgccgatgcacccgaggtgccgtcggatcactgccacaagcgctggacgctgtgacgtccttgatgagttttgcaggacccggcggttacccggggtgtgctgaccgtcgacagggctgagcgccaccgagcgccgaacagtgagcgatccggccgccgcgccccggcaccgaagtttgggtgcctccccactgggactagcagcgaggaggctgtgatgaagtatgccccaccggtgttggcgccgaaacccgccaacaacatgacctgcggaatcgactgggctgggcgcgatcacgcgatctcgatcgtggatgcccgtggcagcgagatccatcgaagcgccgttgagcacaacgctgtcgggctgcgagttctgctgggtctgctggcccgcatgggagtcagcgaggtagccatcgaacgccccgatgggccactggtcgaggcgctgctcgacgccgaggtcaccgtcgtggtgatcagccccaaccagctcaagaacctgcgcagccgctacggctcggccggcaacaaagacgaccggttcgacgccttcgtgctggccgacaccctgcgcaccgaccgcacccgactgcgtcccctggtgcctgacaccgcggccaccaccgcgctgcgcaccgcctgccgggcccgcaaagacctcatcaaacaccgggtcgcactggccaaccagctgcgtgaacacctcaaccgcgtctttcccggtgccgtcggattgttcagcgatctcgactcgccgatcagcctggcgttcctggcccgattcgactgccaagaccgcgccgactggttgacccccaaacgtctgagcgcctggctggcctcggtcggctacaccggcggtaccgatcccgctgtgttgcacgcacacctggccagtgcgcctcacggcatcaccggcgagcacagccgcgctcatgccggcgtcaccgccgccctggtcaccagcctcaagaccctcgtcgcacagatcaaggtgctgtaccgccagatcggcgaccagctcgacgctcacgtcgatgcgcacatcttcaccagcctgccccgcagcggaactgtcagggccgcaaagcttgtcgctgaaatcggcgactgccgcgcacgattccccacccccgaatcgctggcctgcctggccggggtcgcaccgtcgacccgccaatcgggcaccatgcgttcggtcggattccgatgggcctgcgataaacacctgcgcgacgccgtcaccgacttcgccgccgattcccgcgccgcgaacccctgggctgaaaacctctaccgccaagcccgatcccgcggacacgaccatcaacacgccgtgcgcatcctggccagagcctggctctacgtcatctggcactgctggcaagaccacactgcctacaaccccgaccgacatggggccctgcaggcattcctgcgaagccaaccacccactgcttgacacagggcta

SEQ ID NO: 8111 - DNA, 1354 bp, unidentified
  source 1..1354: mol_type = unassigned DNA; note = element_cb2c168
  misc_feature 1: note = core
  misc_feature 2..72: note = LE
  misc_feature 73..972: note = CDS
  misc_feature 973..1354: note = RE
  misc_feature 1112..1344: note = bridgeRNA
tatgggatggcccgccctttcacccagcatcgagtacagtgctggcattcggaaagcgaaaggaacgagccaatgtctattgctattcttggaattgatctgggcaagaactcctgcagcgtggtcggcgtcgatgcggcgggagctgtggtcgttcggcgaacaatgcgtcgacagacgctgatcgactatgttgtgaagcttcctgcttgtgtggttgcgatggaagcatgctgcggcgcgcatcatctcggtcggctgtttgcagaacagggtcaccagatccgtttgatgtcgccggaatacgttcgtccgtatatcaaagctcagaagaacgatgaccgcgatgccgaggggatcgctgaagccgcctcacgaccaacaatgcgcttcgtcgaactcaaaagtcagaagcagttggatatccaaacgctacatcgcgtgcgttcccgccttgttgcggagcggacaaccctgctcaaccagatgcgggcgatcctactggaacgtggtgtgatcttccctgccggcagaagaaggtttgagctcgaattggattccatgctttctgagggcagcgagacactgtcgcaacgcatgcttcagctgattaagggactgcgttccgaatggaaggaactcgacgcaaagatcggaacgctgaacgaagagtttacccggttggctcgcgacgatgccgccacgcgaaggttgacctcgatcccgggcatcggggtgcttaatgcaaccgctttagttgcggcggtgggcaatgccagcagcttcgccaaagcccgagatctcggctcctggcttgggttggttcccaggcaatacagcaccggcggtaaacctcggctgctggggatatcgaagcgcggcaatacatatctacgaacgctactgatccatggcgcccgggcggcattgccatcgctctcgaagagcgacacgccgctgggcgatggctgaaggcaatgatcgagcgaggtgtacaccgcaacgccgtcgttgtggcactggccaataagctggcacgtatcgcttgggccgctctacggaaggaggcgacatttgaacgtggctacctggtggcgacggcatagggcctggaacatgctatcgcgcacgtagctcaaagaggtttgcaggaaggatcgtgaagatggcctgacagttgaccggcgttcggaaagcccgattaaaaaaatggcacgtggtgccgacggacttatggggctctgaacgtggcggatgtccatcttggccatgggagttacccatgagaccgtatacgttgacgcagactgatcagaacaccgtataatcctcttgcagacgggcgggccatacg

SEQ ID NO: 8112 - DNA, 1615 bp, unidentified
  source 1..1615: mol_type = unassigned DNA; note = element_cb3092f
  misc_feature 1..3: note = core
  misc_feature 4..585: note = LE
  misc_feature 586..1482: note = CDS
  misc_feature 1483..1615: note = RE
  misc_feature 8..232: note = bridgeRNA
tttcgtattataagatcaactagaaatgaaaatatttctggttgatcattttttatatcgatatatgataaccgtagccggggtagaacgtaagcacccgtgggacttgatcccgtcaactaaaccgttcgccccctacttgtagaaacatgattgaggctggttgggacgttgatctcgtataacaagcgatgctatgatactgcaagaagggattaggggtgccggcaaatatgatttaggaggagaagccaatgaatccagtggttggactggatgtagccaaaggtgaaagccagatacaagctttcctggataagaaaaaaccttatcaaaaaagctttaaagttaaacacactcttgaaggtctggaaaaactgcattcctttctctcagatgtagagagaataactggggtaaaacctccattagtcatggagtcaaccggtcactatcatactccggtagtccattattttgaagaaagaggatacttgatcattattgttaaccctttagtctcatatcgggcaaagtttaagaaaggtaaagacagatataattgatgccaatcatctctgcgagatgtattacaaagaggatttggaaccttataaaaaacgcggtatccagctcttgaaccttcgaaacctgactagacagcacgaaaatattacggggatttatgtgcaaacaaaactgcaattccaagccgtcttggatcaggtgtttccagtatatagaggagtgtttggggacttatattctgttgtctctctactcaccttacttgaatttccaacatctcaaagtatcttagaagcaggcgaagagacagttactaacacaataaaaaagttatgtccaaggcgctccatcaagtgggctaagacaaaagcaatagcccttttagctgccgcaagccaaaatccctttagggaaaatctctaccaaagccacattttaagcgtggaaatgtatataaaaatgcttctggaatatcaaaagcatctatccaaatttgaagaagagatagatgccttggcaaaagatattgaagaatataaaatcatccaatcaatccctgggatcggagaaaagatcgctgcaacgatcatttccgaaattggcgagattgaacggtttgatcaccctaaaaagcttgtcgcattcgctggtattgacccgagtatctttgaatcaggtaaattcagaggaaccgtaaacaggattaccaaaagaggttcaagccgacttaggcatacactgtatatggccgttaggtgtgctattcgggattccaggaaaagcaaaacgacggaggaactaatccctcgcaataaaaggttgagagaattctatgataaaaaacgggaagaaggaaaaccctttaaagtagcaataatagcctgtgccaataagcttttacaatggatttatgcccttttgaaaagcagaacgactttccaagatctagcttagctacccaaatggactaataaaagcaaaaccttccaaacatccaggttaggaaggttatttggcatgcttatttttagcataccataatataaaattctatttcattgaaaaatgttgacaaactattagctgg

SEQ ID NO: 8113 - DNA, 1425 bp, unidentified
  source 1..1425: mol_type = unassigned DNA; note = element_cb3247b
  misc_feature 1: note = core
  misc_feature 2..127: note = LE
  misc_feature 128..1147: note = CDS
  misc_feature 1148..1425: note = RE
  misc_feature 1187..1425: note = bridgeRNA
aattgaaatgaacgcgtcccgccggtgaacgtgagagcagaagaatgaggtggatcctcacgggccaacggcatcgatgtgcccaggtggaaaatgcacgcatttcccggcaaccggaggatccacgatgaacagtatggccgtgggcgtagacatcgccaagcaggttttccaggtgcattacgtcgaccgggaaaccggggaaatcgtgaacagacagatcaaacgggccaagtttctcgaacacttcgcgaaccgcgcgccctgtctgatcggaatggaggcgtgcggcggcgcacaccactgggcgcgagaactgacaaagctgggccacgaggtgaggctgatgccggcggagttcgtgaaggcgttcaacatccgtaacaagaacgatgcggcggatgcgcgggcgatctggctggcggtgcagcagccgggcaagccggtcgcggtgaagaccgagatgcagcaggcgatgctggcgctgcaccgcatgcgcgagcagttggtgaagttccgcacgatgcagatcaacggactgcgcgggttgctcacggaatacggcgaggtgatgagcaaagggcgagcggcgctggacaaagagataccggccgcactggggcggatcgcggcgcgtctgcccgcagcgctgatcgatacgctgcgggaacagtggaacgggctggcgaggctcgacgaacagatagccgagatcgaacgccggatgcgcgaatggaagcagcaagaccgggccgtgaaggcgatcagcgagattcccggggtggggttgctgacggccaccgcagcggtggcgatgatgggcgacccgaaagcattccgttccgggcgggaattcgctgcgtgggccggcctggtgcccaagcagaccggctcgggcggcaaggtgaacctgcacgggatcagcaggcgcggcgacacgtatctgcgcacgttgctgatacacggtgcacgcagcgtattgacgcatacgaaggaacccggcccgtgggtcgagcagatgaagcagcggcggccgatgaatgtcgtgatcgtcgcgctggccaacaagatggcgcggatgatctgggcggtgctcgcccatgagaggccgtatcggaacgactacgtgagcgtgaagccggcctgaacggcttgctcaaggtagaagatcaacatttaacacagggtgaacgtcgaaaggttgcgcagcgatcgagtgtgatgacaagccaggtaggaccgagactcgctaaacctgaatgacgcgacgagcttcgagctcgccaggagaatgaggtgcgagtcagcgtatttcatcggggcccgcagcggcagaaccggctgcaacaaggccggatatagagctgcagcccaccctgtctgtctgagcatacgaaaactgttgcaaacgggacgcgttcatat

SEQ ID NO: 8114 - DNA, 1446 bp, unidentified
  source 1..1446: mol_type = unassigned DNA; note = element_cb3ac2d
  misc_feature 1: note = core
  misc_feature 2..88: note = LE
  misc_feature 89..1129: note = CDS
  misc_feature 1130..1446: note = RE
  misc_feature 1203..1441: note = bridgeRNA
taatgtaatggacgcccgctttccagaacggcatcaaagtgccaaagtggagactgttaattaaccaccaaaggaaggggcgtccaaaatgaagattactacgataggcattgatttggcaaagaacgtattccaactgcacggcgtagatgcgcgcggtcatgctgtggtgcgtcgcgcgatgaaacgagacgatatgctgccctacttcgccaaccttgaaccgtgcctgattggcatggaagcttgtggcagcgcgcaccactgggcacgcaagctcggcgcattcgggcacaccatcaagctcatggcaccccaatttgtgaaaccttatgtgaagagcaacaagaatgatgcgcgcgatgccgaagccatctgcgaagccgttacgcgtccgaacatgcgcttcgtcccgatcaagaacgccgaacaacaagccgtactgtcactgcatcgggcacgtcagggattcgtcaagtcacgcactgcacaaggcaaccagatacgcggcctgttgagcgaatacggcatcatcatcccgcaagggattgccagcattcgcaaacgcattccggacatactcgaagatgcggagaacggcctgcccggcaaaatgaggactctgatcgaccgtctgaccgagcatctcaaagaaattgacaaccaagtggtcgccttggagcaagaaatcaagcagtggcatgccagtagcgaagccagccaaaagctatcagccatccctggtatcggccccctcacggcgagcgccctggtggcgacaatcggcgatgcccggaacttcgccaacggacgagaattggcagcctggctgggcttggtgcccaaacaacactccagtggcggcaagtccgtgttgctgggaatcagcaagcgcggtgacacttacctgcgcaccctgctgatacacggtgcccgttcggtgctccagtatgttgagggcaagcagggtaagacgaacgaatggttgcagcacctgctggcacggcgcaacaagaacgtggcggcagttgccttggccaacaagaacacgcgcaccgtgtgggcgctattggcccgcgagcgcacattccgaccggactatgttgcggtacaacccaccgcagcatagtccggtcggttgaataaaagcacatcggaaatgtccggtgatttgagcacagtagctgcaaaacaagaaggagcgtttccaccgattgcacgggcaatcatgaagtgatggcagaacaggttagaccgtggccgggtaagctcgcaatcgtcatcgcacttaaagtgcgccggaatgatagagccccagccagtggattccatcagggacagcggtttagaaccgcaatcaaagtccgaatatatggctgcaatctttaaccttgcttctgttcaaaaccgattgagtgctgttgcagttctgggggcgtccatata

SEQ ID NO: 8115 - DNA, 1421 bp, unidentified
  source 1..1421: mol_type = unassigned DNA; note = element_cb3c5e6
  misc_feature 1..2: note = core
  misc_feature 3..90: note = LE
  misc_feature 91..1131: note = CDS
  misc_feature 1132..1421: note = RE
  misc_feature 1191..1417: note = bridgeRNA
ataatgggatggtcgccccctccctaaacggcatcagctgtgccagagtgaagagtgtgacgtgtcactcaaactagagaggagacgacaatgaagattacaacaattgggattgatctggcaaaaacggtttttgccgtccatggtgtcaatgcccacggcaaggcggctctcaaaaagcagctcaaacgtaatcaaatgctgacgtttttcgccaacttggagccttgcctcatcggcatggaggcctgtggcagtgcccaccattgggcccggcaattgaccgctctcggacacacgatgcgccttatggctccgcaattcgtcaagccttatgtcaagaccaacaaaaatgatgccgccgacgccgaggccatctgtgaggcggtggcgcgtcccagcatgcgtttcgtgccagggaaaacagccgagagccaggcacttctcgcggtccaccgcgcccgccagggattcgtcaaagcgcgcaccgcgcaggccaatcagatccgcggattgctctcggagttcgggcttgtgatcccacagggcatcacgtctatcgcccaacagattccgaggatcctggaagatgccgagaacggcctacccgacaccatgcgcccgttgatcgcgcggctggccgcgcacttaggtgaactcgaccgccaagtcgatgaactcgaagcccagattcaagcgtggcaccggcagaacgaagccagctgccggctccagaaaatccccggcatcggcccaatcacggccagtgcgctcgtggcctccatcggcgatgctaagaacttcgccaacggccgccaactcgccgcctggcttaggtgcgtgccccgccagcattcgagcgggggcaagcccacactgctgggcatcagcaagcgcggtgacacttacctgcggacactcctcatccacggtgctcgcgcggtgatccgggtctccgcaggtaaggtcccaacggacgcttggcttgggcggctactcgatcggcgtcacaagaacatcgcggcggtggcgctcgcgaacaagaacgcgcgcacggtgtgggcgctgctcgtccacgggcgcgactatcgaccggactacgcagcatcatcaacaccagtagccgcctagcgacaccggcgggataaaaacgaggatcgagacacacgggttacacagaggagactctcccaacggttgcttcaggcaatcatgacgtgatggcaagacaggtaggaccgtgaatggcttaatctgacagactcatagcacttcaggtgcgttgaaatgatgagaggccattcagcaaattccatcagggacagaggcgtaagcctcatcaaaagtccggatgtatggctgcataccgtaccttcttgacatcatgaaatgagggcttggcaaactgggggcgaccatgt

SEQ ID NO: 8116 - DNA, 1629 bp, unidentified
  source 1..1629: mol_type = unassigned DNA; note = element_cb458f6
  misc_feature 1: note = core
  misc_feature 2..237: note = LE
  misc_feature 238..1458: note = CDS
  misc_feature 1459..1629: note = RE
tcgtataatacatttatcgttcaattagttaaaataagaacgagttcattaaaactcatagctctcacaaaggttaataataaacaagttttttcctttttgggtaaatataccaacacaataaacgtcttgtgttaacctttaaaaaatcatctataggatgctcaggagaaagtgatatttctacctgttataacacgaagctatgagattttagactaacacaggaggattattatgtattatgttggaattgatgttgctaaagaaaaacattatgtttgtatcttagatgaagatactcaaatagtttctaaacctttttggatttattcagatgtacttggtttaaaagaattaatcaaaaggttatcagacctttcacttaattgtgacgattttattattggagtggagtcaactggtgcatttagtgaaaatatttatgagtttctaagtgacttagattttaaggttatattattaaattcatatcaaacttcaaaatatagagattttagcactatgaaaaaagtgaaaaatgattctattgatgcttatataatagcagagctattatcaagtggaaagtataaacaaagtcatatttctagtgatgattatcatactttaaaagtattaggtagattaaagaaatctcttgatgataagataaagactataaaaagagaaatatcaactgttattgcaactgtaaatccagagataactcatgtatttaaaaatatctttacaaaaacagcattagtaatcattaaagaatacccaactagtgttgacttgaaaaagactactttaaaacgattacttaagctttttcgaggcattaagggtaacaactttagtgaagtcaaagctatgcaattaatagaccttgcaaattcctcaatttataatggtcgtgcacaagatgctcgttctttaatgattaagactaatattaagatattagagcttttatgtcaagaaaaagagaatattgaaaaccaaataaatactttaattgaagaaaatcaagatgatgatttttcatcatcaataaaaaaccttaaaacaataccaggagttgcagataaaacgatatcagcaattcttggtgaatgtggagatttaaaaagatttgattcagtaaagtcttttattggttatctaggtctttatccaactcaatatcaatctggtaattcattatcagttggtagactagcacaaagaggaatacctattgctaagcatgccttatatatgtcagctgtttcatccgttttacataatgatgaattacgtaaaatatttagagataaagtatcagcagggaaatcaaaaaaagaagctttgataatcattgctaaaaaaatagcagcaatcatatattcaatttttaaatataatcagccatataatccaaacagagttttagttccttataggaaataaaatagttagtttaacatttgtgagaacaatgagttgttaatgaacttgacctaaaaatgtatcaatttttatttgatcatttgaatatttttaaaaaatactcaaaaaaacaaacaataaagtaatgtctaaaagaataactattcgtttaagctattctttataggatgg

SEQ ID NO: 8117 - DNA, 1155 bp, unidentified
  source 1..1155: mol_type = unassigned DNA; note = element_cb4b227
  misc_feature 1..2: note = core
  misc_feature 3..207: note = LE
  misc_feature 208..1143: note = CDS
  misc_feature 1144..1155: note = RE
  misc_feature 12..213: note = bridgeRNA
cttgtcttatgctgatctcggctcttgtgcgaagaaagggccagcgcgcgccacgccattcatggcgcgcgctggcggtggctggatcgtcacaggcttggtcgtgacggaccgttttagagtgtgatcagccatcgtcttcgcccggggcctgaacggatacagagcggcacaaagccctctacgacaagcataggacacgcgaagatgagcaaggataccatcggaatagacatctcgaaagacacgcttgatgcgcatcgcctgagcaccggcaccgcagcgcaattcgccaattcgccggctggtctgcgtgcgctccgccgctggatcggggcggaaacgccggacctggtggtctatgaagcgaccggcgcctaccacgccgcgctcgagcgcagctgtgccggcgctctgccgctggtgaaggtcaacccgctgcaggcgcgccgctttgcgcaggcacgcggcacaagggccaagaccgaccccgtcgatgcgcgaattctggccgccatgggggcggcgctcgatcttgcgccggatgcgccggaaggtgaagatcactgcgcgctcaaggagttgcaggtcgcccgcatggcgctggtcaaggagcgcacgcgactgctgaaccgctcgaaaacacagtccctggccctgctcaagcgccagtccaaggcccggctcgagcagatcaagcgccaacttgccgcgctggaagacgcaatgctggaccttgcccgccagtgcgagaggcgcgcacgcgccgtcgacattctgtgctcggtcccggggctgggcagggtcaccgcggtcgcgatcctcgtcgagtgcccggagatcggcaccatgaaccgaaagcagatcgccagcctcgcaggcctcgccccgatgacacggcaatcaggccaatggcagggccgcgcgttcatccagggcggacgcaagttcctgcgcgacgcgctctacatgcccgcgcttgtcgcggcccgccacaatccggacctgcgccagaaataccaagccatgatacaagccggaaagcctgcaaaggtcgcgttgaccgccctcatgagaaagctcatcgagttggccaacgcactcgtccagcaagaccgcgaatggacgccgaagtcggcttgatcaagacggata

SEQ ID NO: 8118 - DNA, 1643 bp, unidentified
  source 1..1643: mol_type = unassigned DNA; note = element_cb4b90f
  misc_feature 1..2: note = core
  misc_feature 3..254: note = LE
  misc_feature 255..1523: note = CDS
  misc_feature 1524..1643: note = RE
  misc_feature 16..325: note = bridgeRNA
ctcctataataaagtcgtagggtaaagatgacctgacagccagtcaggctcttatcccttcattgccaaagctgttagaatagaatggcatggttatgacgtcgtcctccttggacccacagcatattctgcggcgtccgtccgaaagccagtcgtccagccatcctcattcgcagccgttcggtttatgcaggttgaaccgctgttaacagtttcagtgcgttcgtatgataccccaggagattgaataggcaatgagaattctggaaccattgcaaatctttattctggaggaatcagttatgttaaacgcagtaggtattgatgtatcaaagggaagaagcacggttgctgtcctgcagccaggtggggtcatcgtccataaaccctttgacgtaacgcataagtccaaggatcttcatgatctcgcccaataccttggctctcttgaaggagataccaaggttgtgttggagagtacgggacgttatcatgagccgatccggaatactctttctgagactggtctctttgtatgtaccgtcaatccgcatctgatcaagaactacggaaacaacacaatccgtaaggtcaagacggattccgccgatgcaaagaaaatagcccgctacacccttgacaattgggctgagcttcgtgagtatacaagtatggacactacgcgtactcaactgaaaactcttaattcgcagttcagcttcttcatgaagcagaaaactgctgcaaaatcaaacctgattgccttgctcgacgcgacatacccgggcgtcaataaattatttaacagccctgtccgtgccgacggaagcgaaaaatgggtcgattttgcttattctttctggcatgtggactgtgtccgcaaagccggtataaaagcgtttacagaccactacaagcgtttctgcaaacatcatggttacgagtttcaggaagccaaagcaaaagccatatacgaggattccaaagaactcatagcaactttgcctaaagatgctatttataaggaactgattcaagaaagcatccggcagctaaaccttgtgtctgaaaatgtagagcacatccgcaaaacaatgaatgaactggcatctactcttcccgaatacgatactgtcatgaacatgtacggtgtaggccctaccttcggccctcagctcatagccgaaatcggggatatctccagattccagcatagagaagctctgaccgcatatgctggtgtagacccggggaaaaacgattccgggcaggaagtacataatagcagccacgcatcaaaatgcgggccatccagacttcgccgcactctgtttcagatcatgacaactatgctgcaaaacggagtgaaggaagacgatgcggtcagcagctttctgttcaaaaagaaggctgaaaataaaccgtatctcgtgtacatgacggccggcgcgaataagttcctccgcgtttattatggcaaagtgaaagaatgcctccgcaaccaggagcaagctgagcagtaaacttccgaccaaacatatggctttcattgtcagaccgccctatacagacggcccggatacttgtgcctaaaatcaatttcaaaactttctcaaatcaccccttgactttttattagcagg

SEQ ID NO: 8119 - DNA, 1494 bp, unidentified
  source 1..1494: mol_type = unassigned DNA; note = element_cb52e81
  misc_feature 1..2: note = core
  misc_feature 3..254: note = LE
  misc_feature 255..1445: note = CDS
  misc_feature 1446..1494: note = RE
tctaccatcggatttgcagagtgacggtgacccagagagcacgatagtatcagccttggcgggggtgtggctcctggggtcggtggccggagtatttcggttcgctcgacactgaaatgccgcccccgccaccctgcatcatcatccggtgggtcgaacgggatggtgccaatcagaaatctgatgtggctctgtaggtagacgagaccagcggatgattgttctgcactcggtaactgcgggagatcacactcatgacaacaacctccgatattcgtgtcagtgtcgacgtgggatgccatcgccacagcgttgcgatcggtcttcccagtggcgaggtgctcgacgagttcgagttggaccatcgcccggaagggtttgaggtgtttttcaatcgggtcgacagccatcaacgccgttatgggggcgcggtgtcggtggcgatggagggatacaacggctgggcccgcccactggacacgctggttcgtcagcatggctacaggctgttcaacgtcaacaatctgaagctggcgaggtttaaggagatattccccgccgcggcaaaaaccgatcgcatcgatgcgcggaagggcctggagttgtttcagctctgcgaccaccttccgctggccaaaggcgtgcttcaagaggtagctgccacgccaaaagagaacgacgttctaaagcgtctgacccggcgccggcgttccgtggtcgatgagaagggtcgcattctgagccgcatgcagagcgacttgcaggctgtctgtcccggtctcctggccattaccaaagacgcagataatgtctggttcctgaacctcctcagtcactccgatgacctgaccaaactcgcacgtcttcaccagaagacggtgcttggcatccgcgctatcggccgaaaatacgccgctatcattggtgattggcagaagcatgccagcttcagtcatgaggtcgactatgtcggccccatgatcatcgaggatgcccgtcgcatactggagttgagggagaccgtgaaggcattggaagctcgctgtaaggaggccgcaaacggatcgcccatcgcccaactgatcgacactgtccccggattcgggctcgtctgctcatcggaattggcaggcgaaataggtaccgttgatcgcttcacgtccgaggcaagtcttgccgtttacatcggcatggcgaccctggacaacagctcaggcagcgtacgcggttccaagaacccgaagcatgtgaattcgcgggcgaaggcggcgatgatggtcggcgtcgatcggcaccgcaaaatgattccggaatcacagaggtactacgaaaagaaacgggcgcaaggcaaaacacacaaccaagcggttcgggcactcgggcgacatctttctcgggtgatatttcgcatgcttacacaagaccggccgtatgaaatcaggtgaacgagaaacagcaacgcgtgaaaagttgttgaaaattacagcgggatgt

SEQ ID NO: 8120 - DNA, 1642 bp, unidentified
  source 1..1642: mol_type = unassigned DNA; note = element_cb60d9f
  misc_feature 1: note = core
  misc_feature 2..271: note = LE
  misc_feature 272..1492: note = CDS
  misc_feature 1493..1642: note = RE
  misc_feature 33..245: note = bridgeRNA
cctcatatattgttcttgccacttctcgcgcagtggccgcgctcttttcttgcagacgcgaatgtgagataagggatgcgtatggggcggagggcgcttgccgcacccccccaggagccaggctctttaaaaaaggctggcgcctccggcccgcaggtggacgcgaattaggcaggatggcgtgcggcgccgtatatccaatgaggttgcgcctgcggttgccagaggaagatcctctgcctcaccataaagcgagggatcggaggacgccatgatctgcatcgggatagacatcgccaagagaagccatgtcgccagcgcggtcgacgaggacggaggcaccgtcgtcgagtcgttcaagttcgacaacacggcgaacggcttcgcgaagatgctgaagaggcttcgcaaggctgacgcgaccccggagaacagcttggtcggaatggaagccacggggcgctactgggtggccctgttcgactttctgatctcgcatggctacgaggccgcggtgatcaaccccatccagaccgacgccttccgcggcgtttggacggttcgcaaggtcaagaccgacgcgctcgatgcggcgatgatagccgacctcgtccgctacaagcgctacgagccctccgcactcggcgacgaagcgaccgaggagctgcgcaacctcgcccgctacaggatgtcgctcgtggagcgctccacagccttgaagaacagggcgacggccatcctcgataggacgttccccgagcttgcaggcctgttcagcaacgcgtactgtccgacccgccgcgagctgctgcagcactgcgccacgcccgaccaggtgctcggaaccgacgtcgggacgctcgagcgcatcctcagggaggcttcgcgcgggaggtgcgggcgagccaaggccgagcggctcaaagcgctcgccgaagcatccgtgggcgtcgggttcggctccaagacgctcgccttcgaggtgaggctcctgatggaggagctcgacttcgtccaagggcagatcaaggaggtcgaaggggagctggaatccctgctggagcggacccggggaaagtggctcgtcaccatccccggcatcgacgtgccgctcgcgtccgtcatagccggcgagataggcgaccccgacggcttcgacgacccccacaggctcatggggtacgccggcatggatcccacgaggagcgagtccggcgagaccgtgaagtccgacgggcgcatgtcaaagcgcgggcccggggcgctgcgatgggctctcatgcaggccgccgactgcgccaggaagaacgacccctacttcggagactactacgacaggaagaagggcgaggacaagaagcaccactacgtcgccctctcgggcgtcgcccgcaagctcatgggcgtggcgctggcggtgatgaaggaagggcggccctacgagccggcccctccccgcaaccaccgccccggccacctgaaggaggcgtgaaagcccacgtcgatcgcaaaaaccgaacttcgccaatgcccggcaccctgcatggggccgggtgttggcgtgcgctttcttatctcgcattcacttttcaaggttcctatcaaaaagtctcggattcccccttgactcctaatagcaggt

SEQ ID NO: 8121 - DNA, 1505 bp, unidentified
  source 1..1505: mol_type = unassigned DNA; note = element_cb62657
  misc_feature 1..2: note = core
  misc_feature 3..245: note = LE
  misc_feature 246..1484: note = CDS
  misc_feature 1485..1505: note = RE
ctaatgggttctgccgaagcctctggcaggctcggtcctggtagcggccggcgggtcagcactctccgctactgaccctcgaggtctcgcggcagaccgtgcgcccgccggtcgtgaggaggcgtgaccgctgctgggatgacgtgcccccggatggtgcggatgagcacttgaccattaggacgccggaagtctcctccacgctgccgagcagaggtcgcgacgaggcgagggagagcagtgcgatgttgttcgtgggtgatgactgggccgaggaccaccacgacgtcgagatcgtcgacgagcacgggaaggtgctggcgcgaagacgactacccgaggggctggccggggtgacgcggctgcacacgctgctcggcgagcacgcaccaccggagtgggccgacctcgacccggccagcgcggccgcccaggtggtggtcgggatcgagaccgaccgtggcccgtgggtcggggcgctggtcgcggccggctacaccgtgtacgggttgaacccgatgtcggtggctcggtaccgggagcggcattcgacctccggggcgaagtcggacaccgcggatgcccacctgctggccgagatcgtccgcctggaccgggcccaccaccgcccggtcgccggcgacagcgccaccggggaggcggtcaaggtgagcgcacgcgcccacctgtcgctgatctgggaccggacccggcacgtgctgcgcctgcgctcggcgctgcgggagttcttccctgccgcgatgagggcgttcgaggagctggacgccccggaggccctgcagctgctcgccctggcaccggacccggacaccgccgccaggctgtcccgggcaaaggtcgtccgcgccctgaccgcggcgaaccgtcgcgacgtaacggcccgcgccgagacgatccgggaagtgctgaccgcacccgagctgcgacgacctgacccggtgcaggacgcctacgccgcggtcgtggcctccgaggtcgcgctcatcaccgtgctgaacacccagatcgagcggctcgggcaggtggtggacgagcattttggccggcaccgggacgctgacatctacaccagcctgcccggtctcggtgtgatcctgagcgcccggatcctcggcgagttcggcgacgacccccaccgctacgccgacgccaagtgccgcaaggcctacgccggcaccgcgcccatcacccgcgcctccggcacccggaaagtggttctggccaggtacgcccgcaaccggcgcctcggcgacgccgtccagcagtgggccttctgctccatgcgcggatcgcccggtgcccgcgcctactaccagtcactgcgtgcccgcggcatcggtcaccaagccgcactccgtcagctcgccaaccgctgggtcggcatcctccacggctgcctccggcaccgcaccttctacgacgagaacaccgcctggcagcaccacctcagcaccgcggcttgacaccgccagaacctgggatgt

SEQ ID NO: 8122 - DNA, 1524 bp, unidentified
  source 1..1524: mol_type = unassigned DNA; note = element_cb670d8
  misc_feature 1..2: note = core
  misc_feature 3..252: note = LE
  misc_feature 253..1443: note = CDS
  misc_feature 1444..1524: note = RE
  misc_feature 25..272: note = bridgeRNA
ctggtaccatataagtgtaatatcaattcttatgaattgattattacactcttttttattattatgtaagaggataattggtcaacgtaacatcacctgaacttagcgttcgtaaaggaggacagttgaccatcctttgcataatacattcgattaagcaagttgaaatgcatttagtactttcgtgtcacaagccaggatgaagatatgtaaaagagatggaaccaattatttaaagtaaggaggaattttatgtatgcagtaggaattgatgtttcaaaaggcaaaagtacaatttcaataataacaacagaaggtgaaattatagaagaaccatttgaaatcaatcataatcaagaaggatttgatattttgttatcaaaaattaaaaacattaagaaagaagaaattaaatttttaatggaggctacaggtcattatcatttaccaatactcaattcattaattgaaaaagattattttgtttgcgtggaaaatgctttagtgattaaaaagtattgtgatatggatcttagaaaggctaaaaatgatagaaaagactctttgaaattagcaagttattgtagcgataaatggtttaaattaaggaagtttgaattgtcagataaaacaagggaacaattacaatttctttcaagacaatattgtcaatatataaaaattaaaactagcttaaaaattcaattaacaaatatgattgataaaacatttcctggaattaaaaagattatagatgaagaaaatagatacgagttattattggatatttacgaaaaatattcatatccaagtttagtattagaaaaaagtaaagaagaatttgttgatgaaataaataatatggcaaaaaaatatagacataaagttggtaaagctattggagaaaacatttacacaaaagctccaacagtaataacttcatgtccatataatgagtcattacaactatcaataaatagttgtatattacttttaagagataccataaaagtaactaatgatattatagcaaaaatggatgaacttgcaatgcaattaaaagaatttaatacagttaataatatgaaaggtgttggtccaaaaacaagatcaagacttattgcagaggtaggagatataagaagatttaaaaatgctaattgtttaatagcgttctgtggtatagatgcgccaccatatcaatcaggaaattttaattcaactaatagacatataagtaaacgaggaaataaatatttaaggaaagttggttatgaaataactaaaagtattaagtcttgtagaccaaaaacggataacgcagtatatctatttatgttaagaaaagaggcagaaagaaaaaacaaaacatctgccaaaattgcaggattaaataaatttttaagaatatattatgcaagagtaaaagaactatataattaagattaattttggggtaaggggaaatctgcccttttttagaaaaaataataattaaaaaagacttgacattggttagcaagt

SEQ ID NO: 8123 - DNA, 1342 bp, unidentified
  source 1..1342: mol_type = unassigned DNA; note = element_cb6909e
  misc_feature 1: note = core
  misc_feature 2: note = LE
  misc_feature 3..869: note = CDS
  misc_feature 870..1342: note = RE
  misc_feature 1110..1340: note = bridgeRNA
taatgagatggtcaccccctccttgtgtgcggtacgctggctgggtgttttatttcagaggaaaccaacatgaaaacgttacgcttattggtatcgatctcggtaaacactccttccacgtacactgtcaggacgaaatgggtaatgcccttctgcgcaaaaagtttacccgaaccagactgatggagtttttagccagttgccaatcagcgactgttgtgatggaagcctgtgcaggagcccattttatggcgcgtcggattgctgatttaggtcatgaggcaaagctgatttctccacaattcgtccgccctttcgttaagagcaacaaaaacgattttgtcgatgctgaggctatctgcgaggcggcttcccgcccctcaatgcgctttgtttcacccagaactgaagaccagcaggcaatgtctgcactgcatcgggtcagagattcactgatacgccaacgcgttaaaaccaccaatcagatgcacgcatttttgctggagttcggcatcagcatgccgcgcggtattgccgtaattcggcgtctggccgccgtgctggaagaaaatgacttcctggcttacctggtaagggttctgaacaggctccacagccagtatatttacctttgcggggaaattgatgaaatcgatatggaactgaaaacccaccttgcggagaatgaaaccgcacagcgactgctgaccattcccggcgtcgggccgctaacagcaagcctgttagccgcacgactgggtgacgggaaaaactatgccagcagccgtgactttgcggcgtcaaccgggctggttccccgccagtacaggtggaaaaacgacactgatgggcatcagcaagcgaggtgataagaatctgcgacggctgctggtgcagtgtgcacgcgtgtttatgctgcggctggagaacaacccagggcgtcttgcagagtgggttaaaaagcagcttgccagccatcactctaacgtggtggcgtgcgcgctggcaaacaaactggcacgtatagcctggtcggttacggcacatcaggcggcgttcagcaaataaaataaaagagccaacgaaaaactcgtcagctcagtgagttaacacgttactttctggttttgcgacgacagataattgatgacatgaacggcatatcggcctgctgataaacctgatccaaaaagtggctctatgaagccgactctcttttaaggttcggcaggcgcgaaactcatcgtggcgcgagcatgaatactcactagacgccgaatagatttacgcaagcccatcataaatcaaaatctgtgttgcaaaaacggggggtgaccataga

SEQ ID NO: 8124 - DNA, 1430 bp, unidentified
  source 1..1430: mol_type = unassigned DNA; note = element_cb70d1d
  misc_feature 1: note = core
  misc_feature 2..232: note = LE
  misc_feature 233..1417: note = CDS
  misc_feature 1418..1430: note = RE
  misc_feature 14..246: note = bridgeRNA
ctacgtgtttcattgacgtcaggattgggccggccaggctcggttctaggtgaccgggacggtcgttctctttgcggctgcccacgctcctggcgtgaggctcacaattggcgtgcgtcgtcccggtcaccgccagggctgcgagaggctcaagaggggtatgcccagccgtacgtagcggtgccctcccagctcgacaccaccagggttggcacgagcaagggagcagagcatggacgagcaggagtcaccgcgggtcgtgatcgggatggacccgcacaagcgcagcgtcacgatcgaggtcatgaccgccgacgagagcatcgtcggcgggggccggtttcccaccgacgccgacgggtacggacggctgctggggtacgcccgccagtggcctgagcgggtctgggcggtcgagggttgcgccggcatcggcaagcacgtggccgaccggctggtcgccgacggtgaggacgtcgtggacgtgccggcgaagatgtcggcgcgggtgcggatcttcaccaccgggcaggggcgtaagaccgacgtcaccgacgcccactccatcgccctggtcggggtacgcatgtccgggctgcgcccggtcatcaacgacgagcagctggaggtgctgcggatgtgcgtggaccggcgccggtccctgggcgaggagcacacccgcaaggtctgccagctgcacaagctcctgctcgaactcatccccggcggggccaagacgttcctgtccgcggcccaggccaaggagctgctcaagaaggtccgccccaccacggcggccggtaaggtccgcaaggcccacgccctggagctgacagctgacctggccacgatctacgcccgaaccaaggctgccgacaaggagctgaagacgctggtggaggcgaccgggtcctcgctgctcggcctgcacggcatcggaccctccggcgccgcccgactcctagtggaggtcggcgacatcacccgcttccccgaccgcaaccacttcgcgtcctggaccggcaccgccccgatcgacgcctcctccggcgagcacgtccgtcaccgcctctcccggggcgggaaccgtcagatcaaccgggtgctgcacatcatggccatcgttcagctgcgcaccaggaccaccgagggccgggcctactacgaccggaagaaagccgccggcaagacgtccatggaagcgctgcgctgcctgaaacgacgcctgtccgacctggtgtacaagcagatgctcaacgaccttgccgggcacacggcgacgggcccgggagggcacctgggcgacgactctgactccagcgcgaccggctcacaacccgacaccggctcttcggacaagccacttcccggacccgccaccaccgagcctagaacgacactcccgacggcgtcttgacatagaggggtgc

SEQ ID NO: 8125 - DNA, 1517 bp, unidentified
  source 1..1517: mol_type = unassigned DNA; note = element_cb7174e
  misc_feature 1..4: note = core
  misc_feature 5..250: note = LE
  misc_feature 251..1492: note = CDS
  misc_feature 1493..1517: note = RE
ctcactggtgcaccatcctcacgttggtggttctggatggactgctgatgcacccctggtccccaccgggccatcgccagcgacgctcgaccttcgaggtccagcatgagttctgcgaggtccggtggcccaggaccctcggactggctacagggctgtgcgccatcgagcgccgatcagtgagcgaccggctgcggggtcccgggaccaccgggtgttctctcactgctcgaacagcgaggaaacaaccatgagtgtcacccctgaagccatcccggcgcgagcgtgcgcgggcgtggactgggccaaggacgaccacgcgatctgcttcatcgaccccgacggcctggttgtggagcggttcaccgtcccccacaccgcggccgggctcaagaccctggtccgtcgcctgctcgccgtaggcgtggccgaggtcggcatcgaacgcggcgacgggcccgtggtcgaggcgctgctccaggccgagctgaccgtgctggtgatcagcccgaaccaggtcaagaacctgcgcagccgttacgggtcggccggcaacaaggacgaccgattcgacgcctacgtgctggccgacgcggtccgcaccgaccggcgccgcctgaccccgctgacccgctccaccccggcgaccatcgcgctgcgctccaccgtgcgagcccgccgtgacctggtcgagcaccgggtcgccgccgccaaccagctgcgcgcccacctgcaagtcgtattcccaggtgtagtgggcctgttcgccgcgctcgactccgcggtcagcctgtccttcctggaacgcttccccacccaaagcaaggccgactggctgacctccaagcgcctggccgactggctcggcaaactcggctacagcggccgggtcgcacccgagaccctgcaccagcggctgctggacgcaccccgcggcaccaccgacgacaacgcccacgctcacaccgccaccacgctcgcgttcgtcgccgtactgcgcgccctgaccacccagatcgaccagctcgaagacagcgtcgccgcacagctggacgtccaccccgaccgccacatcatgacctcgctgccccgctccgggatgctgcgcgccgcccgcctgctcgccgaaatcggtgacgcccgcggccggttccccaccgcagactccctggcctgcctcgccggagtcgccccctcgacccgccaatccggcaaggtcaaagccgtcaccttccgctggtccgccgaccaccagctgcgcgacgcactgtgcgacttcgccggcgactcccgacacgccaacccctgggccgacgacctgtaccaacgagcccgcgcccgcggtcacgaccacccacacgccgtacgcatcctcggcagagcctgggccagcatcatctggcgatgctggcaagaccaactcgcctaccaacccgatcggcaccaagccctccaacgcgtcctcaacgaacaggcccgaaaagtcgcctgacccggacgcggttgacacagggcaa

SEQ ID NO: 8126 - DNA, 1320 bp, unidentified
  source 1..1320: mol_type = unassigned DNA; note = element_cb7292c
  misc_feature 1: note = core
  misc_feature 2..466: note = LE
  misc_feature 467..1309: note = CDS
  misc_feature 1310..1320: note = RE
  misc_feature 42..245: note = bridgeRNA
ctattggtgcagggtgatcaaggccgggcttcttcgacgggagacgctccggtcgggccgctgggtgactcggagaacacgtgccgcaaggctttccgttgatgtgtccacggtggtccacagggcgagagccctgaccggggtgacttgatagaagcctgctgagccgtcaactcgcaataggtctgtcccctggccagggctcttgcctctgccccgtcatccacggcagcggaggagaggacatttcgatggtgacagtagggatcgacccgcacaagcacgtccacgtcgcggtggccgtcaacgctcagggcaggcggctcggcaagccgctgaccgtgaagaacgacgcgttcatgatcactgtgctgctcacctgggttcggtcgatcgcgggtgacatgcccgtaacctgggcgatcgaggacggcctgggttcgcccgccgcctggctgacggtctgttgctcgccagccaggaggtggtctgggttccggcccggttgaccgcggcccaccgcaagctgcacgccgccaccggcaccaagtctgacccggtcgacgccgccgcagccgctcacgccgccctcgctactcccggccttgaccggcaccgcatcgacgagcgagtgcgtgagctgcgtgtcctggtcgactatcgcgcggatctcatcaagcggcgcaccatgatgatcaatcagctcaaggcgcaactgcatgtctggctcgaccacactccgggcgatctcgcccgtcccaagggcatggacgcggtgaccgcattgctggacgcggcctcgctgggcgcgcacgtccgccaggcgctcaccgagatgagcatggagattgctgagctcaaccgacgtgtccgccagctcgacgacgccatcagggagctcgtgaccccgctggcccccacactgctggaaatcaccgggatcagccacatctccgcagcgattttgatcgctgaaatcggtgacatcacccgcttttccagctctgccaaacttgcccgctacaccggctgcgcaccgatccctgtctactccgccgacaaagaacgccaccgcctgcatcggggcggcaaccgccgcctgaacagcgtcctctacaccgcagccatcgtgcagaaacggcgctatcccgccgcgcaggcgttactggcccgccacgaacccaccaagggcagccgcggcgcccgacgcatcctccaacgtcacctcatcgacgtcatccaccgggccatgaccaccgatcaagcctcctggcaacaccacatcacccgccacgaccacgccgcttgacatagaagcat

SEQ ID NO: 8127 - DNA, 1444 bp, unidentified
  source 1..1444: mol_type = unassigned DNA; note = element_cb78d32
  misc_feature 1: note = core
  misc_feature 2..220: note = LE
  misc_feature 221..1243: note = CDS
  misc_feature 1244..1444: note = RE
  misc_feature 13..232: note = bridgeRNA
ctgattgatgatggacatgcgttgcggtggttccgtagcgttcagatgatccggctggtgggctcttcaagtgcctgctgcccgaacgggttggctttctaacgaactgtccgctggtcggtcatctgaccgtggtgtggctcgaaagaggcgagagcacatcgaccccaaatcaggagtgcccacctcggtttcaccactacccaggaaggcatctgccatgaccatgatcggtatcgatccacacaaggcaacccacaccgcggttgctgttgatgacaacgaacacgttgtcgacaagttccagctgcgagcgtcgagtctccaagctgaacggctccgagaatgggccgacaggttcaccaaacgcgagtgggcaatcgagtccgccaacgggctcggctatctcgttgcccaacaactcgtcgccgctggcgaggtcgtgttcgacgttccaccggtgctcgcgtcgcgggtgagggtgctcggctcgggccactcgcaaaagaacgacccgaacgacgcccgctcgatcgcgatcgcggcgatgcgttcggatcggctcgcgctggtccgccccgatgatcattctcgggtgttgcggttgttagccaaacgccatcgcgacatggcccggttgcgcaacaagcactgcacccgcctgcacgcgttgctgctcgagctggagccgggcggaatcagctcagagatcaccgtcacgaaagcaaacgtgctgctcaacggtgtcacggtccaggtgacccggcatcgggtgatgatcgcgaacgaactcgtcgacgacatcgcccgactcgacgttgcgttgaaggcatcgaagaaacgggtgacggtcgcgattgcggcgtcggcaacaacgctcaccgagatcgtgggggtcgggccgatctgtgctgcgatcatcattggcttcaccggcgacgtcaccagatttccgaccaagggtcactacgcgacctacaacgcgaccgccccgatcgaggcgtcgtcgggtcctcgcccgaagcatcgtttgaacccgcgcggcaaccgcaaactcaatcacgcgatccatatcgctgcgatcagccaactgcgtttcgacaccgagggccgcgcctactacgagcgcaaactcgccgaaggaaaatcatcgaaggacgcgatccgcgccctgaaacgtcgcatctcggaccgcgtctaccggcacctcatcagcgacacgcaccgcgccgcgaccgactgagaaaagtgggcccgggaggacaatcaggaacgacacgaaatccagcgtgaccggcctcacatcctgaacagccggctcttcggatcagtcacttcccggacccgacaaacgaccctacgaccctgcggccacctcggcaacagggtccccttcgccgcgcccccaaccacctggaaactgccccttgacacaaagaggctt

SEQ ID NO: 8128 - DNA, 1355 bp, unidentified
  source 1..1355: mol_type = unassigned DNA; note = element_cb7cf19
  misc_feature 1..2: note = core
  misc_feature 3..76: note = LE
  misc_feature 77..1105: note = CDS
  misc_feature 1106..1355: note = RE
  misc_feature 1109..1345: note = bridgeRNA
ttatggatggcccgcccctcaccggactgcgctgctaggcttgcagggtagccgagatgaggaagggagcgggacgatgacgattgcggttcttgggatcgacctgggcaagaacagctgcagcctcgtcgggctggacgcggcggggcgggtcgtgctgcgccgacgcatgcggcgcgagggggtgatcgccttcggcgcgaagctgccggggtgtgtcgttgcgatggaagcctgctgcggcgcccatcacatgggccgcgccctggccgagcaaggccacaccgtccggctgatgtcgccggagtacgtgcgcccctacgtcaaggcgcagaagaacgacgaccgcgacgccgaggccatcgccgaggcggccacacgcccgacgatgcgcttcgtggcactcaagtccgaggcgcagctcgacgtgcagaccctgcaccgggtccgcgaccaactcgtgggcgagcgcacggcgctgaccaaccagatccgttccgtcctgctggagcgtggccacgtcgtggcgcaggggcgcgccaagctcaccgcttgcctggccgcgttgctggacacggacgcgggcgcgtcgctcacaccgcgcatgcgcaccctcatggccgaggtgcgcgaacgctggcaggatctcgaccagcgcatcgccgcgctcgacgccgagttcgctgagcaggcccgcatcaacgaggacgctcgtcggctgaccacgatcccgggcatcggcgcactcaacgcgaccgcgctggtggcggccatcggcgacgtggccagcttcgcccgcgggcgcgatctagcggcttggcttggtctcgtaccgcggcaggtgacgaccggcgggaagcctcggctcgtcggcatcaccaagcgcggcagcaagtacctgcgcaagacgctggtccagggtgcccgcgccgcgctgccctcgctgcgccagagcgacacccatctcgggcagtggctgcgcgggctgctggcgcggtcgcacgtcaacacggcggtggtcgccctggcggccaagatggcgcgcatcgtctgggcgctgctgcgccacgggcgggtctacgagccggcggccgtggccgcctgatccgagttcggccggcgcggacgcgccggcctttcgatgtctgcgggcggtgagaggaagatggcctgacagtcgaccggtgttctggaagcctctccgcaaaaatggcgctcgacgccgacccctttatgaggcccaggacgcgcggatctccatcttggccaacggcgctgccggaaggccggatacgtttatgcagactgcacagaccagcggatccgagccacttgcggacggggcgggccatacg

SEQ ID NO: 8129 - DNA, 1472 bp, unidentified
  source 1..1472: mol_type = unassigned DNA; note = element_cb7d733
  misc_feature 1: note = core
  misc_feature 2..240: note = LE
  misc_feature 241..1452: note = CDS
  misc_feature 1453..1472: note = RE
  misc_feature 11..240: note = bridgeRNA
ctaattgttcctgagggcgctgcggtagtgccgtagcgttcgtgagatccgacgggctggctcccgaaccgcctgccgaccgcgtgcggtctggctttagaacgaggtgccagcctgccggttctcgccgtggcgtggctcaaaagaggtgcgagcgctagcaggtccgtaattaggcatgcccgccacgttccccattccccgaacgaacgcgacttggagtgtgccttgacagcggtgatgatcggcgtggacccgcataaggggtcgcatacggcggtggtgatcggcctggcggaggagccgctgggcgagctgcgggtccgcgcatcggccggtcaggcggagaagctggtggcgtgggcagcggactggccggagcggacctgggcggtggagggcgccgcgggcctgggccggctgctggcccagcagctcgtggccgccggcgagcgggtcctggacgttcagccgaagctggcgtcccgggtgcggctgctgcaggctggcgacacgaacaagaacgacccgaacgacgcgcggtccgtggcggtcgcggcgctgcggtccaagacggcgcggccggtgatggccgaggactacccggcggtgctgaaagtgtggtccaagcggcaccgtgacctggcccggctgcgtaaccaggtcgcctgccggctccacgccgtgctctgcgacctggtccccggcggccacccgaaggagatctccgcagctcaggccgccaggattctggagcaagccgcgccgtcaggagctgttgaccgggcccgcgccgagctggccgcccagttcctcgaggacatgcgccgcctggatgcccagctgcgcggcactcgcaagaagctcgccgccgcggtcagtgcctccggcaccaccctcaccgaggtgttcggcgtcggcccagtcatcgccggcaccatcaccggcgacatcgccgacgtgtcccgcttccccggccgcgaccacttcgcctcctacaacggcaccgcgccggtcgaggtgtcctccgggaaccgcaaggtccaccgcctgtcgctgcgcggcaaccgccgcatcaaccacgcgatccacatggccgcgatcacccagatcaggcaccggcacagcgacggccgcgcctactacgagaagaagctggccgagggtaagacgcacaaagaggcgctccggtccctcaagcggcggatcagcgacgccatcttcgcctgcctcctagccgacgcccggcgagccggacagcggccagcgcgaagggcccgggagggcaaccagggagcgactctgactccagcgcggccggctcacaccccgaacgccggctcttcggacaagccactcccggacccgggcaccacgatacggcccggcaccagggcagccacaccctcaccatcgaagccggcttcaaagaaaactcggccagccacttgacagcagccgcaaagaggact

SEQ ID NO: 8130 - DNA, 1377 bp, unidentified
  source 1..1377: mol_type = unassigned DNA; note = element_cb88e9a
  misc_feature 1..2: note = core
  misc_feature 3..71: note = LE
  misc_feature 72..1097: note = CDS
  misc_feature 1098..1377: note = RE
  misc_feature 1143..1375: note = bridgeRNA
ttaatgagatggtcacccccactctgtgagcggtatgctggcaggatgtttttctttcaggagaggccatcatggaaaacgttgcgcttattggtatcgctctcggtaaacactcttttcatcttcactgtcaggacaagtccggaaaggcgcttcagcgtaagaaattcacgcgcactaatctaatgcagtttctggcgacatgtccgtccactgttgttgttatggaagcctgtgccggtgcgcattttatggcacggcgtatcagtgatatcggtcatgaagcaaaacttatctcttcgcaattcgtgcgtccgttcgtcaaaagtaataaaaatgattttgtcgacgctgaggcaatatgcgaagccgcatcgcgaccatcaatgtggtttgtccagcccagaaccgaagttcagcaggcgatgcgagcgctgcatcgggccagagaatcacttatcagagacaaggtgaaaacgaccaaccagatcaacggttttttgctggaatttggtatcagtctgccagtaggcgatactgtcattaagcggctgcccctggtgctcgtggaacacgaaatacctgaatatctgagccgtttgctgatgaaattacacgctcactatctttaccttgttgagcaaataacagaactggaatcagaattaaaccagtcaatcaaaactgatgatgcaactcaacgcatcatgacaatacccggtgttgggccgattacggccagtctgctttcatcacagctcggtgatggcaaacaattttcatgcagcagggattttgctgcttccacagggctttttgctgcttccacagggcttgtcccccggcaatacagtacaggaggtaaatcgactctgctgggtatcagcaaacggggcgacaaaaacctccgccgtttactggttcagtgtgcccactcgttcatgatgcgactggaacatcagcagggcagactggccgaatgggtcagagagcaactcagcaagaagcattcgaatgtggttgcctgcgctctggcaaacaaactggcgcgaatagcatgggcaatcacgacgaatcacaatgcatatcaggcctgatatatgtcgcgctgaatcaacagattgattattaagtagttaaacagtagttacccatctggttttgcgaagactgattattgatgacatgaacggcatatcggcctgatgagaaaccttagacaacaaatggctcactgaagccgagggctttttcaggtgcatcaggcgcggaactcatcgtggcgcgggcattcttgcccatacagacgccggatagattgaagcaagcccaccattaatcaaaaatcagtattgcaaaaatgggggtgaccataga

SEQ ID NO: 8131 - DNA, 1373 bp, unidentified
  source 1..1373: mol_type = unassigned DNA; note = element_cb8ecf2
  misc_feature 1..3: note = core
  misc_feature 4..78: note = LE
  misc_feature 79..1095: note = CDS
  misc_feature 1096..1373: note = RE
  misc_feature 1150..1361: note = bridgeRNA
atgctgggtggacggcccccgacggcatctgttgtgccaagctgcgggtgcattttcccagcgaggagaccgtccgtcatgaacgttagcatcattgggctcgatatcgcgaagaatgtctttcaggttcacggcgaggacgccgaaggcaaggtcgtggttcagaagcggctcgggcgaaagcggatgatcgagtttttctcgaagcttccgccgtgcctggtggcgctcgaagcttgcgggacctcccattattggggccgtacgctgcgggctctgggccacgacctccggctgatcccggcggcgtatgtgaggccgttcgtcaagcgcaacaagaccgacgcgcgcgacgccgcggcgatctgcattgcggccaggcggcccgacatgcgggaggttgcgatcaagagcgaggagcagcaggcctcgcgggctttggagcgttcgcgcgagttgctggtcaagcagcgcacgcaagcgatgaacagtttgcgggcgatgctggctgagttcggcgtcgtggcggcgcagggggctcgcggcttcgccgaactgagggagcgcctgacgagcgacgacccggggcttccgcagacgctcatcggcgcgttgcgcctcgttctcgcccagctcgatagtctgacgccggcgatcgcggcgctcgaggacacgatcaaggcgatcgtcaaggccgatccggacatgagacggctcgcccgcattcccagcgtcggctttctgaccgcccatgcggtggtggcggcgatcggggacggacggcggtttaagagcgggcgcgacttcaccgcctggggcggcatgaccccgcgcgagacatcgtccgctggcaagcggcgaataaggggcgtgagccggcagggggaaagccggttgcgcaaactgttcgccctcggggcggtcacgctcctgcgcaacgcccgctcgcgcgatgagcgcgcgactcaatggcagcgcggcattctcgcccggcggccgatgaaggtggcggtgatggcgcaggccgccaagaccgctaggatcgtctgggcggtcctcacctcgggcaaggagtacgcgcccgcggcggcctgagcgaaagacgcattccctcttccttcgatcagacccgatcgaaggcaggctgagcaaggagccaaggaaagcgacggcaaaatggtcaggacctgggtcgggacactccgcttcgtcatcgcgcttcaaaagcgcgccgcaatgctgggaacccgatccgcagcacccatcgtggcccgcggtcattcgaaccgcgctcgaaaggccgaatacatgaccgctccagaccagtcgccgaagccttcaaaagccccttgcgaaacgggggccgtccatac

SEQ ID NO: 8132 - DNA, 1576 bp, unidentified
  source 1..1576: mol_type = unassigned DNA; note = element_cb8ef92
  misc_feature 1..2: note = core
  misc_feature 3..261: note = LE
  misc_feature 262..1458: note = CDS
  misc_feature 1459..1576: note = RE
  misc_feature 26..281: note = bridgeRNA
ttggtactgtataagtgtaagtgtaaaaccagatatatatggttagcatttgcacttattttatttataattgagggagtaattggtctgacgtcgttaattttggattaataacatccgtcgtaaaaactgtcaaccatcccttattataaatattcgattaagcaggttgaaaccctagaggctttcgtgtaactaaccaaaatgaattgtaataagtgcagatggagacaattacaaaaataaatttggaggttacttatgataagtgttggaattgatgtgtcaaaagaaaaaagtacagtgtgtattttaaaaccatacggagagatcgttagatctccatatgagattactcatacagaaagtcaaatgtcagaattagtatcaatgataaaatgtcttgatgatgaagtaagagttgtaatggaagctacgggaagttatcacctaccagtgcttagttttcttgaagaacatggaatttttgtagctgttattaatccgttagtgatgaaaaaatatgcaagtataattctcagaaaaggaaaaacggataaactggattctataaaaattgctaattatggtttggataactggtttcatttgattaactataaatctagtgatgaagtttacgtgcagttacgtcttcttggaagacagtacgctcactatataaaactccgaatagaaagcaaactatctttaactacaatgcttgattatacaatgccaggaattaagactatgctgaaaaaccgctcagataaaccagaaaaagacaagttgaatgattttgttgaagaatactggcattatgataacattacgaaaaaaactgagaaacagtttattaactgttataaaaattgggcaaaaaagaagggatatcaacaaagcgaagcgaaagccataaagatatatgacttagctcagcaaggaatccctaccttatcttccgatactccatcgaccaaaatgttagtattagaagcggttcgagttcttcgcgaaatagacaaaactcttgcattgattttatcacaaatgcaggaattagcaaagtcgttaaaggagtatatagttgttcgtgaaatgggcggagtaggtgacattatagcacccagacttatagctgagataggagatattagaagatttcatagtggaaaagctttgatagcgtatgcaggcattgatgcgccaccgtatcaatcagggcagtttacgggaacccgaaggcgaatatctaagcgaggttcttcaacactaagaaaaactggatttgaaataatgaaatgtttaaaaagtattaagcccgagaacaatgctgtctatttatttatgttaaagaaggaagcagaaggaaaagcttcaaaagtggctaaaatagctggattaaataagtttttaagaatatattatgcaagagtaagcgaagtatataaataatatataacttagaaaattgaggcttggaccagaaaaaaacatctggtctaatttgcatgcaataaaataaaaaacaatcaaaaaatctgctataaaagcattgacttttattagcagg

SEQ ID NO: 8133 - DNA, 1156 bp, unidentified
  source 1..1156: mol_type = unassigned DNA; note = element_cb97cba
  misc_feature 1..2: note = core
  misc_feature 3..205: note = LE
  misc_feature 206..1144: note = CDS
  misc_feature 1145..1156: note = RE
  misc_feature 13..211: note = bridgeRNA
cttgtcttatggaatttttggctcctgaggcaaaagggagccgctgcccggcaccgcaaactgcggggcagcggcgggggctgcgtcgtgcggagcttggtctttcaggaccgcggtcgagtttgacgagcccccgtcttttctaacgacctgaacggatacgtgggcttcgggcccgaacgacaagcaaaggtggaaagaaaagatggctaaggataccatcggcatcgacgtctcgaaagaccgtctcgacgcattctggcattcccgatccgaagcgcgccgcctgccgaacacggaggaagggttcggccagttgtgcgactggcttggagaggaggagggcgtgctgatcgtcttcgaggcgaccggcgcctatcatcgtggcctggagcggcatctcagccgggcggggcggcccttcatcaaagtcaatccaaagcaggcgcgccgatttgcacaggccattggtcgactggcaaagaccgacagcgtcgatgctaggatgctggcgcgcatgggggtggtgctcgatctggcccctcaagatgtcgagggcgaagatgttcatgatctcagggagttgctgacagcgcggcgggccctcgtcaaggatcaggtcactgctaagaccagacttgccacggcgatcaatccgctcgtgcgagaacagatttgtcgccgcatcgatgacattgccgccgatatccacgcgctggatgaagtaatcgcgcagatcgccaagcagcgaggcaccctcgaagggcgcattcgtcgattgatgaccatcccggggatcggccgtctgaccgccacgaccatgctgatcgatatgccggaactggggtatctcgacagcaaaaagataactgctctggccgggctcgctccaatgacgcagcagtctggcaagtggcagggcaaggaacgaattaccggcggccggtcatcaattcggcgggcaatctacatgccggcgctggttgctatccgtttcaatcgcgatcttcgcgacaagtaccagcagctcgtgagcgccggcaaggcgaagaaggttgccatcaccgccgtcatgcgtcgcatgctggttctcgcgaacacgctgctgcgcgacgcccgcgattggcagccggaacgcccttgaccaagacggata

SEQ ID NO: 8134 - DNA, 1590 bp, unidentified
  source 1..1590: mol_type = unassigned DNA; note = element_cb99a1c
  misc_feature 1: note = core
  misc_feature 2..67: note = LE
  misc_feature 68..1138: note = CDS
  misc_feature 1139..1590: note = RE
  misc_feature 1342..1581: note = bridgeRNA
taatgggatggtccggccgcgctccccatctccccgctgaggggaacaggagcaaggagccaagcccatgaagcgcattgccaagcccaagcccgccgccgtcgccacgctgggcgtcgacatcggcaagaacaccttccatctcgtcggcctcgacaaacgtggcgccatcgtgctgcgcgagcgcttgtcgcgggcccaggtcgaggttcgcttggccaacacggcgccctgcctggtcggcatggaggcctgcgtcggtgcccatcacctgggccggcgcgttgcggctcttggccacgacgtgcgcctgatggccgccaagtatgtgcgcccgttctgctgcaagcagaagaacgacttcaacgacgcgcaagcgatcgccgaggcggtgacacggccaaccgtcagatacgtggcgctgaagacgcccgcgcagctcgacctgcaggcgctgcaccgcgtgcgcgagcggctgatgtcgcagcgcaccggcgtcatcaaccagatccgcgccttcctgctcgagcgcggcatcgccatccgccagggctggcgggcattgcgcgccgagttgccgcgcgcgctcaccctgaccgacaggctgacgccgcgcatggtgcatttggtggaggacctcgccaccgactggcgttggctcgatcagcgcatcgcggctgtatccaccgagatcgaggagctcgcgcaggccgacgacggcgccgtgcggctgatgagcgtgcccggcatcggcccgatcatctccagcgccacggtggcgggcatcggcaagggcgatgtctttcgcaaaggccgcgatttcggtgcctggcttggcctggtgcccaagcagaccttcaccggcgggcggccgatcctggggcgcatctccaaacgcggcaaccgctatctgcggcagttgttcgtgcaggcggcccgcgtcgtcttgctcaggccgcaaagctgggagcgttacggcctcaaccactggatcgcggcggcggcgcggaggctgcactacaacaagctcgcgatcgcgctcgccaacaagctcgcccgcatcgcctggggcgtcctgcactctggccgcaaattcgaaacgcgcacggagagcgatcatgtgccccagcctgcctgatgctggcggccgtgctcggcgccgtcgagacgtggcctggacgcgtcggcgcaagttggcgcgggttgcctgccggccagtctcgaccgcgccctgcgcgcggcgcccccagccacatgcaggccggggcgaaggaacggccaccttgaccgaacaaaggaactggacggaagacaaaagcaggtgatccgtcgccgatgttttcccgccgaggtctgcgagaggaaagaagcaaggcatggaggaacggtcttcacggcgcattcgaaacctggtgacccaaattgtcgatgcagacatgaccgctaatgagatcgaatgcgcgcgcatatccatggtggcccggagcgggtgaaaaacgctccacgttcgaggcctgatacattgatgcaagaccgcagcaccgccagccgagctgtcatccctcttgcaacgcgcggccggaccataca

SEQ ID NO: 8135 - DNA, 1362 bp, unidentified
  source 1..1362: mol_type = unassigned DNA; note = element_cb9d1e5
  misc_feature 1: note = core
  misc_feature 2..77: note = LE
  misc_feature 78..1109: note = CDS
  misc_feature 1110..1362: note = RE
  misc_feature 1132..1353: note = bridgeRNA
tactgagatggtccgccgcttgatcacccgctttgggttgggtgatcttgaaggcaggtacaaggaggatcatcgacatgcagattcgttccgtagggatagatctaggcaagacgacctttcacctagtagctcttggcgataacggcaaggtgctgctgaagaagaagttcacccagaagcagctgattacgttcacagcgaacctgcagacatcgctcatcggcatggaggcatgctcgggagcgcattttctgggccgtgcgctgcgagcacagggccacgatgtgaagctgattctggcgcagttcgtgaagccgtttgtgaagtccaacaagaacgacttcctcgacgccgaggcgattgccgaggccgtggatcgccagaacatgcgatttgtcccgatcaagacggacgaccagctggacctgcaagcgctgcaccgggtgagggagcgattgatgatccgaagaacctctgtgatcaaccagattcgttctttcctgctggagcgcggcatcgtgtttgcgaagagcccgatccggctgcgggaagctatcccggaggtgctcgagaacgcgaacgaacacctcaccccgaggatgcgcaacctgatcgcgatgctgtggagcgagtggaaggacctggagcttcagatcgtcgagatgaacgatgaagtcgagcggatcgcttcaagcgatgccgcctgcatcaggctgcgccagatcccgggtgtcggcccgttggtagccactgccatcgtcgcgtcgatcggcaacggggcagcttttcgcaagggacgggagttcgctgcatggatgggcctggtgcccagacagcactcgaccggcggcaaggccaagctttacgggatcagcaagcgcggcaaccggtatctgcgcaaaatcctcatccacggcgctcgcgccgtggtgctgcgatccaagcgagagcgcatcgcgatgggtgcatgggtgaccgcgcttgaggtgcgagcgccccgcaacgtgttgatcgtcgcgatggccaacaagctggcacgtattacgtgggcagtgctctccaccggtcaggagtaccgggctgtcccgaacgctatggcggcataacaacgccacatcaggctctctctcccaccgaggtctgcacaggaccagtgaagatgaaaaaacagtcaaaacggcgtgcctggaacctgtcttccgaatgggccctcatacggccgaggcgtttctaaggacaggcacgcggcgtatctcatcttggccaggagacgaaatctccaacaacaggccggatacattgacgcagacgttcttcctctcaacacttttcccttgcagttcggcggcggaccataca

SEQ ID NO: 8136 - DNA, 1381 bp, unidentified
  source 1..1381: mol_type = unassigned DNA; note = element_cb9e798
  misc_feature 1..2: note = core
  misc_feature 3..87: note = LE
  misc_feature 88..1119: note = CDS
  misc_feature 1120..1381: note = RE
  misc_feature 1150..1369: note = bridgeRNA
tgatgctgtggacggctcctccacccggcacgcgagtgccatggaagtgggggctgttaaggctcccacgattcagaggagctatccatgcaaacgatcacaacaatcggtctcgacattgcgaagtcggtcttccaggttcacggagttgatgctgccggccaggttgtcattcgccgccagttgaggcgtcgctacgttttggcgttctttcagaagttgccgccatgtctgatcggcatcgaggcttgcgcctcatcgcatcactggtcgcgcgcgctccatggacttggccataccgttcgtctgatgccgccggcctacgtgaagccctatgttaaacggcagaaaaatgacaccaccgacgcagaggccatctgcgaggcggtcgccagggccaacatgcggttcgtgccaaccaagacgtccgagcagcagagcggcctggtgctgcatcgcacgcgccatctgttcgtccggcagcagacttcggtgatcaatgcgatccgcgcccatcttgccgagttcgggatcgtcgcgccgattggacgcaagggcatcgaggaactgcttcatgtcgtcgccgatccagccgacaatcgggttcctgcgatagctcgtgcgtgtctggcagcattcggaactcagttgcgcaggctcaaggagcagattctggagttcgatcggatgatcacggcgtggcaccgatccaacgagatgagccggcggctcgatgattgtcccggcgtcggtccggcactggccaccgctttggtcgctaccgttgctgacccaaaggtcttccgatcagggcgcaacttctcagcctggattgggctggtgccgaagcagcactcaagcggaggcaaggatcggctcggcagcatctgcaagcagggagatcgctacctgcgcggcctgttcgtggccggcgcgctcgccgtcatccgctatgccaagatccatggcaccaagtatcggccctggcttacggcattgctggcgcggcggccgaccaaggttgccgctattgcgcttgccaacaagctcgcacgaatggtctgggcgatgatggccaagggcgagcgatacaaggaacccgtcgcgcttgcggcgtaaacgagatcacgccggatgcccggtgtgacgtgacggttgggagggcgaacagcacgtaatgcagagccggtcgatccggcgatcaggacaacctacttgtgccatcgcattctcgaatgcgtgcttgtgaccaggacctgatccgcggagggcattatggccagcggtcatgtgaaccgcacctacaggccgaacacatggctgcatcgaccaatgctgcaaccgtgaagaaagcccttgccaactcggagccgtccacaca

SEQ ID NO: 8137 - DNA, 1378 bp, unidentified
  source 1..1378: mol_type = unassigned DNA; note = element_cba687a
  misc_feature 1: note = core
  misc_feature 2..68: note = LE
  misc_feature 69..1115: note = CDS
  misc_feature 1116..1378: note = RE
  misc_feature 1118..1368: note = bridgeRNA
tatgggatggcccgcccctcaatccggcagcgtaagctgcagcgaccaacggaagagggaacggaccgatgcaaatcgcagtgttagggatcgacttgggcaagaatagctgcagcgttgcggggttggatgcgactggacgcatcgtcctccgtcggcgcatgcaccgcgatagcgtgatcaagttggcgtcgcgcctacccgcttgcgtgatggcgatggaagcttgctgcggtgcgcatcatctcggccgcgtgctccaggcgcacgggcacgaggtccggctaatgtcgccggaatacgtgcagccttatgtcaaagcgcagaagaacgacgagcgggatgcggaagcgattgctgaagcggcaacccggccgaccatgaggtttgtcgagctgaagagcgagatgcaactcgacgtgcagagcttgcaccgggcccgctcgcggttggtgggcgagcgtaccgcgctgatcaaccaactccgagccgttctgttcgaacgcggcgtcaccgtcgcgcaggggcggcgcaggttggaacggtatctcgcgctcgtactggagcgtgacgaggccccgactttgcaactgagcccacgcatgcgcctgctgatcgatgacatgcgtgcgcagtggtgcgagctggatcgacggatcgcggcgttcgatgccgagtttgtcgccgcagcgcgcagcgatgagaccgcaaggcggctgtcgaccatccccggtatcggagccatcaacgccacggcgctggtggcggccgtcggcgacgcgcggagttttgctcgcgctcgcgatctcgcggcctggctcgggcttgtcccgagacaagccactaccggcggcaggcccaggttgctcggcattaccaagcgcgggaacaaatacctccgcacgctgctgatacatggggcccgggcggcgctgccatcgctcaccgcgaccgagggttcgctgggcaactggttacgcggcttgagcgcgcgggcgcatcgaaacaccgtgatcgtcgcattggccagcaagctggcgcggatcgcctgggcagtgctgcgctcgacggccacctataacgccaccttgggcgaccaagccgcagcggcgtagaggagatcggctgccagatactcgttcagcactggtggctgctgaaatctgcgagtggatgaaagcgagatggcctgacggttgaaccggcgctctggaaacctggttaaaaaaatggcgcatcgacgccgcgtgtcttatgaggaccagatcgcgcggatctccatcttggccggagtggcaaagctccgagaccggatacgtttacgcagaccggccagatcagctcgcacaagcctcttgcggacggggcgggccatacg

SEQ ID NO: 8138 - DNA, 1595 bp, unidentified
  source 1..1595: mol_type = unassigned DNA; note = element_cba9bf5
  misc_feature 1..4: note = core
  misc_feature 5..373: note = LE
  misc_feature 374..1585: note = CDS
  misc_feature 1586..1595: note = RE
ctcactggactacctttccggtattcgaagacgtcggcgtggcacagcgcagggttgtccacggcggcggtcggtcggcgcttgcgacgaaccggccgaccgccgcggtgggcaacccgtgtttgacgcggcgacctgagcaggaggatcgttcgaaccgacttccgtgcccttgcagtgactgccaccggcactggccgcccgacggcccccatgagacccgcagcctgcaaggcgccggaagacccagacgggccacagggtgttgcgccacaccaaccttcacgccagtgaggtgtgagcgccgatcagtgaggatcccgcgtgggcttccggcacggcaagtcataccgcaacttgtaggagtctgtccatgagtgaagtcttcgccgggctggattgggccagccgattgcatgccgtgtgcgtgatcgacgagcgcggtgtcgtgcgcctgcagtgcgaggcaacgcatgacgctgctggcctcgtcgatctgtcgcgccgtcttcacgccgcgggcgccgagcgcatcgccatcgagcggcccgcgggtctgatcgtcgacgccttggtcgaagccggcttcgcggtcgtgcctattcaccccaacatcgtcaaggccacgcgcccgcgctaccgcagccacggcggcaagtccgacgcctcggatgcctacctgttggccgacttgcttcgcaccgacggccatcgcttcaagtcgctcactgagcagtgcgacgacattcgtgcgctgcgcgccctcgtacgcgggcgcgatgaactggtggacgcccgcatccagctggccaaccagctgcgcgatttgctcgaatcgttctggcctggcgcagcgtccgtcttcgccgacgtcgactcgcccatcgcgttggacttcatccagcgctatcccactccagggtcggcccgcagcctcggccccaaacgcatggccgccttctgcgctcagcatgcctacagcggccgtcgcagtcccgacgaactcctggagcgcttgcacgcagccgcgcagatcgcgctgggcgacatggagacccgggtcaaaggcgaactcgcgctcgcactggcgcgcatcctggccaggctcgtcgagcagatacggctgatcaccagccggatcgagcacgaggtcgctgctctggacgacggccgcatcctgatgagcttcccgcgcgccgggcgcgtatgcgccgctcagatactcgccgaactcggcagcgtgcgcgagcgcttcgacagcgaagaacacctggctgccgaagccggcgtcacgccggtcacctatgcctcgggcaaggccaagtccgtggccttccgctgggcctgcaaccacaggctgcgcagagccattacgtgcctggccgacaactcgcgtcatgccagcgcctgggccgcagccacctacgccaacgcccgagctcgcggctgccgccacccgcatgccatccgcatccttgctcgcgcttggctgcgcgtgatctggcgcgcctggctcgatcgcaagccctacgaccccgcctcgcacggcggccttcaagccatgctcaaaacagcggaaggttgacacagggtgt

SEQ ID NO: 8139 - DNA, 1358 bp, unidentified
  source 1..1358: mol_type = unassigned DNA; note = element_cbb38a1
  misc_feature 1: note = core
  misc_feature 2..86: note = LE
  misc_feature 87..1115: note = CDS
  misc_feature 1116..1358: note = RE
  misc_feature 1125..1350: note = bridgeRNA
taatggaatggtcgccccttctctaactggcatccaggtgccatagtgagattgcataatccactaaacgagaagaggcaaccgatatgaatattacgacaataggtattgatttggctaagtctgtttttcaggtacacggcgtcgataaacgcggcaaggtggtagttcaaagacagatgagacgatctaaggtattggagttttttgtccaactaccgccctgcttaatcggtatggaggcttgcagcagtgcgcactactgggccaggaagctgagtgaacagggacatgaggtaaagctaatggcgccacagttcgtcaaaccttatgtcaaagccaacaaaaccgatgcggctgatgctgaagccatctgtgaagcagtgactcgacccaccatgcgatttgtacccatcaaatctgttgaccagcatgccgtgttgtcgctgcatcgtgccagatcaggttttgtgaagtcgaggacagcccaggcaaaccagatcagaggcctgctgggtgaattcggtattgttttgccacagggcattgtgcatgttgcgcgatgtctgcccgatatcattgaggatgcagacaatgagttacccatggtattccgagagttactgcttcgtcttcgatcgcatttgttagagctcaatcgacaggtcgaggcattagaagatcaaatcgctacctggcataaaaacaatgaggatagtcagcgacttgccaacataccgggggttggggtattaacagcgagtgcactggtggcctcggttggtgatgccagctgcttcaagaatggacgggaactagccgcctggttggggttagtgccaaggcaacactccagtggcggaaagccactgctgctcgggattagcaaacgaggtgatgcctatctaagaacgctgctggtgcatggcgcaagatccgttgttcgagtttccgctaataagcaaacaccgaccgatagttggaccaatgagatgagtactcgccgacacatcaatgtcgtatccgttgccagggcgaacaagaacgcacgcatcgcatgggcgttactggcacataaacgcgattacgatggagagtataaaaaggcggcataaattaattttcccaggtttgctcaggcgaacatgtattgatggcaagacaggtcagaccgtagcgggtcaaacctaattcacacagggagcgaaaagctcgacaggctgtaaaggcacccgctagctaattccatcagggacagaggttgtatgccacctcattcaaagtccggatctatggctgcaacctactgacttgcaattaatgaaatgaacgcttggcaaaacaggggcgaccatcta

SEQ ID NO: 8140 - DNA, 1373 bp, unidentified
  source 1..1373: mol_type = unassigned DNA; note = element_cbc360e
  misc_feature 1..2: note = core
  misc_feature 3..80: note = LE
  misc_feature 81..1109: note = CDS
  misc_feature 1110..1373: note = RE
  misc_feature 1083..1360: note = bridgeRNA
cgatggggtggacgccccccggcggcatttaatgtgccaaggtagtgggtgttgaaacaccgcttcgaaggagagcgtccatgaacgaggttagcatcatcggcctggatttggccaagaacgtatttcaggcgcacggtgccggagctgatggctcggctatattccgccgaaagctatcacgcgtgcagctgttgaagtttctaacgcagcagccgtcttgtgtagtcgcgatggaggcctgcgcgagcgcccatcactggggccgggtaatcggtgatcttggccatgaagttcggttgatcccaccggcctacgtgaagccgtttgtgaagcgccagaagaacgacatggccgatgcggaggcgattgccgaggccgtgtctcggccaactatgcggtttgtcgcggtgaagagcgaagaacagcagggggcggcgatggtttatcgcacccgcgacctactggttcgacaacgcacccagacgatcaacgcgctgcgggctcatctggccgaacaaggcatcgtcgcgccgaccggtcccgcccatgtcggacgtctcgccgcggtcatcgacagcgacgacggcgcgctgcctgcggcggtgcgggatctggcgcgactgcttttggaccagatcgcaggtttgagcgagaaggtcgcggatttggatgctgaactgcgccgacgtgcgagcgtcgacgacaccgcgcgccggctggcgacgatcccgggagtaggcccgatcaccgcggcggcgatcaccacatttgcgccacctatggaaaccttctcgaaggggcgcgattttgcggcatgggtcggtcttacgccgaggcaacattcaagcggcggcaaagagcggctcgggcggacgtcgaagatgggccagcgcgatatccgaaggctactgatcatcggggccgttgcggtggttcggtgggctgcccggaagggtgcgcccgaggggtcgtggctcgcgcggatgctggagcgtaagccgaagatgctggtcgcggtggcgctggccaaccgcatggcccgaacagcttgggcgctgatgcgtaaaggtgaagattacagagatccggcgatggtgaccgcataggtcaaaatcgccggtgtgttgccgcggatgtgagcaggacggaggaacgtaagggcaaacgatcaagagaccggatcgggagaaccattattccggacgacgcgccatcgagcgcgggtaagcgaactggacccgatctgcatatctccatacaggcccgcagcgcttgaaaggccgcaacttcgaggccggacacacgaccgcacctgatcacatgcccgatcgtgccaaaaaagtgcttgcattcatgggggcgtccacaca

SEQ ID NO: 8141 - DNA, 1463 bp, unidentified
  source 1..1463: mol_type = unassigned DNA; note = element_cbc674c
  misc_feature 1: note = core
  misc_feature 2..102: note = LE
  misc_feature 103..1155: note = CDS
  misc_feature 1156..1463: note = RE
  misc_feature 1224..1461: note = bridgeRNA
taatggaatggtccgccccgctcccaaaacggcttcaaatgagccaagatagaatgagtttttcggaacatcattcataataagaaacggagcgaaccattcatgggtaagattaacaaatcaggagctaatcaaaaaggtcaggtagcttttctcggaattgatttaagcaaaaagagtttccaactgcatggcgtggatgccaaaggcaatgtggttttcaaaaagaaactcaaccgtaaagcactcttaccttttattgccaacttgcccaagtgtgttattggcattgaagcgtgtggtggttcgcactactggtgtcgtaagtttactgagatgggccatgaagttcgaatcattgcgccccagtttgtgaagccctatgtgaagtcaaacaagaacgatgcagcagatgctgaagccatttgtgaggcaatgcaacgcccaagtatgcgctttgtgcccaccaaaacaatggagcagcaggatattcagagcctgcacagaatacgcagccaggcagtcgccagaagaacagctctgggtaaccagatcagggggctattgatggaatacggtgtcattattccaaagggaatatcctatatccgtaaacagatcccgctggttcttgaagatgccgaaaacggtttaaccgtgttgttccgtgaacttctcaacgagctatacgaagagatgaagcacctgtataaacgagtagaaaagcttgagcaaaaactcgaaaccattgccgccaataatgaagcttgccagctgctattaaccatacccggtattggcttactcagtgccacagcaatgtatgcagcgattggagatataacagcatttaaaactggccgtgaacttgcagcctggatgggtcttgtgccaaaacaggcctctacaggtggagtacctaccttactggggatcagtaagcggggagacacctatctgcgaacgctattgatacatggtggcagaaccgttgtgagagttgcggataaacacgatgacaaacgtaataactggataaaagaacttgataaacgccgtggcaagaatatttcggctgtagcggttgccaataaaaatgctcgcattgcctgggcggtgttaaccaagaaagagccctacaaggcagcagcatgaacagaagcatttaattattaaacatttgtcgttagacaagaaaagcaaaagcggttaatcagtgtaagaagcctgcaacgagttgcgtggataaagttcaaatgatggcataaaaggtaagacctgcactcccttgaacctgaccggggtcagggcccttagaggccgaagacctgatgaggcgggagtgagcggattccatcagggccagaggcattgagacctcaccccaaaggccggatatatggaagcattactctttaaagtcattgtgaaacttttccttgcatcgcggggcggaccatata

SEQ ID NO: 8142 - DNA, 1615 bp, unidentified
  source 1..1615: mol_type = unassigned DNA; note = element_cbcec2f
  misc_feature 1..2: note = core
  misc_feature 3..238: note = LE
  misc_feature 239..1501: note = CDS
  misc_feature 1502..1615: note = RE
  misc_feature 14..309: note = bridgeRNA
ctactacaatatatttataggttataaggtactactaatcccattagtaatcccttttatctatcatgttgcttaagctgttaaaatgagagggcaatggtcgggcatattcctccttggactttgcgtccgtgattaagtctgccaaccagctgctcattcacagcgttcgttttatgcaggttgaactgctgtttaccagtacgttcgtgtcacaccccagtagattgaatcggcaatgtgtttacgctggctttccattgcgacaaaactgaaggagctgattgtcttgaacgcagtaggtattgatgttgctaaaggtaaaagtgttgtttcgattctccgaccttacggtgaagtgatctctagtccctttgaactctgtcatacttctagtgccatcgacgacttcattcattctctttcaaacctagaaggagaagttagaatcgtcttggaatacattggacgctatcacgaacccattgctcgttggctctcggatgcggatttttatgtcagtgtggtcaatccaaaactcattaaagattttggaaacaattctcttcgtaaagtgaaatctgacaaaaaagatgcactcaaaattgctcgttacgctcttgacaactggaatgacctacgacagtattgctttatggacaagacaagagatcaactaaaaaccatgaaccgacagtttgatttttacatgaaacataagaccgctcttaaaaataatctcattgctcttttggatcaaacctttcctggagcgaatacttttttcaccagtcctgttcgaaaagatggcagccagaaatgggttgattttgtcgcctctttttggcacgtcgattgtgttcgcaaggtctctttgagtgtgttcactgaacgttatcggaagttctgtgtgcgtaaaggttacgacttccatccagataaaccagcgcaaattttcgaagcctctaaagagttgattgctcttttacctaaagacaaaatgaccaaaaacttaattatgcaagcaattgaacagttaaacactctttctaggactattgagcagttacgcctacagatggatcaaacagctgcacaattaccagaatatcctgtagttatggctatgaaaggtgtaggtccttctttaggtccacagatcatggcagagattggcgatgttcgccgcttttcacgtcgaggcgccttgactgcttttgcaggggttgatccaggtgtcaatcaatccagcacctataatcagaaaagtgtacgaacttctaaacgtggatctgctcaactgcgtaaatcactgtttcaagtaatggacgttttagtgaaaacatcacccgaaaatgatccagtttacgcatttctttctaagaaacgagcagaaggaaaaccgtactatgtttacatgactgctggtgcgaataagtttttgcgtatatattacggtcgagtaaaagagtatctggcttcactttcagaagaggaatgatttttgtttttgagagcataagttgaaaccagcgattatcggtggttctatttgtcatgccttcaatccagatagctctctttccaattttttgcttgactttttatttgcagg

SEQ ID NO: 8143 - DNA, 1498 bp, unidentified
  source 1..1498: mol_type = unassigned DNA; note = element_cbd760f
  misc_feature 1..2: note = core
  misc_feature 3..239: note = LE
  misc_feature 240..1478: note = CDS
  misc_feature 1479..1498: note = RE
  misc_feature 6..233: note = bridgeRNA
ctaatggtattggccgggtcggtttggcaggctcggttccggtagcggccggcgggtcagcactcttctcatctgacccggtgcaggtcttgcggcagaccgtgcgcccgttggtcgtgaggaggcgaaaccgctgctgggatgacgtgccccgattgttgcggtgagcacttgaccattagatcgtcggctgtctcctcctcgctgctgctggtgtccgaaccgaggctggaggcgcgatgttgttcgtgggagatgactgggccgaggatcatcacgatgtcgagatcgttgacgacgccggccaggtgttggcacgcaggcggctccccgagggcgttgatggggtcacccggctgcacacgctgattgccgagcacatgccgagcgagtggaccgacttggaacctgtccaggcggccttcatggtgaaggtcgggatcgagacagaccgcggaccgtgggtggcggcgctggtcgcgaccggctatgaggtgttcgcgatcaacccgatgtcggtggcccgctaccgggagcggcactccacctcgggtgcgaagtccgataccgccgatgctcatctgctggctgagatcatgcgactggaccgggcgcatcaccggccggttgccggggacagcgaccagggtgaagcgatcaagttgactgcccgcgcacatcagagcctggtctgggaccgcacccggcacgtgctccggttgcgctcggcgttgagggacttcttccccgccgcgctcaaggccttccctgatctggatgcgcccgacgcgctcgagttgctggggcgggcaccggaccccgaccaggcagcacgactgaccaggtcgaagatcaccgacgcgctgagacgggcccaccggcgcaacgtcgacgcgaagacgacgcaactgcgcgcggtcttgggtgctgagcagttgcggcagccaccggtgatccagtccgcctttgcggccatcgtgaccagcgaggtcgccatcatcgacgctctgaacacccagatcgaccagctgggtgcggtggtggccgcgcattttgggcagcacccggacgctgagatctacgccagccaacccggcctcggcacgatcctcgccgcccgggtcctcggcgagttcggtgacgacccgaaccgctacgccgacgccaaagcacgcaagaactacgccggcacctcgccgatcacccgcgcctcaggcacaaagaagatcgtcctcgcacgctacgcccgcaaccgccgcctcggcgatgcgctacagcaatgggccttctgcgcgctgcgcggatccccgggagccaaggcctactaccagcagctccgcgcacggaacatcggccaccaggccgctcttcgccaagtcgccaaccgcctcgtcggcatcctccacggctgcctgaaaacccgcacctcctacgacgaacacaccgcctgggcgcaccacacgagagccgccgcttgacttcgaagaacctgggatgt

SEQ ID NO: 8144 - DNA, 1454 bp, unidentified
  source 1..1454: mol_type = unassigned DNA; note = element_cbe7790
  misc_feature 1: note = core
  misc_feature 2..212: note = LE
  misc_feature 213..1439: note = CDS
  misc_feature 1440..1454: note = RE
  misc_feature 9..229: note = bridgeRNA
cgttacctttttcctggccccgcaatggggttcccggcctccgggtccggcatgactcgcccgccctgtcgttcgcatgatccagggtgtgtcgtcaccggtctcggaggcaccggtcagaccgctgatagaggctgggctaccgagccgtgctggtgaggcaggccttcgtaacgtggatgccggcagctggtgccgcaggggccggggcggtgatcgagagggagagcacgagcgtgtccgatctgagcgatatagccgtctacctgggcctggacgtgggcaagggcgaacaccacgccgtcgggctgaccccggccggcaagaaggtccacgaccgggcgctgcccaacagcgagccgaagctgcgggagctgttggacaagctcaccgccaagcacgggcagatcctggtcgtcgtggaccagcccgcctcgatcggcgcgctgccgctgaccgtggcgcgcgacgccggttgtctggtggcctacctgcccggcctgagtatgcgccgggtcgcagacctctacccgggtcaggccaagaccgatgcccgcgacgccttcatcatcgccgatgccgcgcgcaccatgccccacctgctgcgcgacctgaagaccgacgacgagacgatcgccgccccggcgatgatcctcgggttcgacgacgacctggccgccgaagccacccgcaccgtcaaccgcatccgcggcctgctcaccgccatccaccccagcctcgaacgcgccatcggcccgaagctcgcgcaccccgccgtgctcgacctgctcacccgccacggcacccccggccagatccaggccgccaggatcgggcagatcaccgccgcactgcgggagagagcaccgcgcatggccacccgcctggccaccgaaatcttcgacgccctggccgagcagaccgtcgtggtccccggcaccgacgccgcgaagatcatcatcccagggctcgccaccagcctgaaaaccaccctcgaccaacgcaaacgcctcgaagccgagatcgaggacctgctggaggcccaccctctttccccggtcctgacctcgatgcccggcatcggagtcaggaccgcagcgcgcatcctggccgaagcgggcgacgccaccgcgttcgccagcgccgcccacctcgcctcctacgccggactcgcccccgtcacccgccgctcgggcacctccatccgcggcgaacaccccaaccgcagcggaaacaaacagctcaaacgggccttcttcctcgccgccttcgccgcactacgcgacccaacctcccgcgcctactacgaccgcaagatcaacgaaggcaaacggcacaaccaagccctgatatgcctcgcccgacgccgctgcgacgtcctgtacgcaatgctcaaaaacggcacattctacgaaccccaacccacccacaccgcttgacaaagcacatagagg

SEQ ID NO: 8145 - DNA, 1451 bp, unidentified
  source 1..1451: mol_type = unassigned DNA; note = element_cbeaa52
  misc_feature 1..2: note = core
  misc_feature 3..77: note = LE
  misc_feature 78..1202: note = CDS
  misc_feature 1203..1451: note = RE
  misc_feature 1187..1438: note = bridgeRNA
tgatggggtggacggcgcccgacggcatcggatgtgccagaatgagttcgttgagatctcaaacaagggagccgtccgtggaacagcttatccgtattggcatggatacgtccaagagtgtttttcagctgcatggtgtcgacgctgcggagcgtccggtgctggtgcgtaaattgcgacggcgggcggtagtcccgttcttcgccaagcttgcgccagtgaggatcgggttggaggcgtgcggcggctcgcattactgggcgcgcacgctgtcggggctgggtcatgaggtggtgctgatcgcggcgcagcacgtgaagccgtatgtgcggcgcggcaagcatgacgcggctgacgccgaggcgacctgcgaggcgatgagccggcccaggacacgctttgttggggtcaagagcggcgagcagcaagcggcgcagatgctgtttggggtgcgcgagcagctggtgcggcggcgcacgcagctttccaacacgatccgcggctacgcagccgaattcggcctggtggccgcacaaggccttgcccgcatcgagccactgctggcccgcattgccggcgacgcgacggtgccggcgctggcaaaggaactgtttgagacgctcggcgaggaataccgcgcggtgtgcgcgcgatacgcggcaatcgacaagaagctgttggcccatcaccgcaaggacgagactggacagcgactggctgcgatgcccggcgtcgggccggtcgtggcgagcctgctcggcgtcaaggtcactgatgcgacagcgttcggctcgggacgcgacttcgcggcgtggctggggctgacgccgaagaaccattcgaccgccggcaagaaccggctgggggtgatcacgcgggccggcgacgagatgctgcggcaggcgctggtggtgggcgcgacggcccacatccagcaggtgcgtcgcggccgcgccaaggcctcgccgtggctggcggcgttgattgcgcgcaagccgccgaagctggcggctgtggcgctcgccaacaagaccgcccgcatggcctggaagatgatgatcaccggcgagccgtaccgttgcggcccatccgggcagcctgacgcctcctcgccgccctcaaggccgcttcgcgccgcctacggcggtggcctgcggccagccctgaccgcggctcagcacggcgctgacatgcccggataggccgcaacggaggaacaccgaacacaagctcttgcaacggaaggaagatggacgtgatcgatcgatccgtgacgcgcgaaacgccgagggatccattggccaacgaaaccgctggcatgattggaacgggcgtcgcgaaccccaccttggccagcggccgcacggaccgcgctcaaaggccggacatatggacgcaagcgatcgaaaacgacgcaagacaaccgttgcaggcagggcgccgtccacata

SEQ ID NO: 8146 - DNA, 1599 bp, unidentified
  source 1..1599: mol_type = unassigned DNA; note = element_cbed0e8
  misc_feature 1..2: note = core
  misc_feature 3..251: note = LE
  misc_feature 252..1535: note = CDS
  misc_feature 1536..1599: note = RE
tctaccatcggaatttgcaggtgacagaacaggagagcttaaggtataagtgatcctgacgagggtgtggctcttggggtcagtggcctgttcattcaggctcacaacggcctgaaatgccgccctcgtcatctgcatcatccgaggggtcgaccgggatggtgccatattctcaccagaatacgtggctctgtaagtagacgagaccgaaggatgatgaatccgatcttgttttacagaaggagggctacgtgtcagagaaaaaatcattagagttgagagtcagtgtggatgtgggatattggcgccacagtgtggcgatcgggttatccagtggagaggtgctggaggaatttgagatagaacaccggcccgaagggtttaaagatttttttacgcgcattgagaagcaccgaaagacaacaaacagtgcggtagcggtagcgatggaaggatataacggtcatgcccggccgttagacagccttgttcgtgcacggggctatcggctttacaacctcaacaacttaaaattcgcccggttcaaagagatctttcccggatctgccaagagcgaccgcatcgatgcgcataaggggttggagctgtttcagctaagcgatcacctaccgttggccaaagaggtcctgcaggaagtcagtggaacaccgcacgagaatgaagtcctcaaacgattaactcggcgccggcgaagattagttaacgagcgagtgcgggtggtgaacaatctacaggccgatctgcaagcagtgtgtccagggttgttagagatcaccagtgaagcgggcagccagtggtttttaaattttcttctcagtgcggatactgtgccgcaactcgcacggcttcggcacaacaccctgctgaagatcacctcggtgggagtgaagtatgcgggcttgattgaaaactggcagaagcgcgcccactttagcgacgaggtcgagtgggtcagcgagatgatccaagaagatgccaagcgctgtctggaactcgatgagaagattaaacggttagaagtcaagattgccgggattgccaaggactccaagatcgccaagattttacgatcgattccaggatatggagccacgtctagttcagagctggccggagagataggcacgatcgaacggtttgcctccgaaggaagtttctcgctctatttgggcatgtccaccttggataacagttcgggcaagtaccaaggctccaaagcccccaagcatgtcaacacacgggcgaaagcggcgatgatgattgccttggaccgtcatcgaaagtatgtgccagagtcccagaagtactacgagaagaaacgaggagagggaaagaagcacaaccaggcgattcgagctctaggtcgacacctgtctcgaatcatttacaagatgctcaaagaagaacgagaatacgagattcggacccaaaaggggaataccaaggccaaggtcagttcgagatcgtcgcttaaaaggcaaatacggaggtcgaaattttcagcgaacagctaaaaataaaaaatttatcagagcccgcgatgtctggcttatctgcttgaaatttccagcgggatga

SEQ ID NO: 8147 - DNA, 1404 bp, unidentified
  source 1..1404: mol_type = unassigned DNA; note = element_cbf0447
  misc_feature 1..2: note = core
  misc_feature 3..80: note = LE
  misc_feature 81..1121: note = CDS
  misc_feature 1122..1404: note = RE
  misc_feature 1120..1392: note = bridgeRNA
tgttgggttggacggctcccaacggcatcgcgatgtgccaaaggtgatgtcgttgtaggactcacacgagggagccgcccatggaacagattacgcgtataggtatggacacgtcaaagaacgtttttcagctgcatggcgtcgatgcagctgaaaaaccggtcctgcgcaagaagctgacacgccgggaaatgatccgatttttcgagaagctgccgccgaccgatgtcgccatcgaggcctgcggcagcgcgcatcactgggcgcgtctcctcggctcgttcggccatgaggtaaagttgattgccccgcagttggcgaagccatacgtcaagcgcggcaagaacgatgccgcagatgctgaagccctatgcgaggcgatgagccgcccgacgatgcggttcgtgccggtgaagagcactgaccagcaggcggcgcttatgctggtgggcatgcgcaccaggctcatcaagaagcgcacccagcttgccaacgcgatccggggcttcgctgcggaattcgggatcgccgcagcgaggggcatgtgccggatcgaacccctgctagagcgcatagcgacagatgagaccatccccgaacttgcgcgcgaactgttcgcatttcacgggcaggaatatgcgcaacttctgcgcgagatcaatctggtcgaggccaaagttatggaatggcatcgcgctgacgaatgtagccagcggctcgcgaaaatcccaggcatcggtccgatcggcgcatccctgctgatgatgaaggcgccagacccgcgcatgttcaagtccgggcgagactttgccgcctggatcggtttgacgcccagagatcattcaacagccgggaaggtcaggctcgggggcatcacgcgagctggcgatgaactcttacggagcacgcttgtggtcggagcaaccgccgtcgttcagcatgtccgtcgtaccggaggcaggaacgcctcgacttggcttctggggttgctcgaacgcaagaagcccaagctcgttgcggttgcgttagccaacaaggtcgcgcgcatcgcctggaagctgatggtgagcggcgagcaatatcgaagggccgacctgccagcagcggcagccgtggcgtaaaagattggccagacacgatgagcaactactcaacgctatcgtgctgagctgatgccggatcttgcaagaaaagagcagatggtgcgatcgatcgatccaaggcgtgtggcactccatcgggaccaatggccctccgaggccgctgaggtgttaggaactcacgctgcggaaaccatcttggccagcgatcacatgcggtcgcgcccaaaggccggacatatggacgcaagcgatacgatcaaatctttccgctcagcccttgcaagagggagccgtccacata

SEQ ID NO: 8148 - DNA, 1382 bp, unidentified
  source 1..1382: mol_type = unassigned DNA; note = element_cbf137e
  misc_feature 1..3: note = core
  misc_feature 4..87: note = LE
  misc_feature 88..1119: note = CDS
  misc_feature 1120..1382: note = RE
  misc_feature 1151..1370: note = bridgeRNA
tgatgctgtggacggctcctccacgggcacgagagtgccaaagatgtgggcgctgtttaaggctcccacgattcggaggagctatccatgcaaacgatttctacgattggtctcgacatcgcgaagtcggtttttcaggttgacggcgttgatgctagtgggcaggtcgtcgttcggcgtcagttgaagcgtcgctacgtcctggccttcttccagaagctgccgccctgcctggtcggtatcgaagcctgcgcctcatcgcattattggtcgcgcgagctccaggcgcttggccacactgttcgattgatgccaccagcttatgtgaagccctacgtgaagcgacataagaacgatgcaaccgacgcggaggcgatctgtgaagcagtcagcagaccgaacatgcggttcgtcgcaaccaagacagccgaacaacagagctgcctgacattgcatcgtacccgtcacttgttcatccgccagcagaccgcggtgatcaacgttgtccgtgccctttttgcggagtttgggatcgtcgcgccggtcgggcgcaatggcgtcgaacaattgctcgaggtcgccgccgattccaacgacaaacggctgcccgacgttgcccgggcttgtgtaaccgctctcggcgcccaactgcggatgttgaaggtacagatcctggagttcgatcgtatgatcatggcctggcaccgatcgagtgaggcgagccagcggctcgacgatataccgggcgtcggcccagcactggcgaccgctctggttgccagcatcgccgatccgaaggctttccggtcaggaagagacttctcggcctggatcgggctcgtccccaaacagaactcgagcggcggcaaggacaggcttggcagtatcagcaaacggggcgatcgttatctgcgcagcctgttcacgaccggtgcgctcgccgtcatccgctatgccaaaatccacggaaccaagcatcgaccctggcttacagcactgctggcgcggcgacccaccaaggtcgcggccatcgcgcttgccaacaagatcgccaggatggcgtgggcgatcatggcaaagggcgaacgctacaaagaaccggccgcgctcgcggcttgaacgagatcacgtcgggcatccggcatgatgtgaaagttgggaagggcgaacagcacgtaatgcagagccggtcgatccggcgatcaggacaacccacttgggccagagcattgtcgaatgcgcgcttttgatcgggacctgatccgtggagggcattatggcctgcggtcatgtgaaccgcattcaaaggccgaacacatggctgcaccgaccaatgctgcactcgtgaagaaagtccttgccaactcggagccgtccacaca

SEQ ID NO: 8149 - DNA, 1383 bp, unidentified
  source 1..1383: mol_type = unassigned DNA; note = element_cbf69cd
  misc_feature 1: note = core
  misc_feature 2..297: note = LE
  misc_feature 298..1368: note = CDS
  misc_feature 1369..1383: note = RE
  misc_feature 9..291: note = bridgeRNA
ctgtgagtcttgaattagttggtctgggaccaactggcagagtaggagccagccgaccagtcctcgcctgtgaccctaagcctgactggcttcacgaatgccttttgcctgacttgtccgcgcgtggattggatggctggagcctatcccggcccacctcggtaacttgatcagaaggttgtccgccctcagagggagcgtgactcgtcacagtattgttccgaagtgatttccccggactggcttcaaccatagcggcacccccttgtccgcatcaaaggagatcttggaaccgtcatgactatcgtttcgcaaactcaccagtacgtcgtgggtgtcgacacgcacgcaaagaagcatgtttatgccattatcgccgccacgaccggcgaacacatagacacccgagattttcccaccagcagtgcgggcatcacgagagccctgaactgggttggaaagcgtacgctcggtgatgccggtgtcctgtgggtgatcgaagggtgcgcgtcctatggtgcaatactcgctggcaccgtcagtagtgccggctaccaagtcgccgaagcgccacgcatgggcgccaaggcacgtcacggagtgggcaaatccgattcgttggatgccctgcgcatcgccgcggctgtgttgccgttgcagagtaaccaattacgaaccccgcgtctgaacgacggagttcgtgccgcacttcgcgtccttctggccgcccgggactcgatgacaaccgaacgcaccagctcggtgaacgcgctcaccgcactgctacatacctatgaactgggaatggacgcccggaaggcactgacgactgcgaagatcaccgaggccgccaagtggcgtgaacgaaacgaggacctagccttgtccgtcgcacgtgctgaagccatcaggctggcgcaaaacatcgttgcccttgatgagcagttgcaagacaacatgctgcagctcaccgaactggtcacggtcagcgaagcagccccattgctagacatgaccggttgcggccccgtgactgcggcagtagctctgacgacctggtcgcatagaaaccgagtacgctctgaagtggcattcgcgtcgttggccggggtgaaccccatccctgcgtcctcggggaatacggtgcgtcatagactcaaccgaggcggggatcggcggctgaacaaagccctacacatggttgctgtgacgcgaatggttcatgacaaagaaacacgaatctacgcggaaaagcgcaaggcagaaggtaaaacggtcaaggaggttcgtcggtgcatcaagcgcgacctggcacgcaggatctaccgtatcctcaatgctacagttccggccccttcgagtacttgacaaacatagaagggt

SEQ ID NO: 8150 - DNA, 1397 bp, unidentified
  source 1..1397: mol_type = unassigned DNA; note = element_cc049be
  misc_feature 1..4: note = core
  misc_feature 5..89: note = LE
  misc_feature 90..1121: note = CDS
  misc_feature 1122..1397: note = RE
  misc_feature 1092..1384: note = bridgeRNA
agatggggtggttgccgccctcccagacggcattgagatgtgccaaaaatgtgagtgttagagctcactgagcggaaagggaggcaaccatggataagaatacgatgatcggcgttgatctggcaaagaatatttttcagcttcatatcacgacaatgactggcgcgcttttatcgaaaaagaagctttctcgcgacagatttaaagaattcatgaagtctcatgagccggccattgttgttttagaagcgtgcagtagcgcccactattgggccgagacgcttggcgatatgggtcatgatgtaaagttgatcgcgcctcaatatgttaaaccttttgtcaaacgccaaaagaatgatgcggcagacgctgaagcgattgttgtggcagcgcagcgccctgagatgcgttttgtcgcggctaaaactaaagagcagcgcgcgaaagcagttctatttcgatcaagagatcgtttgattcatcatcgaacagagcatgtcaatgcgttgcgtgctgttctttatgaatatggctatgtgatcccacaagggatagcgtctatcagacggattgaagacattcttgcgagaccaaattgcgatctccctgatcttgtttgtgatgaatgtcgccacttgctggaacaaatttctagcaacacgaagcttatcaacgccaagacagatctgattaaacaattagccaaacagacgaatatggcgcgtcagcttcaaacaatccctggcattgggccaatgacggctatggcgattgacgcctttgcaccacccatggatctcttcaaaaatggtcgcggcttatcagcatggcttgggcttgtgccgcgccaatattcgtcaggcggtaaagaacgcctgggacgcgtctcaaaggctggccaggccgatatccgacggctgctaataatcggcgcgatgtcccgcctgaactggttgggaagaaaatctattcctgaggaatcctggttgggcaagatgttagcgcgtaagccgaaaatgcttgttgcgattgcattggccaacaaaatggcgcgaacaatctgggccatgctgacgaaagaaacagattatcgagatccgacgatatccgcgacagcatgatcttcgagatcagcaaagcgcagtatcttcggtagagggagtgtgagaagtcagaccatctgaatgggcaaaacgatcgaaaagatctggttcaggaaaacctgttagaatctaagagttcacgaactcgataattagattaggacctgatccgcggatcaccataccggccggcggcttcttgtaatgctgcattcaaaggccttacagaagaccgcattcgatcacgctgctcagaaagaaaaaacttcttgcatcatgggcggcaaccacaga

SEQ ID NO: 8151 - DNA, 1181 bp, unidentified
  source 1..1181: mol_type = unassigned DNA; note = element_cc07032
  misc_feature 1..2: note = core
  misc_feature 3..235: note = LE
  misc_feature 236..1165: note = CDS
  misc_feature 1166..1181: note = RE
cctctatcttctttaaaagcaccttgatttggtgcaaaagggcggcaggtccgagatcctcgctgcagctgcttccgatcaacagatcgagagcgtcggttagtgtgatccgtgcctgcccttgggcgtgtagagaaaactcgaacagttactggagcgaccaagccggcctttcgccccgagggcaggaccggcctggccagctcgcatctaagaagcaggagttatttatcacgtgaaagaggagcttgtctatttaggaatcgatatcgccaagtcgtatttggatgcggcgattggaagtgaaaaacgtcgtttctttaacgacaccgttggccatcgacagttaatcaggtggattaagcaaactgagtctgcagtccaagtgatttgtgaatcgagcggtggttatgaacgcaaattggtccaggcgcttgctcgtgcgcgggtcaaggtcagtttggtgcaagccaaccgggtgcgccagtttgcgcgcgcagcgggaattttggccaagactgatcggatcgacgcagaggtgctgtgcgagtttggcggagtgatgcggccgcagactgtcagcgctgcaacgctggaacaagagcacttgcgcgaactggagagccaacgccggcacttaacgcatttgctggtgatggaacagaatcgcggcgctcgcgttagcgatgcggcagtggtgagattgaatcgggatttgatcgctcagatcaaaaagcagatcgacaaaatcgatctgctcattaaagcgcacattgaacagtcgcatgaactctcggccaaagtagagaaactgaccgcaatcagtggagttggtttgcgcaccgccgcattactcctggcccagctgccggaactcgggcaactcaatcgtcgtgaagtcgcagctctggtcggagtcgcaccgtttaatcgcgacagcggaaaaatgcgcggtaaacgcacgatctacggtggccgtcgattcgttaggcatggcctttacatggctgcattagtcgcagcccgacacaacccgatcctacggaaattttatcttcgattgcgagctgccggtaaacccgccaaactcgccctgacggcaacgatgagaaaactgctaattgccctcaacagcacactcaaatccgatctaagttatgcttgaaaccaagacagttact

SEQ ID NO: 8152 - DNA, 1451 bp, unidentified
  source 1..1451: mol_type = unassigned DNA; note = element_cc0e566
  misc_feature 1..4: note = core
  misc_feature 5..240: note = LE
  misc_feature 241..1434: note = CDS
  misc_feature 1435..1451: note = RE
  misc_feature 1..229: note = bridgeRNA
ccccgttaccttgttcgtgggcccggcaccgggcccacggtcaccgggcccggtatgacttcttcccccagtcgaacgcatgatccggggggtggtgtcgccgggcgccggtggcgtcgacggaccgctgatggggacagggccgctactcaggtctcttcgtaacgtgggtgccgggcgtcggcgcttcgatcggtgatcgttccgccagcggtttctcacctgacgaggaaacacgaagtgacacaggcatatgccgtgtactgcggcatcgatgtcggcaagggcgaacaccacgccgtgggcctggacccgaacggcaaacgcctcttcgacaaggccttgcccaacgacgaagcccgcctgcgggcggtgttcgaccagctcgccacccgaggccggctgctgatcgtggtcgatcaacccaacaccatcggcgccctgccggtcaccgtcgcccgcgcctgcggtcacgacatcgcctacctgcccggattgtcgatgcgccgcatcgccgacctctacccgggccagtccaagaccgacgcccgcgacgcccacatcatcgccgacgccgcccgcaccatgccccacaccctgcgccgggtcgacaccggcgacgaaaccctcaccgagctcggtgtcctcgtcggattcgacgacgacctcgcaggagaagcgacccgcaccaccaaccgcatccgcggcctgctcaccagcatccacccagcactcgaacgagtcctcggaccccgcgtcgcacacccagccgtcctggaaatcctgtcccgatgcggcggccccgaaggaatccgagccgctggccgacggaaactcaccaccatcgcggccaaacacgcgccccgcatgggcggccgcctggtcgaggaaatactggctgcgttgcccgcgcagactgtcgtagttcccggctctcgctccgccgaaagcgtcctgcccaagctcgccgactcgctgaaaaccgttctgctgcaacgacaacaggtcgccgtcgatatcgaggaaatgctggacgatcaccctcttgcccaggtcctgacctcgatgccaggcatcggagtcaggaccggcgctcgcatcctgctcgaggtcggcgacggcaccgctttcgcctcggccggccacctggcctcctacgccggaatcgccccgatcacccaccgatcgggcagctccatccgcggcgaattcccctcccgatcgggcaaccacaagctcaaacgggcgctgttcttgtcggccttcgccgctttgcacgatcccaccagccgcgcctactacgaccggaaaagagccgagggcaagaaacacaacgccgccctcatctgcctcgcccgacgacgctgcgatgtcctctacgcgatgctgaaaaccaagcagccctaccgaactccccgacccgtcgcagcttgacgaaatccatagggaca

SEQ ID NO: 8153 - DNA, 1451 bp, unidentified
  source 1..1451: mol_type = unassigned DNA; note = element_cc118b7
  misc_feature 1..4: note = core
  misc_feature 5..234: note = LE
  misc_feature 235..1434: note = CDS
  misc_feature 1435..1451: note = RE
  misc_feature 12..237: note = bridgeRNA
ccccgttacatttatttgagtcctcgaaggtcggggacttggtcgctgggcctggtatgactttctgcccctgtcattgatgatccggggggtgctgtcgccaggttcggaggcgcttgttgactgctgatagggacgcggccggacccgtttgggttcaggtctcttcgtaacgtgggtgccaggaacaggtgtcatgactgcggccatctagtggtgcaaaggagcgccatcatgaccgaacaatttgatgtgtattgcgggctcgatgtcggcaagtccgaacatcacgccacagctctcaccccggccggagaacggctcattgataagccattgccgcaggacgagacacgactccgagaactgttcactgctcttggccagcatggcccggtgttgatgatcgtggaccagcccaacaccatcggggcgctgccggtcgcggtagcccgggattgcggatgcgaggtggcgtacctgccgggcctggccatgcggaaagccgcggacctctacccgggacggtcgaagaccgatgcccgggacgcgttcatcatcgctgacacggcacggaccatgccgcacacgttgcgggcggtagaccgagacagtgaagtgctcgccgcgttgaaagtcctctccggtttcgacacggacctgacccatgaatgcaccaggtcgatcaaccggctccggtcgttgctgctgcagatctttccgtccctggaacgggtcttcgtcggcacgatcctcacccgcaccctcgtgctcgacctcttgatcaaatacgccggaccgaccggtctgcgcgcggccgggcgcggcaacgtgctgcgttgggcgaggaaccacagccgcaaagaccccaccaaactcattaatgaaatcttcgccgccctcgaggaacagacggttaccgtgatcggcaccgacgcggtggaactggtcatcccgcgggtcgctgcgcagatcaaagagctcaaacaccagcgggccatcgtcgccgctgaggtcgagaaactcctggacgacttccctctttccatcgtcttgatgtccatgccaggagtcggcatcaagacggcagcgacgatactcctgaccatcggcgatgccagcaccttcaccacggccggccacttagccgcctacgcgggcatcgcgcccgtcacccgccgatccggaacctcgatccgtggcgagtttcccgcacgctccgggaacaaacaactcaagaatgcgcttttcagatccgcctggatcgccagttgtcatgacccgctatcgaaggcctactacgagaagaaacgcggtcagggcaagaagcacaacgccgccatcatctgcctcgcgcgccgccgctgcgacgtcatctacgccatgctcaaaaccaaaacactctacgaggccaaaaccccgaaagccgcttgaccaaaagcatagggaca

SEQ ID NO: 8154 - DNA, 1540 bp, unidentified
  source 1..1540: mol_type = unassigned DNA; note = element_cc15435
  misc_feature 1..4: note = core
  misc_feature 5..254: note = LE
  misc_feature 255..1442: note = CDS
  misc_feature 1443..1540: note = RE
atcacgtataatgttgaacataaagatttcaagtttaaaattttgatttctttatgttttttgttattataacaaacatcggtaaagacggattataacaggcacttcgagtgcgaaagtatgaatgtctgccatatgattatttattaattcggttgtagataatggaacaaaagagttcggatgattaagcgtgtaggaatataggtaattcaatgtggtgttaaccgaaatatttatgaaaggagaaattaatgaaacatattttaagttttgacattgctaaaggaaaaagtgtgtattgttttattgatgaattaagaaatacaattattgatgccacattaattgaacataataaaagtgaatttgataatttatttaaattagttaaagactattcaaatttaattgtattaatggaatctacttctatttatcatttgccagttgaaaattattttagatctaaaggtatagatactgttgttattaatcctaaacttgttaaacaatttaaagataccttaaataaatctaaaactgataaattagattgttttaaaattgctagatgttatttaggaactattgataatttttattttaagaatgacgaatattttatttataatcctcttgctcgtcaatattggtcattagttgaaggtcaaactagattaaagaatagatataaacaattaattgaaatcgttttccccgaatttaaccttatctttaatgatctatatgatgatttggctttgaactttatacatgatttccctcatcctgctttatttattaatagaagaactgattatttaatgaactatttaaaagataaaaatggtacaactcaagcttttagatttaaaaacaaggtattaaaaatgaaagaacttgcctctaattccttatgtttcgtctgctttgattcttatcaagttcaaaatttagttcaagtaatagaaataattcaatttcataaatctgaaattaataaaattaaaaatcacctaattaatgaaatgaaaaacaaaaaactattcaaaataataaattcaattccagggtttggcgaattttcttctgctttatttttagctgaagttggagatataactagatttgacgataaatatcagtttatatcttttgtaggtatagattctgtaacttctcaatctggagtagctgcttatcatggtccgatttctaaaacaggttgtaaatttggtagaactatattatttaatgttgttacaacattattacaaatttctgcacatacagataaaaccaatcctatttatttgttttttagaaaaaaacaatctgaagggaaacaccattataaatgcataatcgcgtgcgaaacgaagttatgtaaaatcatttataaattgtgtacttcaaattgtttatactctaacaaataaaacttatttaatccaaaattttaaaaaattgaggaaactcagttctttttgtcgtgattataatatcacaaaatttacaatttgacaaaacttagata

SEQ ID NO: 8155 - DNA, 1387 bp, unidentified
  source 1..1387: mol_type = unassigned DNA; note = element_cc20921
  misc_feature 1: note = core
  misc_feature 2..93: note = LE
  misc_feature 94..1125: note = CDS
  misc_feature 1126..1387: note = RE
  misc_feature 1163..1382: note = bridgeRNA
caatgggatggactcctcctcaccttaaacggcatcgcaatgtgccaagctggcgaagctaattcccagtaacaggttgagaaggagtccaagatgaagattactcgcgttggtgtggacatcgcaaagaacgtatttcagattcacggtgtcgatcagtcgggtcgaccgatctggaggcggaagttgaagcgggcgggttggctgaggcaaatgacgttgaagctcgagcccggctgcgcggttggcatggaggcctgttctggcgcgcatcactgggcacgggaacttgcgagccggggttttgttgtaaagctgatctcgccgcagtttgtgaagccctatgtgaagagccagaagaacgatgccactgatgcagaagctatctgcgaagcgatgagtcggcctggtatgcgatttgttgcacccaagacggtggaacaacaggatatccaatcgatccaccgagttcgctcatcggttgttgggcaacgcacggcgcagggcaatcagatccggggattggtggcggaatacgggctggtagcgccgcagcacctcggttctctgcgcaaagcgataccggagtggctggaggacgccgagaacggtctgacggatcgatttcgggctttattgcatggcttatggaccgagctgttgcggttcgacgaacgtatccaggcgttcgatgatgagatcgcgcgtattgcggaagcgcatcccgatgcgcggcgcctaaagcagctccagggcgtgggcccgctcattgctacggcgttggtggcacgcttcggcgatgcaagtcaattcaagcgtggccgtgaagcggcggcatctattgggctgacaccgagacatcacggtaccggtggcaagaaccgcctgatgggtatcaccaaacgtggcgacagttatctgcgcggtattctcatccatggtgctcgctcggttgtgactcgagcacatcggaaggacgatcgtctcaaccgctgggcgacggaacttaaggagcgcagtcacaccaatgttgcggcagtagccctggccaacaagactgtgcgcattgcctgggcgatgttgcggaacggaacggattttgaaccgacgcttgccgttggctaacacggacgggagcattactgaacaagaagatattaatgacgattgcacagcaaactgagagatggtgaataggtcggaccggcgtcggcaaaccccgtatgtgtccatgtgcatagagcacgattaaccaatcgggagcggacgcgcgaatacccatcatggcccggcatcacgaatgccagaaaagaggccggatatacgatagcagtcgaacctcagcatcatcgatcagcttgctggcaaacgaggaggagtccatata

SEQ ID NO: 8156 - DNA, 1408 bp, unidentified
  source 1..1408: mol_type = unassigned DNA; note = element_cc240c6
  misc_feature 1: note = core
  misc_feature 2..89: note = LE
  misc_feature 90..1115: note = CDS
  misc_feature 1116..1408: note = RE
  misc_feature 1176..1400: note = bridgeRNA
taatgggatggccgcccctccctaagcggcacctaacgtgccaatgtggcgaatgtaacttcccactgacttgtagagaggcgaacgctatgaaaatcaccacgattggtatcgacttggccaaaaatgtcctgcaggttcatggcgtggatgagcgcggcaaagtgctgctgaaaaagcagctcaagcgggaccagatgatccctttctttgctaacctttccccttgcctgattggcatggaagcgtgcagcagtgcccatttttgggccaacaagctgcaagagctgggacatacggtgaaactgatggcgccgcaattcgttaagccttatgtgaaaaccaacaaaaacgacgctgcggatgctgaggccatctgcgaagcggtaacccgacccaccatgcgcttcgtaccgataaagagcagtgagcaattggcggtcttggctctgcatcgtgctcggcagggattcgtcaaggcaaggactgcccaggccaatcagatccgtggattactggccgaacatggcctcatcatacccttgggcattgtacatattggcaaacgggttcccgaattcctggaagatagcgaaaacggcttgccagagacatttcgcgaattactgatgcgactccacgagcacctcaaggcgctcgacaaacaggtccacgagttagaagaagcgatcgttcgctggcatcaagacagtgccgtcagccaaaaattagcacagttgccaggcatcggaccgatcaccgccagtgcactggtagcttccattggcgatgcaaaaaacttcaagaatggcaggcagttggccgcttggctggggttagtccctagacagcattcaagcggtggcaaacaaacgttgctggggatcagtaagcgtggtgacagctatctacgcaccctactcatccatggcgctcgggccatgttgctggcggcagaacgcaaggagtcgtttgcagggagctggctggccggggtgatggggcaacgcaaccgcaacgtagcgacggttgcacaagccagcaaagcccgcattgtctgggctttgctggcgcacgacagacagtacgatgccaaatatggcgtggcagcatgatgagccggtttatcacgacaaaggctggttgatcgttccgtgacaagactttcataaggagcaccgattgcacaggcaatcatgacgtgatggcgagacaggtcagaccgtggctggtaaaccccgagaaataccgagcacctataagtgcatacgcttgatagcggaaccagccagcaaattccatcagggatagaggctgtagcctcgattgaaatccggatctatggctgcaatctcaacctgactcactttcattgattgggggcttggcaaaccggggcgaccatcta

SEQ ID NO: 8157 - DNA, 1523 bp, unidentified
  source 1..1523: mol_type = unassigned DNA; note = element_cc27b51
  misc_feature 1..3: note = core
  misc_feature 4..246: note = LE
  misc_feature 247..1197: note = CDS
  misc_feature 1198..1523: note = RE
  misc_feature 3..220: note = bridgeRNA
cttatattatatttaacgcagttagctactgccaaagcccaagtggtatacttggaataagccactgtggattagttcatttcctccaatcgcttgacgatttccgaaagggtctaaccacagctttttgtttcaattggtaatgagtttgataacgcatagacgttttatctcgtctaaggtaacaaggcaaaaagttcgtggataaccaagtagacttgaaatactatatctggaggtactcccatgctttatgtgggcattgatgtcgctaaaaataaacacgatgttacagccttgaatgttcaaggaaaaactgttcttaaaccactcactttttcaaataataaagctggttttgaacttttagatctgtctcttcgacagctcgaccaagactatctcatcgctcttgaagataccggacattatgcctttaatctactgaacttcctgcatgaacaaggatataaagtttacacctacaatcctttgctcatcaagaaatttgccaaatcattattacttcgcaagactaaaacggataagaaagacgctcatggcatcgctcttaaacttctttctgaccccaatcgtgaacaatttcaacacgataatcggcaagtagaactaaaaatactggctagacatattcatcgtctcaagaaaaaacagtctgattggaaagtgcaatacactcgttgtcttgatatcatctttcctgagttggataaaatcgttggaaagcattcagaatatacctaccaactcttgacatgctaccctaatcctcagaaaaggcttgaggcaggatttgataatctgatagaaattaagcgattgaccgcttctaaaattcaggatatcctctcagtcgcacctcgttctatcggaacaacatctcctgctcgtgaattcgaaatcatcgaaaacatcaaacattacaagaggctcattgacaaggcggaaaaatgtgtcaatgacttgatggctgagttaaactcggtcatcacgacggttactgggattgggaatcgtttaggggcggtcattttagccgagattcaaaatattcatgcctttgataatcctgctcaattacaagctttcgctggactggattcttctatttatcagtcaggtcagattgatttagctggaagaatgatcaaacggggttcccctcatctgcggtaggcactcatacaagctgccaaagcatgcgctcgcttttcacctgcttttaaggcctatcttaagactaagttagaataaggaaaacattacaatgtagccatcatccaccttgcaaaaaaacttatccgaaccctgttttatatcctaaaaaagagctgccatttgacgaacaaaaagtgatgtaatttctgaaattaacacaggattacctttgaaaaaatggactttttcaagggctttttgccgtgctctaaaatcatcgccaaatcatcaaattgaaataagaagtagtttagataaaactattgacttttcttatagtttgt

SEQ ID NO: 8158 - DNA, 1161 bp, unidentified
  source 1..1161: mol_type = unassigned DNA; note = element_cc28161
  misc_feature 1..2: note = core
  misc_feature 3..201: note = LE
  misc_feature 202..1149: note = CDS
  misc_feature 1150..1161: note = RE
  misc_feature 35..207: note = bridgeRNA
cttgtcttatgacctttccaccgactgcgggataaatggccaccgtcagcgggtggccacccgctgacggtggaggggtcggatcgggatcaggctggccgtgctgggccgaactagagttggatcgccccttcttttccttgtgacctgaacggatacccggagttgggctccggatgacaagcataggacgtggaaaagatgagcgaacataacgcagataccgttggagtcgatatctcgaaagatttccttgatgcaaatatccatccctccggcattgccaaacgctttgccaatgatgccaagggccatcgcgccctgatcgcctggctgcaaggccgccaggtggaacgtgtggttttcgaggcaacgggtgcctatcaccgcgccttcgagcgaacgctcgcggcggctggcttgcccatggccaagatcaacccacgccaggcccggcgatttgccgaggccatcggcaagctcgccaaaaccgatgccatcgatgctgccatgctggcccgcttcggtgcgctgctgaccccgcagacacgcgaacccgtcagccaaacccttgatgagatgaaggaactccacaacgcccggggggctttggtgaaggaccgaaccgcgacacttaaccggcaaaagcaaatgcgcagtaccatcctcaagcgtttggccgcccaaaggctgaagcagatcgacagccagctcaagaccattgatgccgccctggccgccttgcgtgacggtgatgccgccgtcaaagccagattcgacatcctcatgagcattcccggcatcggtgctaccacagccttcgccatgctgatcgagatgccggaaatcggcacaatggaaaacccgcaggcggcaagcctcgccggtctcgcgccactcgcccgggacagcggaaaatggagcggtaaacgatcaattcgcggcggacgggcaaacctgcgccaggccatctatatgccagccctcgtcgcaaccaggttcaatccagacttcaaagccaaatatcaggccatgatcgccgccggaaaacccgcaaaagtcgcaatcaccgccatcatgcgaaaactcgtcgtcctcgcaaacgcactactcaaagcaggccggaactggcaacctaaagccgcttgaccacaacggata

SEQ ID NO: 8159 - DNA, 1176 bp, unidentified
  source 1..1176: mol_type = unassigned DNA; note = element_cc29426
  misc_feature 1..2: note = core
  misc_feature 3..232: note = LE
  misc_feature 233..1162: note = CDS
  misc_feature 1163..1176: note = RE
  misc_feature 6..237: note = bridgeRNA
cttgtatcttctttaaaggcgtcctgattctgggtaaaccagaggcaggtgtgagatcgccgctgcagctgcttctgaccgagaggttacgagcgccggttagtttgatccgcgcctgcccttgggcagtgagagtaaactcgaacagttacaggagcgaccaagccggcccatgcccgggggcggaccggcctggccagctcgcatcgtacaagcaggagttatttatcacatgaacaaggaactcgtctatctgggagtggatgtggccaaaaagtatttggatgcggcggttggaagtgagaagcgccgtttgcctaacgattcgtctggtcatcgacagctgatcaagtggatcaaacaaagtcaggagcccgtgcaagtgatctgtgagccgagcggtggttacgaacgcgggttaatccaggcgctgatcaagagcgatgtgaaagtgagcctggtgccagccaaccgggtccggcagtttgcgcgagcggccggtgtcttagcaaaaaccgatgacatcgacgcgaaagtgttgtgcacctttggcgccgcgctcaaaccggccaccttgacggccaatcggctgcaacaggagcaactgcgggaactggagagccagcgtcggcatctaagccgggtgctggtgatggagcaaaaccgcggcacgcgcctggcccatgcctcggtgtgcaagttcaatcgcagcctggttaaccaaatcaaaaagcagatcgagcaaatcgatctgctcattaaacaacacatcgaacaatcgcccgagctctcggccaaagccgacaagatgattgccatcagtggagttggaccgcgcacagcggcattgctgctcgcgcaaatgcccgagctgggacaactcaaccgccgcgaggttgctgcattggtgggcgtggctccctttaatcgcgacagcggcgtgatgcgtggtagacgcacgatctttggcggccgtcgcgaagtgcggcacggcctctacatggccgcgctggtcgccgcccgccacaatccagttctgcgcagcttttatcagcgattgcgcggcgccggcaaacccgcgaaactcgccctcaccgcaactatgcgaaagctgctgatcgtgctcaacagttccctcaaaaccgatctaagttatgcttgaactcaagacagtta

SEQ ID NO: 8160 - DNA, 1454 bp, unidentified
  source 1..1454: mol_type = unassigned DNA; note = element_cc39aba
  misc_feature 1..2: note = core
  misc_feature 3..171: note = LE
  misc_feature 172..1200: note = CDS
  misc_feature 1201..1454: note = RE
  misc_feature 1237..1424: note = bridgeRNA
agatggggtaacgggccccggtctgccctccaagcaagccgcgcttgctacggcgctattgggtagcgcgctgcgcgcggcttgcttggagggcgggcggtcgtccctcacattgatggtgtgacggagtcgagggatgagcctcgctccaaacatcgaggagagacgaccatggaccattatgctggaatcgacgtgtcattggaatgctcgagcgtgtgtgttgttgacgccaacggcaagattttgcgcgaggccagggtagccagcgagccggaggcactgatcgcctggttcgcttcgctcggcttcggccttgagcggatcgggctggaggccggccccttgtcgcagtggctttttgcggcgatgcgggaagcggggctggcggtggaactgctggagacgcggcacgtgcggaaggcgttcgaggcgatgccggtgaagtcggatcgcaacgatgcgcgcgggattgcgcaactgatgcggctgggctggttccggccggtacactgcaaatcgatcagcgcgcaagagacccgaacgctgctgacggcgcggaagctggtgcaatcgaagcttcacgacgtggagaacagcctgcgcgggatcctgcgcggctttggtctcaaggtaggcaagaccacggagcgtgagttcgcgggacggatcgaggagcttgtggtgggccatccgcacctccaggtgatcgccaatgcgctgttggcggttcgcgcggtgctgcggaaggagtttgcagctttcgagaagcaggtgcgcaagatggcgcgctccgacacgcgggcacggcttttgatgtcgacgccggcggtcggcccgatcgtggcgctgacctatgccagcgcgatcgatgatccgacccggttcaaatcgtcgaagcaggcaggagcccatttcgggttgaccccgaagaagcatcaatccggcgagaccgactacaccggccggatcagcaagatcggcgatagctcggtgcgcaccgcgctctacgaggcggcccacatcatgctgaccaagccgctcaagggctgttcgcaactgaagagctgggcgatgcggatcgccaggcgcgccggcatgagcaaagccaaggtggcgctggcgcgcaggctcgcggtgatcatgcaccgcatgctcgccgacggaacacccttcaacgccgctgcaacagcagcctaacagggagaggcgcaacagttttcgggcgggtcacgacaccaggccttctcgaagcgaagtcccttcgccgggacgatggatcaggtcagaccgttgcccaccaggtagcttcctgagagcacgcgaacgtagattggtcgacctatcctcttccaaccccatcaggtggcggccatgcgccgaccccgtacagaagcgagaccccggcgagcggataacgcaaaagggattgactaatcgaggcccgttacaga

SEQ ID NO: 8161 - DNA, 1405 bp, unidentified
  source 1..1405: mol_type = unassigned DNA; note = element_cc4f8b3
  misc_feature 1..2: note = core
  misc_feature 3..70: note = LE
  misc_feature 71..1105: note = CDS
  misc_feature 1106..1405: note = RE
  misc_feature 1177..1402: note = bridgeRNA
taatgggatggtccgtcgtcttccagatttgtctgtggcaggatgaaggcgagcacaggaggatttccccatgacagtacacgtttgcggcatcgacattggtaagaccgtgttccacctggttggcctgagcaaggaaggccacgttgttcagaagaagcgcttcagccgcaagcagctgctcacgtacatggtgaacgcgccggcatgtctggtcgggatcgaagcgtgccccggcgctcatttcctcgcccgcgctcttctggcgcaggggcacaacgtgaagctcatgcctgccgagtatgtccgacccttcgtcaagtcaaacaagaacgactatgtggatgctgaggcgatcgccgaagcagtgcagcggccgacgatgcggttcgttccaatcaagaacgagactcaacttgatctccaggctttgcaccgtgtaagggatcgctgggttggccggaagactgccgtgatcaaccagctgcgtgggttccttctggagcacgggatcacagttgttacagggccagcgcatctcaagcggcagattccctccatcctcgaggacgccgacaatctgctctcgccacgcatgagaacgctcttgctggaacttcgcgatgagtgggtcaagctggaagagcagatcgatgctgtcaaccgcgaactggctgaggtggccaataaggacgacggttgccggcgattactcacgattcccggcatcggaccgctgaccgcgaccgcgctgactgccgcgatcggtaacggcgcagcctttcgcaagagccgtgatctcgcagcctggctcgggctggttccacgacaacattcgacaggcggcaaggccagacttcttggaatcagtaagcgcggaaacccttatctgcgcaggctcttcgttcacggtggccgggctgtccttgctcgggtgaagcgagaacgacaccagtttgggggttggctcgaccgactcgaagcccgatcaccgcggaacgtcgctatcgtcgcgatggccaacaagattgcgcgcatggcatgggccatactcaccagcggccagagctatcgggccagtgctgacgtcattgcaatcacgtaaggaaaagatggaaatcgcagcgcgattcccactttcccttacgacggcgacgaaggtttataggttctcaccaggtttgcaagtagattgattgctggctgaacaggtctaatcggcccactctgatcctgattgggtttacggtctgcaactgaggccgccgggtattgaggagagagggggcgcggattccatcatggctcgagcagatccatcgcttcaccaagaagccgtatacataggagcagaccgcttccactatcaaaagatcttgcttgcaatcaggcgacggaccataca

SEQ ID NO: 8162 - DNA, 1424 bp, unidentified
  source 1..1424: mol_type = unassigned DNA; note = element_cc52644
  misc_feature 1..2: note = core
  misc_feature 3..204: note = LE
  misc_feature 205..1407: note = CDS
  misc_feature 1408..1424: note = RE
  misc_feature 3..171: note = bridgeRNA
tccttaagaatgtgaggcggtccgggagggccgggtgtggctgatggttgtctgccgttgatggcttgaggagaatgggcgctcggtcctccgggacgctccgaccactgattgagaactgcgggcatcgctggttaaggacctgtcggcggagtgttctccgggccacggaagcgctggtcacggtggaacggagcgacgggcttgagcacgtctcacgcgcggatctgggtcggcatcgacgccggcaaggggcatcactgggcagtggcggtggacaccggcggcgagacgctgttctcgacgaaggtgatcaacgacgaggcccagatcctggcgctgatcgacactgcccgggagaaggccggcgaggtgcggtgggcggtggacatctccggccgggcctccgcccttctgctggccctgctcatcgcgcacggccagcaggtcgtctacgtgcccggccgcaccgtcaaccggatgaccggcgcctaccgcggcgaaggaaagaccgacgccaaggacgctctggtcatcgccgaccaggcccgcatgcgccgggacttcacccccatccagactccgcccgagctggtctccacactccagctgctgaccgcctaccggcgtgacctgatcgccgaccgggtccggctcatcaaccggatgcgtgacctgctggtcggcatctgccccgccctggagcgcgcgttcgactactccgcggccaaaggcccggtgatcatgctgaccgaataccagaccccggccgccctgcgccggatcggcgtcaaacggctgaccacctggctggaacgccgcaaggtccgcagcgccggcaccgtcgcggccaaggccgtcgaggccgcccagttccagatggccgccctgcccggcgagggccgggcagccaagctggtgcgcgacctggcccaccagctcctcgccctggacgagcggatcaaggacaacgaccgggagatccgcgagaccttccgcaccgacgaccgcgctggcatcatcgagtccctgcccggcatgggcccgatcctgggtgccgagttcgtcgccatcaccggcgacctgtccggctaccgcgacgccggccgcctcgcctcccacgccggcctcgccccggtcccccgtgactccggccgccgcaccggcaactaccaccggccccagcgctacaaccgccgtctgcgctggctgttctacatgtccgcccagaccgcgatgatgcggccaggaccctcccgcgactactacctcaagaaacgcggcgaaggactggtccacgcccaagccctgctctccctggcccgccgccgcgtcgacgtactctgggcgatgctgcgtgacaagagactgttcacctccgccccgccagccacgcagacggcttgacacggtcattgagattt

SEQ ID NO: 8163 - DNA, 1433 bp, unidentified
  source 1..1433: mol_type = unassigned DNA; note = element_cc557a7
  misc_feature 1..2: note = core
  misc_feature 3..133: note = LE
  misc_feature 134..1153: note = CDS
  misc_feature 1154..1433: note = RE
  misc_feature 1193..1433: note = bridgeRNA
gaatgaaatgaacgcgtcccaccccgtgatcgagtaggaggaaaggcgaggcagtggatcctcacgggccaacggcatcgatgtgcccacgtggaaaatacgaagttttccaaggcaaccggaggatccagtgatgaattgtacggcagtgggtgtggatatcgccaaacacgtgttccaggtgcattacgtcgatcaggaaaccggcgagattgtgaacaagccgatcaagcgagcgaagttccttgagcacttcgcaaaccatgcgcggtgtctgatcgggatggaagcatgtagtggtgtgcaccactggtcccggcaacttacgaagatggggcatgaggtcaagttaatgcctgcggagttcgtaaaggcattcaatgtacgaaacaagaacgacgctgccgatgcgcgggcgatctggctggccgtgcagcagcccggcaaaccagtcgccgtgaaaacggaaatgcagcaggcgatgctggcgttgcacaggatgcgacagcaactgatcaagtttcgcacgatgcagatcaataacctgcgagggctcctgacggaatacggcgaggtcatgagcaaaggcagggagaagctggccaaggaaatacccgccgtgctcgaacggattgaggagcgtctgcccgctgtgttggtcgatacgtttcgcgaacagtggaacggactgacaaagctcgacgagcaggtaacagagatcgaacgccgtatgcgcgagtggaagaaggaagacaaggcagttaaggcgatcagcgagattccgggcgttgggctgctgacggcgacggcggcagtcgcgatgatgggtgacgcgaaggcgttcaggtcgggacgggagtttgccgcgtgggtggggcttgtgccgaagcagacaggttcgggcgggaaggtaaacctgcacggcatcagcaagcgtggcgacacgtatttgcgcacgctgctgatccacggcgcgcgatctgtgctggcacatgcaaaggaacctggtgagtgggtcgtgcagatgcagaagcggcggccaaagaacgtcgtggttgtcgcattggccaataagatggcgcgaacaatctgggcggtgcttgcccatgatcggccgtaccagaagggatatgtgagcgtgaagccagtctgaacagcccgcgccatgtagcagatcaacgtttacacagggatgaacgtcgaaaggttgcgcagcaatcgaatgtgatgacaagccaggtaggaccgggactcgctaaacctgaatgacttccagagcgtcgagctcgcgaagggaatgaggtgcgggtcagcggatttcatagggggccgcagcggcaataccaactgcaataagcccggatatagagatgcagcccatccttgtctgtctgaccatacgaaaactgttgcaaacgggacgcgttcatata

SEQ ID NO: 8164 - DNA, 1155 bp, unidentified
  source 1..1155: mol_type = unassigned DNA; note = element_cc5a125
  misc_feature 1..2: note = core
  misc_feature 3..207: note = LE
  misc_feature 208..1143: note = CDS
  misc_feature 1144..1155: note = RE
  misc_feature 13..209: note = bridgeRNA
cttgtcttatgacttccctcggctcctttgcgataagggagttgctgcccggcacccaaatatgccgggtagcggcgggggacggatcgataaagggtcggtcgttatgggccgtgcggtagtgtgatcgcccctgtcttttctcatgacctgaacggatagcagggcttcgggcctgcatgacaagcagaggtaaggaaaagacggatgcaggatatcatcggcatcgacatatcaaaagaccgtctggacgcgttccggctctcggatcggaagcacaaggggttcggcaacgacaaggcggggttcaagaatttgctgagatggatcggcaaccccgaaggattgcggatcgtctacgaaccgaccggcccctatcatcgcgcaatggaggaagcgctcgcaagggcgggccatgcgctggtcaaggtcaatccccgacaggcgcgccgcttcgcggaggccacggggacgcaggccaagaccgatcgggtggatgccatgctattggcgcggatgggcctcgcgctcgatctgccgccgcggccggttcgcggcgaactcatgaatgagttgcgagagttgcacgtcgcgcggctggcgctgatcaaggaccggactgctacggggaaccgcactgacaaggcagtgatcggcttgatccgccgccaggcgaaagcgcggctggccatcatcgagaagcagctcgtcgagattgacgagaccatcgccgccaggatcgccgatgatcctgagttggccgggcgtctcgatatcctcaccagcattcccggcatcggcgccgtgaccgcctgcatgctgctaatagagatgcccgagctcgggaccctcgagccgaaacaggcggcgagcctcgccggtctggcgccgttcacgcgccgttccggcaagtggaagggaaaggagatgatccgtggtgggcgcgcgaccctgcgttccgcgatcttcatgccggccctcgtcgcgattcggtttaacgcggccctcaagtgcaagtaccgccagctgatcgaaagtggaaaggcaccgaaggtcgccatcaccgccgtcatgcgcaagctcgtcctgctggccaacgcgctgctgcgcgacggccggaaatgggtcgacagacccgcttgaccaagacggata

SEQ ID NO: 8165 - DNA, 1340 bp, unidentified
  source 1..1340: mol_type = unassigned DNA; note = element_cc680aa
  misc_feature 1..2: note = core
  misc_feature 3..234: note = LE
  misc_feature 235..1098: note = CDS
  misc_feature 1099..1340: note = RE
  misc_feature 1064..1327: note = bridgeRNA
cgatggggtggacgcctcctaacggcatcgcaatgtgccaatatagcggtgtcgaaacgttgctatagctgaggagacgtccatgggtgaggttagcattatcggaattgatctggcgaaaaatgttttccagttgcacggcatgatggccaacggttcagtggccttccgccggaagctctcgcgatcgcggttattgccgttcttgctgaacatccggtttgccttgtggcgatggaagcttgtgcgagcgctcactactggggccgcgagatcggtaagatcggccacgaggttcgtttgattgcgcctcaatatgtcaaaccgttcgtcaaacgccagaaaaatgatgccgctgacgcagaagcaattgcggaggcagcatctcgccccacgatgcgctttgttgcggtcaagagcgccgaacagcaaagccaggcaatggtattcaagacgcgggatctattgctgggacaacggacgcaggcgatgaatgccttgcgtggacaccttgcagagtacggcgttatcgcaccgcaggggatccagtatttcggaaaccttgcaagggttgtagaggatggggatgcagcacttccacaggctgttgttgagctggcgaaagagcttcctgcccatattggtatcctcaacgaacgcatttcggctttggacgagcgtataagaaacattgctaaaacggatgaaactgctcggcagttgatgacaattcccggaattggtccgattacggctaccgcaatggtcgcgatggcgccaccgacatcaactttttcaaaaggtcgcgattttgcggcttggcttgggctaacaccaaagcagaattcaactggcggcaagacgcggttgggcgaaacatcgaagatggggcaaagagatttgcgacggcttctgatccttggggcaatggctgttgtgcaaaaggcagcacgatatggtgccgctgaagggtcgtggctgtcgcgcatggttgcgcgtaagcccaagatgctggtcgcagtcgccttggcaaacaaaatcgcccgtatcgtctgggccttgatggctcgcggtggggtagttgtccggagacgatgaaatgcggtggttctaagcggaggtttatgggcgaaaagtcgagaagacgggatctgaagaaccagtttccggccaggtgccttttgagcacgcctagtcgatttggatctgatccccgaacgatccataagggcccgcggtgtctgataccgcactttgaggccggacacacgacggaactcgaccgcattgcctgtagccaaagtaaaaaaatcgcttgcatttccagaggcgtccacaca

SEQ ID NO: 8166 - DNA, 1442 bp, unidentified
  source 1..1442: mol_type = unassigned DNA; note = element_cc6b0ae
  misc_feature 1..3: note = core
  misc_feature 4..236: note = LE
  misc_feature 237..1427: note = CDS
  misc_feature 1428..1442: note = RE
  misc_feature 15..200: note = bridgeRNA
gccctactttcttgattgttgggttcgaactggtcattcgtaagatcagcgggacccaggggctctgggtatggctgtcatggcggcgccgtgagatggctggaaaggcttggccgcccggagccccgcgacgactcgaccgccaattgggagatgcgactcgatcgctgcgtagggcaacgtcggcgaggtcgtctgctgggctgtgaacgcgcgacgagctggcggaggtgaccgtgccccggatatgggccggagtggacatcggcaaggaacatcaccactgcgtggtgatcaacagtgacggcgaacggctgctgtcccgccgggtcctgaacgacgagtcggccctgctggaactgatcggggacgtcctggccctcgacgaagacgtgctgtgggccgtcgacctcaaccacggtggcgccgccctgctgatcggactgctgctcggccacagccagccgatggtctacatcaccggcctgaccgtgcaccgcgcatcggcctcttaccggggcgagggcaagacggacgccaaagacgccttcgtcatcgccggccaagcccgcatgcgccgtgacctgggcctgctgcggcctggcgacgagatcgccgtcgacctgcgcaccctgaccacccgccgcaccgacctcgtctgtgaccgcacccggcagatcaaccggctccgtgcccaactcctggagatcttccccgcgttggagcgggcgctggacctgaccaacaagggtccggtcttgctgctgacgggttaccagaccccggcggcgatccgccgcgcaggcgtgaagcgcatcgaggcgtggctgaaaaaccgcaaggtccgcggagctgccgcactggccaaagcggctgtggaggctgccgaggcccagcacacggccctgcccggcgagcagctggccgccgccatggtggtgcgcctctcgaagggggtgatggccctcgatgaggagatcgcagaactcgaagccctgatcgaggcccggtttcgcgagcacccgcacgccgaagtgatcgtgagcctgcccgggatgggcaagctgatgggcgctgtgttcctcgccgtgaccggtggcgacatggacgccttcggcagcgccgaccggctcgccggctacgccggcctggccccggccccacgcgactccggccgcgtcagcggcaacctccgccgaccacgccgcttccaccgcggcctgctcaacgcgatgtacctgtcggccctgtcgagcctgaagagctgcccggcctcgaaggcgtactaccaacgcaaacgcgccgaggggaaaggccacaagcaggcgctgctggcgctcgcgcgccgtcgcgtcaacgtcttgtgggccatgatccgcgacggagcgtgctaccaagccacaccacctgtcacagcagcggcttgacatcagcattgggaa

SEQ ID NO: 8167 - DNA, 1394 bp, unidentified
  source 1..1394: mol_type = unassigned DNA; note = element_cc6dc91
  misc_feature 1: note = core
  misc_feature 2..98: note = LE
  misc_feature 99..1130: note = CDS
  misc_feature 1131..1394: note = RE
  misc_feature 1175..1391: note = bridgeRNA
taatgtaatgaaccatccctacccactcagctgacaacgtgctttgcaatagcttagtattcaagttgagtgccttcaaatttggatgggagattgacatgaaacttagcgtagtcggtatcgatattgccaaaaatgttttccagttacacggtgttgataatacgggtaaggcggttctaaggaagcgcatgacccgtgacaaactcggcgcctatattgccaatctatcgcaatgcacgattgtaatggaatcgtgtggtggggccaattactgggcgagagttttcgagagaagcggtcatctcgtgaaactaatcagtccgcagttcgtaaagccttttgtcaagacaaacaaaaacgatgcgaatgacgctgaggcgatcgtggaagcggcgagcaggcccgcgatgaattttgttccaatcaaacaagctgaacaacaagatatccagtcgatacacagagttcgcagccgagtcgtcagaaatcgaacggcgttgatcaatgaaatcagaggcttaaatttggagtacggtattacgatcgcacccggcgcatcgaaggttaaaaaagcgatgtgttctattattgctgacaacgagaatgggctcacgcaatcgttacgagaatgtatgcaggatctttatgatgagcttgtagctgttgaaggcaggcaaaaaaagctggagaaaacgatcaggcatatctgcaaacagaatgaaacctgtcgtcgaatattgaaagtaccgggggtgggtgaattgacggcgacagccattgttgcggctgtacctgatgcgaatgaatttaaaaatggccgtcatatgtcagcctggctaggactagttccaagacagtcgtcgagcggtaataagcaagtgttgctcggcattagcaagcgaggcgataggtatttgcggacattgctaatccatggagcaagagcggcattaagccattacaaaaacacggataatgactatggacgctggttaacaggcaaaaaagcaacgcttagctttaataaagcagctgtcgcgttggcgaacaagaatgcacgaataatatggtcgttgcttaaaactggcgatgaatttaattgtggagttcaaagggtcgctgcctaatactcaatattgggtggtttttttcaacatcgaagaaaatatcacaagtttgctgtagttgattttgatgatggttaataggtcaaaccgactcttttaaaccctgttttgcaacacggtctatagaggccatggctctgatgaggagaaagagtgcggatttacattagggcgcaagcatagcttcgatgccgaatatatgaccgcaacttagatctatagcatgatctgaaaatcagcttgcaaaaggggatggttcatata

SEQ ID NO: 8168 - DNA, 1499 bp, unidentified
  source 1..1499: mol_type = unassigned DNA; note = element_cc6f2d1
  misc_feature 1..2: note = core
  misc_feature 3..243: note = LE
  misc_feature 244..1479: note = CDS
  misc_feature 1480..1499: note = RE
ctaatgagtgttggcgagcctgctgtccggcagactcggggtgtggtggccgccggcaggtgagcacttggttgtcctgggcttcgagccctgacggaagaccgtgcccctgccggtgaccgggaggattgatcgctgctgggatgtcgtgccctccggatggggtgagcacagtttcattaggtcgctgatggttctcccgctggctgccgacgaggtccggcatttcagacgggagaattgatgcggttgttcgtgggcgatgactgggctgaggaccatcacgatgtggagctgatggaccaggccgggcgggtgctggcgaagcggcggctgcccgagggcgtggcggggatggccgggctgcatgagctgatcgggcagcagctgggcgatgacgcggacgatgcggaggtgctgatcgggatcgagaccgaccacggcccgtgggtggccgcgctggccgccgcggggtacacggtgttcgcggtcaacccgctgcaggcgtcccgttaccgggagcggcacggcgtgtccggggccaagagcgacagcaccgacgcgcacatgctcactgacatggtgcggaccgactcccaccagctccgggcagtggcgggcgacagcgcggacgcggagggcatcaaggtgctggcccgcacccacaagacgctgatctgggagcggacccggcaggtgcagcggctgcggcaccagctgcgggagtacttccccgccgcgctggaggccttcgaggacctggacgccggcgacacgctggagctgctcggcaaggcgccggacccggcgcgggccgcgaggctgacccgcgcgcagatcagcgccgcgctcaagcgcgcccgccgccggaacatcccggacaaggccaccgcgatcatggccgcgctgcgaggtccccagctgggccagccgccggtcatcaccgccgcctacgccgtcaccgcccggtccctgatcgcggtgatcaccgtcctgaacgagcaggtcaaggccctgcaagggcaggtggaggagaattttggccagcacccggacgctgagatctaccggtcccagcccggcatgggcgccatcctcggcgcccgggtgctcgcagagttcggcgacgacccgcaccgctacgccgacggcaaggcccgccgcaactacgccgccaccagccccatcacccgcgcgtccgggaagaagaaggtcgtcgccgcccggctcatccacaacgaccggctcgtcgacgcgctgaacgcccaggccttcgcctccctgaaagcctcgcccggcgcccgcgccctctacgacgacctccgcgcccgcgggatcgagcacaacgacgccctgcggagactggccaacaggctcgtcggaatcctgcacggttgcctgaaaacccgcaccctctacaacgaggcaaccgcctggtcccaccgggcaaacctccctcaatcttccgtagcggcttgacacttaagctcctgggatgt

SEQ ID NO: 8169 - DNA, 1332 bp, unidentified
  source 1..1332: mol_type = unassigned DNA; note = element_cc72094
  misc_feature 1: note = core
  misc_feature 2..62: note = LE
  misc_feature 63..1094: note = CDS
  misc_feature 1095..1332: note = RE
  misc_feature 1109..1329: note = bridgeRNA
taatgggatggacgcccctcttaagctgataatggcctgtgaactcagttgagaggtgagtcatggaaacgatatctgttattggtctcgacttggcgaaaaatgtgtttcaagtccactgcgcggacgagaaaggttgctgtcttcagtccaaggcgttgcggcgcgctcaactgctacagtttttcgcgatgttgaagccgtgtctggtgggtatggaggcatgtgggagctcgcactattgggcgcggcagctgcagatgttggggcacgacgtgcgacttatggcaccgcaatacgtcaaggcctatgtgaaaacgaacaaaaatgatgccgctgatgccgaagccatctgcgaggcggttacccggccgggcatgcgctttgttgacatcaagacggaggaacagcaagcgatactgcttctacatcgggacagagagggtttaactcgggacaggacggcactgattaaccggcttcgggccacgctcgcagaattcggtgtagtaacgcctacggggccacagcgattgaagcactggttccaagaggactacagccactatggcaccgccttatccgccttggtgcagcgccaggtagagagaatgcggacaaggctgcgcgggctggatggtgagatcgccgcactggatgtcgagattgacctgacaagccgaagtaacgaagcatgccagcgtcttgaagccgtacccagtatcggtcggctgacggcctcagcactggtagccaccgtgggcaagggtcaatcgttcaaatcgggtagacagttcgcggcttggctgggccttgtcccacgtcagcactccagcgggggcaaatcgcgcttactggggatcagcaaacggggcgatgggtatctacggcggatgttaattcatggtgccagagcagtgatcaggcacatgaatcctaaacgctcggtcacgggctggctggcacagctttctgcccggactcatcataatgtggtgattgtggctttggccaacaaactggcgcgcattgcgtgggccatgcagtacagagaacggacgtactctgaagcacttgttgctggccagagatagcaaaacgaacttcatggttgtgcgtaggtaggtatgacattgatggcgatacggttcgaaccgcggcctggaaagtctggtcctaacatcgttcataatagaacgaccaaatgtttagacccaggtcggcggatttcatcagggatcgaggcgctgcctcataaagaatccgaatagatggctgcataaccgcattgtgatcgagtcgcctactcgcacaaaccggggcgtccataga

SEQ ID NO: 8170 - DNA, 1419 bp, unidentified
  source 1..1419: mol_type = unassigned DNA; note = element_cc8bd78
  misc_feature 1: note = core
  misc_feature 2..221: note = LE
  misc_feature 222..1247: note = CDS
  misc_feature 1248..1419: note = RE
  misc_feature 15..233: note = bridgeRNA
ctgatggaggatctgggcgggcgttgagcgtgggctcgtagcgtcccggggtctcggtcggctggctcgcgaactgcctgctgctcgcgtgtcgggttggcttttgaacgaagcgccagccggtcgaggtccggtcacggcgtggctcgaaagaggcgagcagcacctgcatcaggagtgcccgtcgtgacgctcacacgcgtccacgaggagggacttccatgtcggtgattatcgggatcgatccgcacaaggcgacccatacggctgtcgcgatcaaccgtgacgaacaacccattgccaggctgcaggtggtggcggatcgatgccagaccgagcggctgttggcctgggcggcagcatttggctgcgagcggacctgggcgatcgagtcggccggtgggttgggcaagctgctggcgcagcagctggttggcgccggtgagcaggttgtggatgttccgccgacgttgtcggcgcgggtccggttgctggggtcgaccaaggccgccaagaacgacagcaacgatgcgctgtcgacggccatcgccggcctgcggcattgcgagttgcgcacggtcggcggcgaggaccagaccgcggtgatccgcctgttgatcgaccgctacgacggcctggtggcgttgcggacccaggccacgtgccggctccacgccgtgctgcgcgagctcgtcgccggcggcgcacccaggcgtttgtcggctaaccgggccgccaagctcctgcgcagcatccatcccgctggtgcggtcgccatcgaacgcaaacggctcgcggtcgatctcctggccgacctacgacgcctcgaccgagacatcgccgccaccaggtcccgtatcaccgacgcggtcgaggactccaagacgaccctgctcgagctgcacggcgtcggaccgatcgtcgccgcctacatcctcggccacgtcggcaaccccgcccgcttcgccacaccggaacggttcgcttcctacaacggcaccgcccccctcgaggcgtccagcggaccgcgcaagcgacaccggctcaacccccgaggcaaccgcaagctcaaccacgccatgcatctcgtcgcggtcacccaaatccgcaacgacaccgccggccgcgtctacttccaacgcaagctggccgagggcaagtcaaagaaggaagccctgcgcgctctgaagcggcgcatcagcgacgccgtctggcgccaactccaagtcgaccgcaagctccgctgaccaacgggcccgggaggacaatcaggggcgactctgaatccagcgcggccggcttgcaccctgacaccggcacttcggatcagtcactcccggacccaacccccgacgctacgcccgccgcccacgggctgcttcaacgcgccccgacacaccccttgacacaaagaggctt

SEQ ID NO: 8171 - DNA, 1767 bp, unidentified
  source 1..1767: mol_type = unassigned DNA; note = element_cc8ef41
  misc_feature 1..3: note = core
  misc_feature 4..239: note = LE
  misc_feature 240..1445: note = CDS
  misc_feature 1446..1767: note = RE
cttatatgttaatatttttccaagccctctggaccaagggctggcagggttgctccctgcccgatagacactgccggggaaagcctcctctctccacacggctcgaccgataaaggaagatcgtgcttccccgggcctctttcctgggctaatcgacgattggagggccgttgcttcgagcacccggtatataaggacccgacacccccaggaatttgtgcagaaagggaagcgcaagtatgtggtacgttggcttggattgggctgatacccatcatgacgtggaggtgctggatgaagctggcaagcgcgtgggagcgcagcgctttgcgcacagccaccacggcttgacccagttgaaacagttcctgttgagcattgctgctcagcctgagcacctggcatgcattgtcgaaaccaaccatggattgctgatcacgttcctgctggaagctgggatcccggtctatcctgtcaatcccaagacggtccagcagttgcgcaaagcggcaggcgccaagaccgatcaaattgacgcgcatttgctggcgaagctgggtcgcttcgagctggcggaactgcgtcggctggagccagacagcccgaccgtggccgagctgaaaaccctgacgcgcgatcaggatgcactgatccagacccaaacgcgcctggtgaaccagttgacggcctgcctcaaggagtactaccctgccgccttgcacttgtttgccaaggtgcagcagcactccacgctcgtgtttttgcaggcctatcccaccccacaagcggcgcaggcggctgcggtggcggagatcacggcgaccttgcgcacgggcaagcatacccacccgaggcgggctgctcccaagatctttgaggaactgcatcgtccccacttggtggcaagcgaggtcatcgtgcgtgccaagtcgcgcctgatgctgtctctggtcaaacaactgctggtggtgattgaggagattgccagctacgatgaggccatcagcagcctttttttgacccataaggaccacgcgctctggcggtcgctcccacgtgctggcaagcgcctggccccacgaatgctcgccgaatggggcgatgatcgcagtcgctacgctgatgccaccagtgtccagaccttggccgggacggctccggtgcccttccagagcggtaattacgccaaagcgcacaaacgcttcgcctgcgtgaaaccgctgcgtaacgccttgtaccagtttgcttggcaatcgacccagcaagaagcctgggcacgagactattaccagcgcaaacgcgcggagggcaaaacccatagtatggcggtccgcgctctggccaacgtgtgggtgcgcatcatctatcgcatgtggctcaaccacacctgctatgaaaccgcggtctttgagctggcgcaacggctgcatgcacaagccgcctagctggccaacggagtcgctcaagcggtccccgtcggcttctttctgccgagtgtgaggacctccctggagcgtgtctgcctgtccaacgtctgccgcagcccgccaccgcgtccccgactcccggtgcgggttgcctgtccaggaccacgccgagtcaaggccatgcagcggttggtggtgctggtggcagggggagtgggccgctgcatgctcgtcttggccttgaccggtgtggtagacttgatgagccgcacgggaggcagcttcactcacgctcaccttctcgcctcctttccaatttgtggctcttgacatagagggt

SEQ ID NO: 8172 - DNA, 1381 bp, unidentified
  source 1..1381: mol_type = unassigned DNA; note = element_cc942b6
  misc_feature 1..3: note = core
  misc_feature 4..113: note = LE
  misc_feature 114..1145: note = CDS
  misc_feature 1146..1381: note = RE
  misc_feature 1147..1379: note = bridgeRNA
agatggaatggtcgcctcccgccttaacggtcgtttagacgcctcagcaagcccggtgacggcgtcgagtccgagtatcgtttccgttgcgacatccctttaaggagaaagttatggaacccacgatcattgccatcgacctcgccaagagcgtcttccaggtgcacttcgttgaacctgataccggcgccattcacagcaaggtacttaagcgcgcccagctcaagccgttctttgtcaatcgtgcccgatgccgagttgtcatggaagcctgtggaagcgctcaccactgggcccgtcaactggccgcgctgggtcacgatgtccagttaatcacggcgcagttcgtccgtccgtttgttaaatcgaacaagaacgatgccgcggacgctgcagcgatctgggaagcggctcagcgccccggcatgcgtttcgttgccgtcaagacggaagatcaacaggccatgcttgcactgcaccgcatgcgccagcaactcgtgagaatccgggtcatgcaggtcaaccagctacgcgggctgttatacgaattcggtgtcgtgttgccacagggccggcgcacagcaatcgaggcagccaaggcgtcgcttgcgtcactcgcggagcagttaccggctatgttgacagacagcctccaggaccagatttcgcggctactggtactcgacgagcagatccagcgcattgagcagcgcattaccgaatggcgtcgcggcgatgaagcatgccgtcgcatctccgagattcccggcgtgggactactgaccgccaccgcagcggttgccgtcatcggcaacgcgctgaccttcaggtcgggacgcgaatttgccgcctatctcgggctggtgccgcgacagaacggctcgggcggcaaggtgaagttgggcggcatcagcaaacgtggagacgtgtacttacggaccctgctcatccacggcgcccgatctgtcatctccagttcgagacacctgcctgagcggatgcgcgccatgctagcccggcgacctacgaacgtcgtcgcggttgcactggctaacaaggttgcgcgaatgatctgggcgttacttgcgtacgggcgaacgtatcagcctccaacctcgacgcctgccgaacagcattgcaactaatacaaacccactccaggttgcataggtgatattgagcgatggcaagacaggttggaccgcgcagaggcaagcctgagacatttctcggacctcgagtccgttctttagattaggacctttgcggcgaaatccatcggggccggcaggcatgttctgcgatcgagtccggatataagtccgcaaccaccctcctcgccgcacacaatctctccttgcaaatgggaggcgaccatata

SEQ ID NO: 8173 - DNA, 1608 bp, unidentified
  source 1..1608: mol_type = unassigned DNA; note = element_cca2ee3
  misc_feature 1: note = core
  misc_feature 2..559: note = LE
  misc_feature 560..1486: note = CDS
  misc_feature 1487..1608: note = RE
  misc_feature 13..295: note = bridgeRNA
cctaatatataagtgtagggtttcagtacccaacagccagttgggacttaatcctctcattgtttaagctgtataatgattaggcatcggtctgacgacacctcctaggaccattggcgtccgtacgaaagcctgtcagccagcctgtcattgcagccgttcgatttatgcaggttgaactactacttcacgttcgtttgataccccaggagattgaataggcaatgagaaatgctggaatccatgcaaattcacttttggaggtacgtagaatgtacaacgcagtaggtattgatgtttcaaagggtaaaagcaccgttgcagtcctgcagcctggcggcactgtgatccgtaagccctttgatgtctcccacacatcccaaaacctcaatgaactggcagattatttgagttcattagacggcaccacaaagatcgttatggagtgtacgggtagatatcatgagcctatggtaaaggctctatccgaggctggattgtttgtttccattgtaaatcctcacctgattaaaaactttggcaacaactccctcgcaaggtgaaatcggatccggcggatgcccgcaaaattgcccgctatacgcttgacaactggacggaactgcgccaatattcaggtatggacaatacacgtactcagttaaaaactttaaactctcaattcagcttctttatgaagcaaaaggttgccgcaaaagcaaatctgattgcactgttggataatacttatcctggtgtaaacaaactctttgacagccccacccgtgaggacgggagtgaaaaatgggttgactatgcttattctttctggcatgcggattgtgtccgcaagattgggttaaaggcatttacagaacgctacaagtctttctgtaagaagcaccactatatctttcagcaggacaagcccgaaaaactgtttaatgcctcgaaggagttggttgccgtctttccaaaggagaagacttataagctgttgatccagcaaagcatccagcagttaaatcttgcctccgaacatgtagaacgactccgcagggaaatgaacgaactggcatccacacttcccgaatacagcaccgtaatgggcatctatggcgttgggaaaacctatggcccccagctcatcgctgagatcggcgatgtatcccggtttacccacagggaagcactgaccgcctttgcgggcgtagaccccggtgttgatgaatccggccagcacaagtcaaagagcaacagggcttcaaaggtcggctccgcaaggctgcgcaagacattgtttcagatcatgacaaccctgttgcaaaatgctcctgaagccgatccggtgtaccgttttcttgacaaaaaacggtctcagggaaagccttactatgtctacatgacagccggagcgaataagttcttacgcatttactatggtaaagtcaaagagtgtctgcggaacttagaacagacagaataacacccttttctatatcacccctttcaaagccggcatttttggcggcttaaaagttatgcacaaaatatcaaatcggatttttgaaattttcttcaaaaaacacttgactttttattagcagg

SEQ ID NO: 8174 - DNA, 1369 bp, unidentified
  source 1..1369: mol_type = unassigned DNA; note = element_cca3309
  misc_feature 1..2: note = core
  misc_feature 3..74: note = LE
  misc_feature 75..1103: note = CDS
  misc_feature 1104..1369: note = RE
  misc_feature 1134..1356: note = bridgeRNA
tgatgctgtggacggcagccatcacccgacccgaagaccggtatggttttcgaggtctcagatggagaagtcagatggtgcagccagtcacagtcggtctcgatatcgcaaagaacttttttcacgcctatggcgtcgatgcccagggtgagaaggccctcagtcgcaagcttcgtcgcgcgcaggtcgaggccttcttcgcaaagctcgaaccttgcctggtcggcatcgaggcctgtgcaacggcgcatcactgggctcgcacgatcgagaagctggggcatcaggtccggctcatgccgccggcatacgtcaagccctacgtgaagacccagaagaacgatgaagcggatgccgaagcaatctgcgaagcggtcacccgcccgaacatgcgatttgcggaggtgaagtccgtggagcagcaaagcgtgctggtgctgcatcgaaccagagcgatgttgatcaagcatcgaacgcggatgagcaacacgatccgagctcatctcgcagagttcggcatcacagagaccatcggcagggaggggctctctcgactaatcgacatgatcgtctccggcgaagatgatcggatcaccggcgtcactcgccgcgcgatgatatgcctggtcgaccagtatcgcctgcttcaagagcagatcctcgatctcgatcggcaagtgatggcgtggcacaggtcgaacgaggcgagcaagcgtctcgcaacgatccccggcatcggtccgcttgcggcgagcgcgctcgtggcttccgtcgccgatgcctcgaacttcaagaatgggaggagcttcgcggccttcatcggcctggtgccgaaacaatcctcaagcggtggcaaggagcgtctcgggaagatatcgaagcgtggagaccactacctgcggtggcttctcgtcgtcggcggtcttgcggtgatccgatatgcacagcggcagggcacacgtcgtccttggctgctcaaacttctgcagcggcgcacgcccaagatcgccgcagtggctatggccaacaagatggcgcgggtcgcctgggtgctgatggcacgtggcggcacctatcgtgagccagtgccacaaacagcatagcaacgagcgggcccatccgggcgtgcttcacgaggttggagagggctaaaggcaagtcatgcagtaagcggtcgaccaccgagatcggcaaaacccattcatcccagggcgcctcgagcgcgtgctaatgatcgggagctgatcttgcggatagcatgaaggccatcggtgttcgcgccgagcagaaaggccggacacatgggcgctaccgaccagcatgcggtgacaagtcaaaaagaccttgccaacaggatgccgtccacaca

SEQ ID NO: 8175 - DNA, 1534 bp, unidentified
  source 1..1534: mol_type = unassigned DNA; note = element_ccaaaa3
  misc_feature 1..2: note = core
  misc_feature 3..239: note = LE
  misc_feature 240..1415: note = CDS
  misc_feature 1416..1534: note = RE
  misc_feature 3..217: note = bridgeRNA
cttgtattatagagtagtagtttttatagcccctctccaagggctgtgctacactgtaggggatgctgtggattggtattgttctcctaccgcaagacggttcacgaaaggctccaaccacagctccttgcagatttgttgatcagttagataccgccagacggtttatgtggaacaaggctacaaggcaaggtgtcctgtggatacagcattaaaattttaccgctggaggtatgcttatggtatgtgtcggaattgatgtggcaaaggataagcatgactgctttatcctcagttcagagggagaggtgctggcggatgtcttcaccatctccaacaaccgggaggggtttaaaaccctgctggcccggcttcgttcctgtgcctctccccaggacaaaataaaagtagggcttgaggctaccggacactacagctacaacatcctcgggtttctccttgacaaaggtctacccaccttcgtcatcaaccctctgcacaccaacctctaccggaaaagtctctcccttcgcttgacaaagactgaccgggtagacgcacggacgattgcagctatgctcatgtctgatgtggacctcaagtcctacacagacacagcataccacaacgaggagctaaagtcactcaccagatacagatttgacaaggttagggaacgagccaagctgaagcagtccatttcccgcctggtcaatatcctcttcccggagctggaaaagctggtgccatcgctccacatggtctctgtctacgctcttctgagtgagctccccggagcggcccaaatcgccaactcccatctgacccacctgaaaaccgtccttcatgacgcatctaagggccgctacgaccgggatatggctgtcaccatccgggacgctgccagatcctccattggctccaggatgccagccaagtccctggaactccagcacaccattcggctcattcgggagctggacagggagatcaatgacattgaggcggagatcgacgccatcatggagacgattcaatctcctatcacttccgtccccggtattggcacccgcatgggggccatgatcctggctgaggtgggcgatttctcccgctttgactccccggacaagctcttagcctatgccggcctgtctccaacgacctatcagtccggacaactcaacaacgcctacgcccacatggagaaaaggggctcccgttaccttcgctacgccattttcaacgccacgaagtatgtctgccactgggagccttcctttgccgcctaccttgccaaaaagagggccgagggtaagcactataatgtcgctatttctcacgcggccaagaagctcgtccggcttatctttgctctccatcgcactggacagacatttaaccaagctgcctgactttctgcctcatacattccacccgagcgccgcttgacgctcttgtcgctatgctcattttctgctgcctgccaatccacctctttcctcaatttggggcttgacttttaatagttagt

SEQ ID NO: 8176 - DNA, 1396 bp, unidentified
  source 1..1396: mol_type = unassigned DNA; note = element_ccd15c7
  misc_feature 1..3: note = core
  misc_feature 4..100: note = LE
  misc_feature 101..1126: note = CDS
  misc_feature 1127..1396: note = RE
  misc_feature 1162..1394: note = bridgeRNA
cgatgagatggtctcctccctccccccttacggcgtcgtgatgcgccaggaaatagatgctaaacatctattgagagaaacgaggagtcgggaggagaccatgaactcaagtatgactatcggcatcgatctggcaaagagcattttcttcgttgtggctttgagtccttcaggcaaacagttgcaacgcaagaagctgcggcgagcacaggtgctgtcctatctggcaaatcagccacaatgtgtcgtggctttggaagcctgctccggcgcccattattgggccagagagatccaggcactgggccacgaggtgaagctgctgccgccgcagcacatcaaggcctacctgcgccgacagaagaatgactataacgatgccgaagccattgccgaggcggctcagcacggacgcattcgtcctgtggcaccgaagacggtggagcaggtgctgaaccagaacctgcaccgcatacgcaaggctctggtggccgatcagacgcgcctgatcaaccgtaccagagcactgctggccgagcatggcgtggtcatacccgaaggcaaggcacgctttggcagcacggtcgcggccctgctggaagagggtgagaacagcctgccctggcgcttgcggcaactactggatcgtcaataccagcagtaccgcctctgggaggaggaactcgcatggtacacccaggagatcgagagccaagccaagcaggatgaagtctgtcagaacctgatcagcattcccggcttcggccctatcagcagcagcgccttccgtagctggatgggcaacggtcaacagttcaagtgtggtcgcgatgcggcagcagctctgggcctggtccccagacagcatagtacgggaggcaagtccatcctgggccgcattaccaagtccggggacaagtatctgcgcgccttgctgatccatggggcccggtcagccatacgttatgcgcacaagcacaatgacaggctccgacagtgggttctcagcctcgtggagcggcgaggttacaacaaagccaccgtcgccctggcaaacaagatggcccgtataggctgggcagtcattacccgatccgagcgctaccaagccgcgccctgtgcgtaaagacatcaaagcagttaaacaaggttaacaagaggcacaccccaggttgcgaaggcaatcagcaaacgatgacaacacaggtaaaccggtgtatcgaaaaccttcggaggttcaaagccatcacaggctgtgtgctcgatcaggacgatacacttgcagatctcatcggggcccgcagttcaagctgcatacagaggccggatatacgacagacaacctgctcttgtcattgaacgttgaaggccttgcaatgagggaggagaccatata

SEQ ID NO: 8177 - DNA, 1371 bp, unidentified
  source 1..1371: mol_type = unassigned DNA; note = element_cce0564
  misc_feature 1: note = core
  misc_feature 2..79: note = LE
  misc_feature 80..1135: note = CDS
  misc_feature 1136..1371: note = RE
  misc_feature 1145..1363: note = bridgeRNA
ataatgagatggacgctccaacgttgacggcatctaagtgccaaaatacgagcgtaaactcagcagaaggagcgtccaaatgcaagtatctactttgggtatcgacctggcaaaaaatgttttccaacttcatggcatcgatcacaccggccacacggtgctcaggataaaactgaaccgggacaaactggtgcctttcattatgcaactcagcccctgcctgattgggatggaggcctgcgcatccagccatcactttgcccggcttttcagccagtatggtcatcaggtcaaactgatgccgccgcaatacgtcaagccctacgtgaaaaccaacaagaccgatgcggctgacgccgaagccatttgcgaggcagtcactcgccccaacatgcgttttgtgcaggtcaagacggccgaacagcaggcgatactcgctctgcattccgagcgtgacatgctggttcgggaacggggggcgtgtgtaaacagtctacgcgccatgttggccgagtttggtctcatcatgccaaccggacattgtgcttttcatcagggcattcccgatatcctggaaaacggagatattaccctgtccccctttgttcgccgcagcgttgcgcgccagtttgagcatattcttgcgctcgaagaccaggttaccctgattgagcaagaactcagtcagtgggcgaaaagccagccagcctgtcagcgggtgatgaaagtgccgggagtgggactgatgaccgcgacctacctggtggcgtcggtaggcaatgggcagcaatttcattgtgcgaagcagtttgctgcctggctggggctgacgccgcgcgagcattccagcggcgggaagcaacgcctggggcgtataagcaaacggggggacagatacttccgttatctgcttgtgcatggtgcgcgtgccgttgcggcggtgattgaacggcacaaggaaacgatgccgtggttgttcgccttgctacagaagaaaaactacaacgtggcagtggtggcccaggcgagcaaaacggcccgcattctgtggtcgatgctggtgaagggaacagaatatcgccccgctgcgcccattgaggctagctcaatgagtgcgtcggggcagcaagcgtaaacgcagtccggtagttgctcgtgtaatcaagaagatggcgaaacaggtaagaccgcaggtgagacataccgtaatcggccagggcaatgtagcccgtagggatggttaggcgctcacctggcggatttcatcatggttcgggtcacagtaagaccccgaaagaaaccggatatatggctgcaatacctgttcacgttttcagaaaaaaacattggcattatcggagcgtccatata

SEQ ID NO: 8178 - DNA, 1425 bp, unidentified
  source 1..1425: mol_type = unassigned DNA; note = element_cce1328
  misc_feature 1: note = core
  misc_feature 2..130: note = LE
  misc_feature 131..1150: note = CDS
  misc_feature 1151..1425: note = RE
  misc_feature 1190..1425: note = bridgeRNA
gaatgaaatgaacgcgtcccaccccgtgaccgagtgagaggaaaagggatggtggatcctcacgggccaacggcatcgaagtgcccaggtggaaaatgcacgcatttcccaggcaaccggaggatccacgatgaagagtatggcagttggtgtagacatcgccaagcaggtattccaggtgcattacgtcgatcaggaaaccggcgagatcgtgaacaagcagatcaagcgggtcaaattcgtggagcacttcgcgaatcgtgcgaagtgcctgattgggatggaagcctgcggcggagcgcaccactgggcccggcagctgatacagatgggtcatgaggtcaggctgatgccggcggaattcgtgaaggcgttcaacatccgcaacaagagcgatgcggcggatgcccgggcgatctggctggcggtacagcagccgagcaagccggtggcggtgaagacggaaatgcagcaggcgatgctggcgctgcaccggatgtgcgagcagttggtgaaattccgcacgatgcagatgaacggactgcgcggcttgctaacggaatacggtgacgtgatgagcaagggacgggctaagttggacaaggagataccggacgcgctcggccgaatcgcggagcggctgccagccgcactgattgatacgttgcgcgagcaatggaacgggttgtcaaagctcgacgaacagatcggagaaatcgaacgccggatgcgcgaatggaagaaggaagacaagtcagtgaaggcgattagcgagatacccggcgtaggtttgctgacagccacagcagcagtagcaatgattggcgacccgaaggcgttcagttcggggcgggagttcgcggcgtgggccgggttagtgccgaagcagaccggctcgggcggcaaggtgaacctacacgagatcagcaagaggggcgacacgtatctgcgcacgctactgatccacggtgcacgaagcgtactgacgcatgcgaaagagcccggagagtgggtcgagcagatgaaaaggcgccgaccgccaaatgtggtgatcgtagcactggccaacaagatggcgcggacgatctgggcagtactggcccatgaccggccgtaccaaaagggttacgtgagcgtgaaaccgtgctgatcggtgaatgccacgctgaagattgacgtttaacacagggtgaacgtcgaaaggttgcgcagcaatcgagtgtgatgacaaatcaggtaggaccgggactcgctaaacctgaatagagccaagagctccaagctcgctgggagaatgaggtgcgagtcagcgaatttcataggggcccgcagcggctgtaccgtctgcatcaaggatatagagctgcagcccatcctgtccgtcggaacacccgaaacctgttgcaaacgggacgcgttcatata

SEQ ID NO: 8179 - DNA, 1139 bp, unidentified
  source 1..1139: mol_type = unassigned DNA; note = element_cce544b
  misc_feature 1..2: note = core
  misc_feature 3..168: note = LE
  misc_feature 169..957: note = CDS
  misc_feature 958..1139: note = RE
  misc_feature 10..183: note = bridgeRNA
cttgtatctttaagcctcggaccggctcgggtagcccgagcggcctccgggccatttgttgaagcccgcctctgagcactgggcgcccgagccggaccgtccttctctgcagcccgaacggttgtaggaacttgaagttcgtatagacaaggatgggagtgagaggacgtgtccgactctgtttttatcggtattgatgtctccagccagaccctggagatcgccagcagcgatcagggcaagacttggcagctcgccaatgacgtggctggcatcgagcaactggtcaaccaggcatcggctttggcgcccgcgctggttgtgctggaggccacgggcggctacgagttcgaagcggcctgcgcgttgcaagccgcgggcttggcggtggcggtggtcaacccgcgcaccgcgcgcgacttcgcccgctcgatgggcgcgctggccaagaccgatgcgctggatgcgcgcatgctggcggccttcgcccgcgtgctgcaccaacaccccgagcgcgagcgcttcgtcaagccgctggctgatgccgagttgcagcaactgcaggccttggtgctgcgtcggcgccagttggtgcagatgctgacctccgagcggcagcgcctgcgcctggcgcacgcggcggcgcgcccgagcatcgagcgagtcattgaattcttgaagcaggagctcggcgacagcgaagccgaggtggctgcgcatgtgcagcgccatcacgcccgattggcccaggcgctggccagcgtgccgggcatcggcgctgccagcgttgcagtgctgctggccgaactccccgaactcggcaagctcgaccggcgccgcatcgctgcgctggtgggcgttgcgcccttgaaccgcgactccggccagatgcgtggccagcgctgcatttggggtggcgcgccgatgtgcggcgaaccctgtacatggccacgctgacggcggtgcgacataacccggcgcttaaggcctgctatgagcgcctgctggcggcaggaaagcgcaagaaggtcgctctcgtggcctgcatgcgcaagctgctgaccatgctcaatgccatcgccaaacacggcaccacatgggatccgacgatgcatatcgcttgactgacaagacggttg

SEQ ID NO: 8180 - DNA, 1357 bp, unidentified
  source 1..1357: mol_type = unassigned DNA; note = element_cce6874
  misc_feature 1: note = core
  misc_feature 2..66: note = LE
  misc_feature 67..1101: note = CDS
  misc_feature 1102..1357: note = RE
  misc_feature 1105..1347: note = bridgeRNA
tatggaatggcccgcccctccttccggcgatgtaggctcgccagggggcagaaggaggaaggggtcatgaaagtttccgttctcggcgtcgatctgggcaagaatgtttgcagcgtcgtgggcctcgacgccttaggcgcagtcgttttacggcggcgagcaaagcgcgaatcgctgatcgcattggcggcgaagcttccgccttgcgtggttgcgatggaagcatgctgcggcgcccatcacctcggtcgcgtcttcgccggtcatgggcacgatgtccggctgatgtcgcccgaatacgtccgaccctacatcaaggcgcaaaagaacgatgaccgcgacgccgaagggatcgccgaagcggcgacgcgcccgacgatgcggtttgtcgagttgaagagccaggagcaactcgacatgcagacgcttcatagatcgagagaccgcttggtcggcgagcgaacggccctgatcaaccagttgcgcgccatcctgctggaacgcgggatcatcgcgccccagggcaagcgaaagctggagcaattcctcgttggcctcatggacgaacagggcggagcgggactgagcccgaggatgatcatgctggtcgtcgacacgcgggcgcaatgggcggaactcgatcgacgaatcgccgcctttgacgcggagttcattcgctggaccaaagagaatgaagacgcccgtcgattggcgaccatcccgggcggcggtccgacgatcccctcggcgttgatcgcggcgatcggcaagggcgagactttcgagcacggtcgcgacatggcggcgtggttgggtctggtcccacgtcagttcaccaccggcggcaaaccgaagcttctgggcatcagcaagcgcggcaaccgatatcttcgcaagctgctgatccacggcgcgcgagcggcgttgccccatgtcgccgagcgagacacgccgctcggccggtgggccaaggcgctgctggagcgcgcccatcccaatgtcgccatcgtggcgttcgccaacaagctcgccaggatcgcctgggcggtgctgcggcgcggcgaaaggttcgtcgtcaagggactgcccttggcggcgtagtcgttggtcgatcagagccgaagcgcgctgaccggtcgatgaggtttgcgaggggtgataacgagatggcctgacagtcgatcggcgctccggaagcctggttcaaaaaacggcgctcgacgccgtgagttttatgaggaccggagcgcgcgtatctccatcttggctgggaggagtcctccgaagccggatacgttgcagcagactgatcatcggcgctcttgaaaaatcccttgcagacggggcgggccatacg

SEQ ID NO: 8181 - DNA, 1621 bp, unidentified
  source 1..1621: mol_type = unassigned DNA; note = element_ccf1ad3
  misc_feature 1..4: note = core
  misc_feature 5..272: note = LE
  misc_feature 273..1586: note = CDS
  misc_feature 1587..1621: note = RE
  misc_feature 76..251: note = bridgeRNA
agcgtacacaaaaccttcggctctgtgacttgtgcaaggaactgggaattgttgcttgcacgggcatattgcaagcggagtgggagcggcagctaaggccgacgctggtttggtgcctttgtgcccgttagctagcatggttccggttttttggcggtgatttgtttggtggcagcctgaggcggcagggaggctcgaccccgttggagagattagtaaaccgattccgcaaccgggccgcgcctgccccaattatttaccaacgaacagatatgcgcagaaagaagagcaaagccagcaaaagcgttaatctacaaagcttaccggtgattcatcccgacgcagcgggcattgatgtgggggctaaagaacacgtggtcgcggtgccctgcgatcgagatgagcgaccggtacgaactttccaagcctttacacccgagctccatgagttggccgcttggttaaagcgccgtggagttcggagcgtagcgttagaatcaacgggcatttactggatcagtctttacgaagtcttggagcagcacggctttgaaatccgtgtagtcaacgcacgccatgtcaagaatgtgcctgggcgaaccaagactgacgtactggattgccagtggattcagaagctccacagttttggcttgttaaacggctcctttcgtcccgatcagcaaattcgcaagctgcgcacttacctgcgtctacgcgacaacctagtggtcagcagcacgcaggcggtccaccacatgcagaaagcgcttttcgaaatgaacatccaactaagcaatgtgatcagtgatatcgtcggagaaagcggtttgcgcatcatcgaagcgatcattgccggagaacgagatcccgaggagctggctgccttgtgcggcacccggatcaaagcatcccgtcaaacggtggccaaaagtttgcacggtaattgggacgaagccttgctcttttgcttgcagagcgcattagaaacttatcgctttagccaactaaaaattcaggactgtgacggctacatcgagcgtcatctggccgaatttgaatcccgagcccagctgccttcttcgcccaaagacttgcaagctcacttgcatcgaatctgcggagttgacctgaccaaaatccccggcattaaagagcaatccgctcagatcattatctccgaggtaggcctggatatgaccaaatggaataccgaaaaacagttcagctcctttctaggtttgtgccccaacaactccatcagcggaggcaaagtgttacgtcgagcaacccgcaaggtctacaaccgagctgctgacagccttcggctctgtgctcaaagcctcacccacagcaaaagcgcgctgggagccaagtatcgccgcttgcgagccagactcggtgctcccaaggccgtcgttgctatggcccatcatcttgcccggttggtttatcgcatgttgcgctacggagacaagtacgtcgaaaaaggtatcgaacattacgaaaagaagctccgacaacagcgcattaaatggcttaaaaaagaggcctcctccctcaatctccaactcgttgtcctttaacaggttccaccaccagttcctggagagagagagag

SEQ ID NO: 8182 - DNA, 1392 bp, unidentified
  source 1..1392: mol_type = unassigned DNA; note = element_ccf4ede
  misc_feature 1: note = core
  misc_feature 2..91: note = LE
  misc_feature 92..1138: note = CDS
  misc_feature 1139..1392: note = RE
  misc_feature 1164..1384: note = bridgeRNA
caatgggatggactcctcctcatccgctttcggcatctatgtgccagactgaatatgctatccaacagtcgctagcgaggaggaacccacaatgaacattactcgagttggagtcgatttggcaaaagaagtattccatctgcacggtgtggatgcacatgaccatgtggtctggcaaaagcgagtgcgtcggaagtcttggctcgctgagctacaaaggcatgtgccagaaggaactgaaattgggatggaggcatgcgccggagctcatcattgggggcgagaactcatcgctcgtggttaccaagtaaagctcatggcgcctcagttcgtgaaaccatacgtaaaaagtaacaaaaacgaccgcaacgatgccgcagctatctgcgaagccatgagccgcccctcaatgcgctttgtccctcttaaaagcacagaacaacaggatatacaggctgtacaccgagtacgatcggagctggttaagcaaaggaccgccaaagcaaaccagatacgcggcttggttggagaatatggcctggtggctccacagagtatcctcgccctacgtaaagtattaccacgctggcttgaagatgcagagaatggactgagtcttcgctttcggcgtctcttggctggcttggctgaagatttccggtaccttgatgagcgcatcaagaggcacgatgacgaactcgcgctgatggtaaaggaaatgccagcagctcaaaaattgatggcacttaggggggtcggaccagcaacagccactgcgctagttgcggccctgggaactggcgaagggttcgctcgaggtcgcgactttgccgttacgctcggattaacccccaagcatcatggcaccggcggtaaggaccgtattctcggtatcagtaaaagaggcgacgcatatctgcgtacgctattaatccatggagccagatcggcggtgagccgagcggaaggaagaagcgatccactgagctgctggatcaatgcgctattggaacggcgtcataagaatgttgtgatcgtggcgttggcgaacaaaaacgctcgtatggcctgggcggtactgcgtcacgatcgagaatacgatgcaggctggcccagcttggcagcatatgggcactagagcgaaaaactgctgagaaattttactcatcgacgattgcgaaggagtctgattgaaggaaaacaggtcgaaccggcactgtcaaaacccgagtcccccgaagggtgagaaacccggactaacgttagggagtcagtgcgcgaatagcccatcaaggccccgtgtctcgacacgatcaagaggccgaatacacgtgagcaatcgatcccaattccagatatcaaattccttgcaaaagaggaggagtccataca

SEQ ID NO: 8183 - DNA, 1372 bp, unidentified
  source 1..1372: mol_type = unassigned DNA; note = element_ccf5cd9
  misc_feature 1..2: note = core
  misc_feature 3..209: note = LE
  misc_feature 210..1181: note = CDS
  misc_feature 1182..1372: note = RE
  misc_feature 40..215: note = bridgeRNA
cttgtattagcgcccagcgttacattgcatcgttccgtgaggaatggcccagcctgggtggccacccgggctgggccgccgatcgatcggatcgatgcccaccgaagccttatgggttgtcttccgtagcaagatcgcgatcggcacttcatcgggacccggatggttgaaggaaccaagggttcgcaaacaaggcagggtcgacgaagatggcgaagcgtatcacgatctgtgccgggatcgataccggcaagcggaagctcgacgttgcgatcgacggcagttcgcaagagctgcaagtcgacaacacggttgaaggtcacaagcggctgctggattggctgcggcggtatcgcgtcaaacgcatcggcatcgaggcgagtggcggctatgagcaggctgtcgttgccgagctgcggcgcaagcgatttgtcgtggtcgtgtttcagccggcacaggtgcgcggttatgcccagttccacctgcaacgggccaagaacgacaagatcgatgccgcgctgatcgcatcctgtaccgccgcagtcaggacgatccacgcgccgccggatcctcgcctgctgccgttcgccgagcatctgacgatgatcgagcagatcggagaggacatcgctcgcctcaagaaccgcctcgagacctgtcgcaagccgcatttccggcaactctggcaggaggatatcgcgcgtcttgcaacacgcgcgaaggccgagcttaaggcgctggtagcgacgatccgccagcatcgcgatctcgccgagcgcctcgatctgatcgaaagcgtcgatggcatcggactgccgactgcggtcgccatcctggtgcgtctgccggagatcggcaaaatcacccgcgagcaggccgcagcgcttgccggcgttgcgccctatgacgacgacagcggtgagcagattggcgtccgtcacatcgacggcgggcgccaacgcttgcgtcgcgccctctataccgcagccctgccggcatcgtttcgctggaatccacagctcgtggccctttaccgccggctgatcgtggccggcaaacaacacaagcgcgcgctcatcgcctgtgccaggaagctgctgatctttgccaatacggtggtggcgcgtggcacgccgtggcaacaccagcagccgccgataaccgcatcagcaggagcctgacccaccagtttccttgttcgaccaaggcgtttcctcgtcccgaccttgtcacaacaacgacgtcgcgcgccgacgctgtcaaggatggccgtcgctcttccatcgcctcatacacggccacgctaggccacgccttgacggcgccaagcacgacgtcatgctggcaaaagtcggcaacctcttaatggttg

SEQ ID NO: 8184 - DNA, 1493 bp, unidentified
  source 1..1493: mol_type = unassigned DNA; note = element_cd001ba
  misc_feature 1..2: note = core
  misc_feature 3..249: note = LE
  misc_feature 250..1473: note = CDS
  misc_feature 1474..1493: note = RE
  misc_feature 14..246: note = bridgeRNA
ctaatcagttctaggagtgagccatccggcaaactcctggtgggcagccgacctgcaggtgagcactctcctgacctggacgcttgagtcctgttgaaagacagtgcccctgccggtagggctggagattcgatcgctgatgggatgtcgtgccacgcgcgctggtcggcgtgagcactgcgtgattaggtcgctgatggttctccggctggctgccgcgggtgatcggcatcgagatcgggaggaccgttgcgactgttcgtgggagacgactgggccgaggaccaccacgacgtggaggtaatggacggctccggccgcagactggccaaggcccggctgtccgagggcgtggccgggatggcccgactgcacgcgatcgtcggggagttggccggcgacgacgccgacgacgtggagatcgtggtcgggatcgagaccgaccgcggcccgtgggtgcgggcgttgatcgcggccggctacacggtgttggcggtcaatccgttgcaggcggccaggttccgtgaccggttgggggtttcgggggccaagagcgacgccggtgacgcccacgtgctggccgacatggtccgcacccatggccatgagctgcggccggtggccggggacagcgcggaggtcgaggcggtgaaggtggtggcccgcgtccacaagaccctgatctgggaacggacccgccacacccagcggttgcggcacgcactgcgggactatttccccgccgcgctgatcgcgttcgaggacctggacgccgccgacaccctggaactgctcggcaaggccgcgaccccggtccgggcctcccggctgagcatcgcgcagatcagcggcgcgttgaagcgggcgcggcgcagaaacatcgccgagaaagcggcggtgatccaggccgcgttgcgcgccgaacacctcgctcaacccgagatcgtcgccaccgcttacgccgcctccgtccaggccctgatcgcggtcctgaccaccctgaacacccagatcaccaccctgcaagggcaggtcgaggcccattttgggtcgcacccggccgctgagatcgtcctgtcccaacccgggctgggaccgatcctcggcgctcgggtgctcgcggagttcggcgacgaccccacccgctacgccaccgccaaagcccgcaagaactacgccggcacctccccgatcacccgcgcctcgggcaagaaaaaggtcgccctggcccggttcgtgcacaacgaccggctcgtcgacgcgctgctgacccaggctttcagcgcgctcacccgctcgcccggcgcacgcgcttactacgaccggcaacgagcgcgcggcgccggccacaatgccgccctgcgtcagctcgccaaccggcttgtcggcatcctccacggatgcctcaaaaccggcacccactacgacgaaacgacggcctggtcgcatcacaccgagaacctcgctgcttgacatctacgcccctgggatgt

SEQ ID NO: 8185 - DNA, 1433 bp, unidentified
  source 1..1433: mol_type = unassigned DNA; note = element_cd2ba41
  misc_feature 1..3: note = core
  misc_feature 4..143: note = LE
  misc_feature 144..1163: note = CDS
  misc_feature 1164..1433: note = RE
  misc_feature 1203..1433: note = bridgeRNA
agaatgtaatgagcgcatcccaatcacttagcccttggcaccgtgctgaaattgagaggtgaagcatggatcctctcagatttccggccttatagtgcctaagcgggaagcctgttgctccctgatgactggaggatccacccatgaaatttactcctgttggcgtcgatattgcaaaacatttgatgcaaattcattttgttgatgaatacaccggtgaactcattgacaagcaactaaaacgaaatgattttttaactttctttagtaaccgtgagccttgcttgattggtatggaagcgtgcggtggcgctcactattgggcacgggaactgagaaagctgggacatgaagtgcgtttgcttaaggctcggtttgtcagggcatttcggatgggaaataaaaacgatgttcaggatgcccgggcgatttggctggccgttcagcaacccggtaaatccgttgctatcaaaaatgaagaacagcaggccattctgtcattacaccggatgcgctatcaactcgtcaaattcagaaccgctcagatcaattcgttacagggtttactgctggaatttggtgaaaccgtacataagggcagaacctcgctggataaagccatgcctgaagtccttgagcgactaaaggaaaaactggcaccattcctactcaatctgcttgaaaagcaataccaccgtttgaacgaaatcgatgaacaaattgaacaggtggaaaaacaactgacgacgtgggcaaagcagaatgctgattgtcagcgaattatgaaaattcccggcgtcggtgtcttaattgcgacagccgccatcgcaacgatgggcgatcccagagcgtttcggtcgggcagggaattttcggcctatttgggcctggtgccgaaacaaacgggaacgggaggccgggtcaaattactgggcatcagtaaacggggagatacctatctgagaaccctgtttattcacggtgcaagagtggccaccttactgacaaaaacaccgctgccgtgggtgacggagctgaaaaaacgccgtccggtctgtgtagtgatagtggggatggccaataagctggctcgtaccgtttgggcattggtcgcccatcagcaggaatatcaaaaagattacgtcagtgtcagaccttactgaggtgtttcactgatcaactttcacttttaactacaaggatgaatgtagaaagattgctaaggcaatgataatgatgacaaagacaggtaagaccgtgactggctaaacctgatttatgctctgagcgtaaagctcgttaggagagtgaggagccagtcagcggattacatcgaggcccgcagctctggctgtaataaggccggatatagagctgcaacctaccgtcgatgtcaacgtgatttttgtcttgcaaacaggatgcgttcatat

SEQ ID NO: 8186 - DNA, 1450 bp, unidentified
  source 1..1450: mol_type = unassigned DNA; note = element_cd32405
  misc_feature 1..5: note = core
  misc_feature 6..235: note = LE
  misc_feature 236..1432: note = CDS
  misc_feature 1433..1450: note = RE
  misc_feature 1..239: note = bridgeRNA
cccccgttaccttctaggtatccccgatggtcggggttctggtcgccaggcccggcatgacttactgcccctgtcgttgatgatccggggggtgttgtcaccgggtcctggtggcgtgggttgatcgctgatagggacacggcccgctgcatgacagcgtggcctctcgtaacgtgggtgccgacgatcttcgcctgacttgcggccagaatggaaccctctgaggaggaccgctatggaccaacaccgcttcgacgtgttcgtcggcctcgacgtcggcaaagaacaccaccacgccaccgccctcaacgctggcgggaaacgactgcatgacaaggccctgccccaggatgagactgctctacgtgaggtgttcgccaagctcaccgcccatgggttggtgttggtgatcgtggaccagcccgccacgatcggcgccctgccggtcacggtggctcgcgcgatgggtatcgaggtcgcctacctaccgggactggcgatgcgcagcatcgccgatctccacccgggcaacgcgaagaccgacgcccgcgacgcctacatcatcgccgaggccggccgcaccatgccccacgcgctgcgccgagtcggcggcgacgacgacctgatcgccgacctcgccgtgatcgtcgggttcgacgacgacctcgcaggcgaagtcaaccgcgtctccaaccggatccgcggcctcctgacccagatccaccccgcgctcgaacgcgccatcggcggcaacatcagccaccccgcagtgctggccctactggccaagtactgcggccccaccggactcgccgacgccggtaggcgccgtctcaccaccaccgccaaagcgctggcgccacgcatgcacgagcgccttgtcgaggccatcgtgaaggccctgacagagcaaaccgtgaccgtccccggcacccgggcagccgagctggtcttgccccagctcgcagcccaactccagggcctgctcacgcagcgcgctgaggccgccaaacaagtcgaggaggccctcgacgcgcaccctctttcccagctcctgatgtcaatgcctggagtcggcatcaggaccgcagccagactcctcctcgacgtcggtgacggctccgcgttccccaccgcaggccatctcgcggcctacgctggcttggccccggtcacccggcgatccggatccagcatccgcggagagcatccctcacgcggcgggaacaaacacctcaaacgagcactgttcctctcggccttcgcagccctccacgatcctgattcacgcgcctactacgaccgcaaacgcgccgctgggaagaaacacaacgccgccctcgtctgcctcgcccgacgacgcgtcgacgtccttcacgccatgctccgcaacggcacctactaccaaccaagaacaccagccgccgcttgacaggaaccatagggacac

SEQ ID NO: 8187 - DNA, 1493 bp, unidentified
  source 1..1493: mol_type = unassigned DNA; note = element_cd43c82
  misc_feature 1..5: note = core
  misc_feature 6..250: note = LE
  misc_feature 251..1483: note = CDS
  misc_feature 1484..1493: note = RE
ctcactggtggacccttgtgtcgtcagtggttggcagactgctggcgcacccgacctggtgcccaccggaccaccgccacgcaggctcgcccttggagggccactgtgagttctgcggggtccggtggcccaggacgtgccaagcggcgacagggctgcgcgccaccgagcgccgatcagtgagcgaccgacgagcacgtcccggcaccaccgggtgcactccgactgcgctaccagccaggaggcacgcgtgcagcatcccaccccgcccagcaccacggcacccgtggccggggtcgactgggccaccgacagcaacgcgctgtgcgtcgtcgaccgcgacgggcaggtcctgcgcgagctcgtggccgcggccgacgcggccgggacccgccggctgctcggcgagctcgaccgtcacggcgtcacccaggtcgcgatcgaacggcccgacgggccgctggtcgaggcgctgctggccgccggcaaggccgtggtcgtggtccccccacgccaggtccgccacctgcgcggccgctacggccaggccggcaacaagcacgaccgcttcgacgcgttcgtgctcgccgacgtcctgcgcaccgaccaccgccgcctgcaacccctgcaccccgactcgccacggacggtcgcgctgcgcaccacggtccgcgcccgcagcgacctggtcgaggcccgggtggcgctgtgcaaccagctccgcgcccacctgcggctggtcttccccggcgcggtcgggctgttcgccgacctcgacgccccggtcagcctggcgttcctggcccgcttcccctccgccgaccaagccgcctggctgacccacaagcggctggccgcctggctggccgccaaccgctacggtggccgcaccgcggtcgaggtcctgctcggccgcctgaccggcgcccccgccggccttagcggcgagcacggccacgccgccgcggcgaccaccctggcctacgtccacgccctggccgccgtccgcggccaggtcgccgcgctcgaggcccgcatcgccgagcagctcgccctgcaccccgaccggctggtcttccagtcgctgccccgcagcgggaccgtccgcgccgccaagctgctcgtcgaggtcggcgacgcccgcggccgcttccccacccccgacagcctcgccgcgctggccggcgccgcgccctccacccgccagtccggccgccaccgcgccgtgaccttccgctgggcctgcgacaagaaactccgcgacgcggtggtcgacttcgccgccgacagccgccgggccagcccctgggcccaggccatctaccagcgccaccgcgccgccggcaagacccaccaacacgccacccgcatcctcgcccgcgcctggctgcgcgtcatctggcgctgctggcagaaccacaccccctacaaccccgcactgcacggcatcgccaagcacaggcgcctcccactggcggcttgacacagggcta

SEQ ID NO: 8188 - DNA, 1362 bp, unidentified
  source 1..1362: mol_type = unassigned DNA; note = element_cd4b26a
  misc_feature 1..2: note = core
  misc_feature 3..75: note = LE
  misc_feature 76..1008: note = CDS
  misc_feature 1009..1362: note = RE
  misc_feature 1076..1350: note = bridgeRNA
cgttggggtggacgccgcctgacggcattgatgtgccatagtggaggtgttgaaaacaccactgaggaggcgtccatgggtgaggttagcacagtcggcatcgatctggccaagtcggttttccaggttcacggctcggatccgagcggtgctgtcatcttccgcaaaaagcttcggcgtgatcaggttctgtcattcttctggaccttgccacgatgcgtggtggcaatggaggcctgtgcgagcgcccattactgggctcgcgagatcgccgcagtaggtcacgacacgcggctcattccaccggcctacgtaaagccgttcgtgaagcggcagaagaacgatatggccgataccgaagcgatttgcgaggctgcgcagcgcccgacgatgcggttcgtgcagggtaagagcgccgaagcacaggcctccggagtaatcttccgtacccgcgatctgctcgtgcgccagcgcacgcagctgatcaacgccctacgaggacaccttaccgaatttggctacatcgttcggcagggtgtcgggcatgtcggaaagctggtcgagcttgttgccgatcctgcatccgatataccacctgtggcgcggccagtgctgacagttatcactcaaagccttcaagcgcttcagtcgcagatcgctcttctggatcgcgaaatcgcgcaccgggccaagactgaccccgtggcgaaccggctgatgaccattccaggggtggggccggtgatcgcgactgcgcttgtggcgctagcgcctgctgccagcacgttccgacgcgggcgtgattttgcagcctggcttggcctcgtaccccgacagcactctagcggcggcaaggagcggctggggcgcacaacaagatgggcgagcgtagcttgcggaggcttcttattatcggcgcaagttcggttacgaaggttgcggcgcgttaccacgataaagccgacgcatggctggccggcatgctggctcgcaagccgcgcatgctgatcacggtggcgttggccaacaagatggcgaggaccgtctgggcgctgatggcgcatggcgggtcctacagagctccggccgcggcggtgtaaccgtcaaggcttgaggcgtcagggacgcaaggaaggtcaatagagaggtatggcgcaacggtcagaagacgggattgggaaaaccagggatgtgtccgagcgcctcgagcgcgcaacttcggtctggacccgatccgcgatctccatacaggccagcagccgtgatgatggctgcatcaacaggccggacacacggaagcacctgggcctgcgcgaacaaatctctcaaaaacccccttgtatccagcggggcgtccacaca

SEQ ID NO: 8189 - DNA, 1664 bp, unidentified
  source 1..1664: mol_type = unassigned DNA; note = element_cd4e74c
  misc_feature 1..2: note = core
  misc_feature 3..248: note = LE
  misc_feature 249..1247: note = CDS
  misc_feature 1248..1664: note = RE
  misc_feature 3..226: note = bridgeRNA
ctcgtatcataaaagagtagtatttatagaccgctctccagcggaatgctacaatagttccagggtgctgtggattggtgaaaaatccctaccgtaaagacggtttattggaggctccaaccacagcttctttgttgaaatgttaatcagttagataccgccagacggtttatttagaacgaggttacaagagcaaagaagtctgtggtcctgaacagcatcgaaataaatacgccggaggtatcaaaatggtttgtgttggaattgatgttgccaaggataagcatgactgctgtattcttgattcagacggaatggttcgtgctgactgctttaccatccccaacaacatggatggatttaagcagctgcttcaaacgattcgaaactgtaccaaaaagtcagacaaaataaaagtaggacttgaggccaccggacattacagctacaacattcttggatttcttcttgacaatgacctggccgtctatgtcatgaatcctttgcacaccaacctgtaccgaaaaagtctcagtcttcgcaaaaccaaaaccgatcgtgtggatgcaagaacgattgcaactatgctattgtccgatgtagacctcaagtcctacacggatacagcataccacaacgaagagctaaagtcactaacaagataccgattcgataaggttcgtgaaagagccaagctgaagcagtcagtgtccagactggtcacgattctgtttccagaactggagaagctcgttccctctctccatattgcttcggtttactcgctcctcagcgaatatcccggtgcgaagcaggtttcagaagttcatcttaccaagctgacaaaccttcttacaacagcatctaaggggcgttacggaaaagacaaagctatccagattcgagatgcagccaaaacttccattggttcagttatgcctgctaaatctctggaactgaagcataccattaaactcattaaggaactcacctccgagatcgacgaaattgaagattcgattcagcaaatcatggatgaattgcatccaccgattctttctattcccggtgtcggtatccagtcagcagccatgatccttgctgaaatcggtgatttctccaactttgaatctcctgacaaatccttgcttacgctggctgctcttccatctacataccagtcagggaaaacttacaaactgttacgctcatatggaaaagcgtggttcacgttatttgcgatatgaccctttacaacgcaaccaagtacgtttgtcattggaatcctgtctttgccaaataccttgcccaaaaaacgtgctgaaggtaagcactataatgttgccctgtctcatgccacaaagaaactcgtgcggctgatctacgcttttgcagaagtctggaaaaagcatatcttacagctgcctgattttctccagagcctgagccaaatccaagaacaacttagctggcgcagcgaacccttgacaaaccgaagcattcaaaatgctattctgttttctgcgagggttggccgggcttgcttttgctattctctccgtcgccctcgctgctctgattttcagcatttgaaggctgtttgtcaggggcagcgaatcgttgacggattttttcattttggggcttgacttttaatagttagt

SEQ ID NO: 8190 - DNA, 1440 bp, unidentified
  source 1..1440: mol_type = unassigned DNA; note = element_cd66c34
  misc_feature 1..2: note = core
  misc_feature 3..228: note = LE
  misc_feature 229..1419: note = CDS
  misc_feature 1420..1440: note = RE
  misc_feature 12..195: note = bridgeRNA
gtcctaccttctttgttgggtctgaactggtcattcgtaggatcggtgggccctggggctccgggtatggctctcatgctgtcgctgttggcaaggctgaaaggacttggccgcccgggcccccgcgacgactcgaccgctcattgggatatgcgtggatcgctgtgtaggacaccgtcggcgtggtcgtctgcgggtgaactgttctcgtgaatgacggaggcggtcgtgccccggatctgggctggcgtggacatcggcaaggaacaccaccactgcgtggtgatcaacgacaacggcgagcggctgttgtcccggcgagtccgcaacgacgaaaccgaactgctggccttgatcgccgacgtcgcggccgtcgacaccgatgcgctgtgggcgatcgacctgaacagcggcggcgccgcgctgctgatcggcctgctggccaaccacgaccaggaactggtctacatcacgggtttgaaggtccaccgagctgccggaacctgccggggcgaagggaaaaccgacgcgaaagacgcgttcgtcatcgccgaccaggcccgcgtccgccgcgacctcggcccgttgcgggccggggacgagatcgcggtggacttgcggaccctgaccaaccggcgcaccgacctggtctgcgaccgcacccgggcgatcaaccggatccgccaccagctgctggagtactttcccgcgctggaacgcagcctcgacctgtcccgcaaaggacacctgctgctgctgacggaacaccagaccccggacggaatccggagactgggcgagcaacgcctgacccgctggctgcgccaccgcaaggtccgcaaagccgaatcggtcgcacacgcggccgtcgaagccgccgccgcgcagcacaccacgctgcccggccagaaactcgccgccgcgatggtcgaacggctggccaaaggggtgatcgccctcaacaccgaaatcgccgagatcgacgcgatgatcgaggaacggtttcgccagcaccgccttgccgaagtgatcctcaccctgcccggtttcggcccgaccctcgccgcggaatttctcgccgccaccggcggcgagacaaccgcgttcggctcggccgaccggctcgccggctacgccggcctcgccccggttccccgcgactccggccgcatccgcggcaacctgcgacgacctcgccgctaccaccgcggcctgctgcgcgcctgctacctcgccgcctcggccagcctgcccaactgcccgatttccaaggcctactaccagcgcaaacgcgccgaaggcaaacgacacgaacaagccctgctctgcctcgcccgccgacgcctcaacgtcctctgggccatgctccgcgacaacgcccgctaccacgattcacccccgatcccggtagctgcctgacttgacaatccccattgggaa

SEQ ID NO: 8191 - DNA, 1578 bp, unidentified
  source 1..1578: mol_type = unassigned DNA; note = element_cd6a9ec
  misc_feature 1..2: note = core
  misc_feature 3..276: note = LE
  misc_feature 277..1446: note = CDS
  misc_feature 1447..1578: note = RE
  misc_feature 3..245: note = bridgeRNA
cttgtatgatatatttaataacttaaatagaccatacactcctttcttcatttatttttatattaatatttagtataatctaaatgtggtaactgtggacttttgatttttcttatagctttgactatttaagggagtgtattgccacagtttcgtttttaatcatttattggttggataagtctttgaacttttatgtcacgcaagtttatgagaacgaacacttgtggaaagttgtcacagttattaaatatttttgaaaggtggttttcacacatgtattcttattttgttggcattgatattgctaaaaatactcattgggcttcttgcttatcttctgatggagaaattatcttagagcctttttctttctctaatgataacagtggatttcaaaaatttatttcaaaattagaatctttagacaaaacaaagatactaattggtttagaatctactgctcattacggcgaaaatatcatttcttacttgttcaatcttgattataatattggacttattaatccaattcagaccgctaatcttcgtaggtctaatatcagaaaaactaagaatgataaagttgacaccaaaataattatcaaagctctaactttaggtaattactctctcatcacttctagagatatcaacaatttaaaactcaaaggcttatgccgttcacgtcgtaacttagttactatgagaagtaaagctaaaattcaattagtatcttacttagatcaaatctttcctgaacttgcacagttctttaaaggaaatcttcatctaaatgtatcataccaattattgaaagaatattcaagtcctaaacaaatttcttctttgcatttgcctaaactttctaatattcttcacgataattctcatggtagatataataaacaagatgctattcgtcttcgtgaactagctaaaaactctgttggtattgataatcccagcttatctttacaaattaaacattccattttgcaaattgagctttataatgagcaaattgctgaagttgaagctctttacaaacaaattttagatgagatgaatactcctattttaagtattcctggtatgtcttacaaccaggctgctgttattattggttgtattggtgacattaatcgttttgaacattcttgtcaacttcttgcttatgctggattagatccatctgttattcaatctggtaactttcaagcaaggtctactcgaatgtcaaaacgtggctctggaatgcttagatactctcttgtttactcagctcataatgttgttaaaaacaataaaacttttagagattactatgaactaaaacgttcacaaggaaaatcccactattgtgctcttggacatgttgctcataaattagttcgtatcatatttaaaatgttaaaagataacgttgcatttaacctagattaactaaatattgatttttcaatgtattcagccgtttttaaaaaattgactaaaaacggttattaaagttgaccttttttctatagaaaattttttaaaaaattttcatttttctattgacttttcatagttggt

SEQ ID NO: 8192 - DNA, 1241 bp, unidentified
  source 1..1241: mol_type = unassigned DNA; note = element_cd6ad0d
  misc_feature 1: note = core
  misc_feature 2..222: note = LE
  misc_feature 223..1110: note = CDS
  misc_feature 1111..1241: note = RE
  misc_feature 43..199: note = bridgeRNA
accttagatttgcagcatcaaaatatttatctttgaattgatattgaaaggaaagcaaaaggaaaaccatcagcggcaatagaagtcaagtctaagtccctattcggtccttttgctccttccttgaactcaaacccatataagaatttcagtaaacctgtttaagattattaggtcaagttcaggtcctttcttttttgtttaatgttcaaaaacaaaagtatgaaagttttttatttaggagttgatgtgagtaagaaaaaattggatttatgtttaaggagtaacggtaaggacatcctttatgatgttattcctaatgatctatcctctattaaatcttggttaacaagaacgtttgagaaatttttcctctctgaggacagtttggttgtctgtgcggaacatacagggcaatatacctatcctttggtctgtgcaacaaaaagtataggagtctacttatgtttggaagatgcagctaaaataaaatattgtcatggaatacctcgtggcaaaaatgataaaatagatgcctgccgaatagcaatgtatgcagaaagatataatgattgcctacaaccgtataccgcatcagagcttataatacaaaaactcaaaaacttatcaacagaacgcagtatgcttgttgcagatagggctaaatatcaatcccagctaaaagatcaggtagactatatggaacactcaatatatattgctaaatgcaatagagttgaagggattatcaatacatttacggattacatagcacaaatagaccttgaaataaaagaacttataaatcaagcacctgtcattgctcatcaaatggatttactcatgtctgtggatggagttggggaacgtgttgcactgaagatgatcatggaaacagatgctttcacttcttttactgatcccaggaagttttgctgtcatgcaggagttgttccgttcgtctatgtgtcaggaagtagccaacgttctaaaaatagagtatctaatagggctgacaaaagcatcaagcatttgctacatatggcggcactatctgtttcacaagtgaaaaatagtccattgaagaaatattatgacagaaaggtctaagagggaaaaaataagatgtcggttctgaatgcagttagagcgaaattagttacgattatgttcgctgtaattaggacggatgcttttttttcgagaaattatcaaaattcgcttgcgtaatccataagaat

SEQ ID NO: 8193 - DNA, 1426 bp, unidentified
  source 1..1426: mol_type = unassigned DNA; note = element_cd6c0b8
  misc_feature 1: note = core
  misc_feature 2..84: note = LE
  misc_feature 85..1125: note = CDS
  misc_feature 1126..1426: note = RE
  misc_feature 1191..1419: note = bridgeRNA
atggaatggacgcccacttccccaaccggcatcaaagtgccaaagtgtcggttgcagaaaccaccaacagaaaggagtcctgccatgaagattacgacaatcggtattgatttggcaaaggaagtttttcaggtttacggagtggatacgcatggcaggaggctgctgtgcaagcagatcaagcgcaaggatatggcgaagttttttgcgaacctcgatccgtgcctgatcggcatggaagcctgcggcggcgcgcatgattgggcgcgtaagctcaccggctacgggcatacggtcaaactgatggccccgcagtttgtaaagccgtatgttaaaaccaataaaaacgaccgggccgacgctgaagccatctgcgaagcggtggcccgtccgaacctgcgctttgttccggtaaaaaccgtagagcagcagggcatcctgtcggtacaccgtgccagacagggatttgttcatgcgcgtaccgcgcaaggcaatcagctgcgcggattgctgtcggaattcggaatcgtcatacccaacggcatcagcgccgttttcaggcggatgccggagattcttgaagatgccgggaatggtttgcccgatgtcatgcggcaactgcttgagcgcttgtttctcaatttaaaagagatggaccgtcaggtagaagagctggagcaacagattcgcctctggcaccgggaaaatgaagccagccgcaaactggaagcgatacccggcatcgggccgatcactgccagtgcgctagtcgccacgataggccaggcgcgagaattcaaggatggccggcaactggcggcgtggctgggactggttcccaggcagaactccagcggcggcaaatccacgctgctcggcatcagcaaacgcggcgacagctatctgcgcaccttgctgattcatggcgcccgctcggtagtccgattaactgcaaaccaggcgcgaccggataactggctgctgggattgatcggcaggcggcataaaaatgtggcggcagtggcgttggcgaacaaaaatgcgcggataatctgggcgctgttggccaaagacagactgttccagtccgattacgcgcctgcggcaaaagccgccggcgtgtaatcggcccggacgaaataacaggacgaaccaataactggaaacaggaacgagtaaaaggagcaacgtcgcagattgcgcaggcaatcagaaaatgatggcgagacaggtcagaccgtgagtgggaaaagtccggtcaactttgcgggcctcgagcccgataacgtaataggggcctcactcggcggattccatcagggacagaagcatccgcttcaagcaaagtccggatgtatgacagcaatcttcacctgctcaaaatcatcgactgaaatgtctggcaaaatgtgggcgtccatgtatg

SEQ ID NO: 8194 - DNA, 1366 bp, unidentified
  source 1..1366: mol_type = unassigned DNA; note = element_cd71266
  misc_feature 1: note = core
  misc_feature 2..64: note = LE
  misc_feature 65..1093: note = CDS
  misc_feature 1094..1366: note = RE
  misc_feature 1135..1357: note = bridgeRNA
taatgggatggtccgcccccgttctcacccggatgtggtgatgatcaagggacaggaggatcctatgcagatttcgacgatcggcatcgacatcggcaagaacagctttcacttcgtcgcctttgatgcgcgcggcgggattgtcattcggcgacagtgctcgcgtacgcaactgattcgggcgctggcgaatctgccgccctgtctcgtggggatggaggcctgctgcggcgcgcaccacctcggacggattctggtcgcacagggacacgacgtgcggctgattccgccgcaatacgtgaagccgttcgtcaagtcgcacaagaatgatctactggacgccgaagcgattggcgaagcggtccagcggccgactatgcgattcgtgccactcaagacgatggaacaactggatctgcaagccatccatcggctccgcacgcgtctcgtcaggcggcgcaccgcggtgatcaatcaactgcggggattcctgctcgagcgcggcgtcacgtttcccatcggccggcgcgtgctgatcgagcggtttcccgaggtgctggacaatcctgccctggggttgtccgtccgcttctgtcgcctgctgcagcaactccgggacgaatggcggctcctggacggctccattcaagacgtcgatcaggaaatcctcagtctcgcgcgtgacgacgaggcctgcgagcggctcatgcaggtgccgggcatcggcccgctcacggccaccgcgctggtcgccgccgtcggcaacggggcggcctttgcgaaggggcgcgatctcgcggcctggctcgggttggtgccgcggcaacattccaccggaggcaagaccgtgctgcggggcatcagcaagcgtggcaatgcctacctccggtgcctctttattcatggggcacgcgccgtctgccgccatcatcgtcagagaccgcaccgattgggacggtggctcgcgaatctcgaggcgagggcgcatcccaacgtcgtcgtcgtcgcgctcgcgaacaaattggtgcgaacggcctgggccgtactccagcgaaacacccactacgacgggaggctcctcgcgaatgcgtgacgcgtggccgtctcgggcgaccgaacaacagcggctctgatacacatcgacgtctgcgagcacatgtcaccgatgatcgaacagtccaccggcgggtccgcatcctggtccgcaaaacggtcgatctcaagaccggcgatctaatgaggacggacccgcgcggctttccatcgtggcccgaagcgatcaccgcttcactcagaggccggatacattagcgcggacggttcctcaccggtgatggcagcttgcggatcaggggcggaccataca

SEQ ID NO: 8195 - DNA, 1499 bp, unidentified
  source 1..1499: mol_type = unassigned DNA; note = element_cd725fd
  misc_feature 1..3: note = core
  misc_feature 4..257: note = LE
  misc_feature 258..1478: note = CDS
  misc_feature 1479..1499: note = RE
  misc_feature 22..257: note = bridgeRNA
ctaatgggatctgatcagcgagcctgcgatcggtaatggtcggtccgggtgatgctgattgctgagccgccggctcggtgagcactgcttcgccttggagaatcgttcgactcctaagcctagatcgtgccccgactggttggtgaggtcacctttagcgctgatggggtgtcgtgctccgagcactgatccattaggttgccgccgggtgtccttgggctcgtaaaaggttccatgacatcgcgtagggaggcgagttgacgctatttattggagacgactgggctgaagaccaccacgacattcatctgatggacgccgagggaaccaggctggcatcgcgtcgcttaccagaggggctggctggcattcgcgggttccacgaactggtggctgcccacgcccaggatcccaccgaggtggtaatcggcatcgaaaccgaccgcggcctgtgggtcgaagcactcgccgcggccggctacgaagtgttcgcggtcaatccgctcgccgtggcccgctaccgcgaccgccaccaggtatcgggtgcgaagtctgatgctgctgacgccaaactcttggctgatctggtgcgcaccgaccggcacaatcaccgcccgatcgccggggacaccccggaggtggaggcgatcaaagtcctggcacgggcgcatcaaaacctgatctggagccgcaaccgcaacaccaacgcgctgcgcagcgcgctgcgcgagtactaccccgctgcgttggaggccttcgcctcgctgtccgaccgcgacgccctggcgatcctgggccgcgctcccaccccgaccgacgccgcacggctgagtgtctcaaagatccgatcagcgctcaaagctgctgggcgacaacgcaacctcgacgccaaggcactcgagatccaaaccgcattgcgcagcgaccagctcgccgccgcgcccgcggtcaccgccgcgttcggggccaccactcgcgccgcggtcgccatcatcaccgagttgaaccaccacatcgccgacctcgaagccgaattggcggcacattttgagacacacccggacgccgacatctacctctccctgccaggactcggtgtcatcctcggcgcccgggtgctcggtgagttcggggacgaccccaaccgctacaccaccgccaagtctcgcaagaactacgccggaacctccccattgaccatcgcgtcgggcaagaaacgcgccgtactggcccgccacgtccgcaaccgccgcctctacgacgcgatcgaccaatgggccttctgcgccctgaccaacagtcccggcgcacgcaccttttacgaccaacaccgcgccgccggcgacctgcaccaccaagcactacgcgccctgggcaaccgcctcgtcggcatcctgcacggctgcctccgccaccacacgccctacagcgaacacaaagcctgggcccaccgccaaaccgacacccgagctgcttgacaacctacggtcctgggatgt

SEQ ID NO: 8196 - DNA, 1354 bp, unidentified
  source 1..1354: mol_type = unassigned DNA; note = element_cd7b0f8
  misc_feature 1..3: note = core
  misc_feature 4..79: note = LE
  misc_feature 80..1099: note = CDS
  misc_feature 1100..1354: note = RE
  misc_feature 1093..1341: note = bridgeRNA
tgatggggtggatggccccctcacggcatcgatgtgccaaagttgggttgtcaaagacaccaacggacgggagccatccatgagagaagttagcacgatcggtttggacctggcgaagaacgtcttccaggtgcacggcgtcgatgcggccggcgagacagtggttcggcgggtgctgcgtcgcgcacgagtactggtctattttgcccagctgccgccatgcctgatcggaatggaggcgtgtgcaacggcgtattattgggggcgcgagctcggcaagctggggcaccgggtaaagctgattccgccggcctacgccaaggcgtatgtgcggcgcaacaagaacgacgcggcggatgcggcggcgatctgcgaggcggtgagccggccatcgatgcgctttgtggcgatcaagagtgaagcgcagcaggcggcggcggggattcacaaggtccgtgaaatgctgatgaagcagcgcacgatgctgatcaatgcattgcgtggtctgatagccgagttcggcatcgtggtgggcgtcgggacgcggcacgtcggggaactgacggcgatcttggtcgatcccgaggatgaccggattccagcattgctgaaggacggactgcgacgaatggcggagatgttgcgtggcctcgagcgacagctccagggcattgacaagcagatcgtggactgggggcgcggcaacacgacctgccggcatctgatcaccgctcccggctatgggccgattctgtcgagcgccatggcagcaatcgtggtcaacccggcggtcttccgcagcgggcgggacttctccgcttcgctcggcttggtgccccggcaagacagtacgggcggcaaggtgaagctgggtccgatcagcaagcgcggcaatgggtatctgcgccgcctgctggtcaacggcgcgatgtcggtcctcaacagcaagcgggccaagcaggatccctggctgctcaagctgcttgccaacaaggagcgcaaagtggcggccgtcgccttggccaacaagatggcgcgcatcggctgggccctgatgatgcgccaggaggacttccgggccacttcgacggcggcctgaacggccgccgccaggaggcgcgggaggcttgcgagggtgaagacgcgtgatggcatcgtcggtctatcgacggatcgagagcgaccttctttgggtcaaggggcagcgcgaccccgtgagtttgatcaggtctcgatccacggttcccatcagggcctgcggcctcagccgcatcagcaggccggacacatgaccgcaaggccaccgatccaccatgcgaaaaaaatcccttgccagctgggggccatccacaca

SEQ ID NO: 8197 - DNA, 1368 bp, unidentified
  source 1..1368: mol_type = unassigned DNA; note = element_cd7c4ba
  misc_feature 1: note = core
  misc_feature 2..83: note = LE
  misc_feature 84..1106: note = CDS
  misc_feature 1107..1368: note = RE
  misc_feature 1130..1320: note = bridgeRNA
gaatggaagggacttcccctggatatgcacctgattaacacttgtgcaatcatggggtaaacatagccccggagagattcgttatgaccatcactactatcggcatcgatcttgctaaaaatgtgttcgctgttcatggtgttgaccaaaatggcaaaaacgttctggtgaaatccagagtaatccgcgcagctcttcccgggttgattgcaggtttaccgctctgtgttatcgggatggaggcgtgctccggggctcattactgggcaagactgtttcggcaatatggtaatgagccgcgtctgatggccgctaaatttgtatcgccataccgcatggccggtaaatcagggaaaaatgatgcagctgatgctcaggctatctgcgaagcggttcgtctcccacatatgcggtttgttccagttaaggacgagagccggcaggcgatgcagtgtctgcatcgtccccgacagggttttatcgaagagaaaatagcaacatataatcgtcttcgagggttgatatcagagttcggcgtcatcgccccacaaggtacagatgccctgcggcacatagtttctgcgcagaagaactctttacctcttcaggttcagcaatgtgttgatgatttgctggaacatgttgatcgcattgaagctaacatcactgaatatgaccaaattttgccccgcatagccaaaacagatcaccgcagtcagcggctgatgaagctaaaaggagttggtcctacaactacctgtactctggttgcctgtatcggtaatgcacatgattttaaaaatggacggcaactggcggcctggctggggttgattccatcacaatacagcagcggcagaaagtcgaagccaggcaggataacaaaagccggtgattcgtatctgcgaacgcttctggtacagggagctcgttcagtactgattggcgcagagaaaaggactgactcattcagtcgttgggtctgttcactagtcgaacgcagaggatactggcgcgctgttgtggccatcgccgccaaaaatgcaagactgtgctgggcatcattgcattacggtgatgatttcaggctgtattcagccagctaaagcaggaagaaaccgtatgaccatctgatctgcaactcgttgatgataaatggttagaccccgtgaggtatatctgattattgtacaggatatacgtatccgcttaacgaacaagagcctcacgcgcgtctttcatcagggtccgaatcgataatgattcattatggccgtttatagtaccgcagtctctccccctttatttttaactgttgtgcagacaaaccataaataccgacgttgactgttcggggaagtccttata

SEQ ID NO: 8198 - DNA, 1619 bp, unidentified
  source 1..1619: mol_type = unassigned DNA; note = element_cd7cf59
  misc_feature 1..5: note = core
  misc_feature 6..276: note = LE
  misc_feature 277..1455: note = CDS
  misc_feature 1456..1619: note = RE
ctcctatctttaagtagttgcatttctaggctgaatatcgaatgcttatggatgcaatgcagaatctggcgggcagggatgccgacatgacgtatgagagcctcagcatctcgaaaaggagagtggcatcctgccccactcaggcaaggccgcggattagctggatgaagggagtgagccatcacttcacttcggatctcttttgggaggttgcggccctgggtgccaagggcagaagagcccgtcaggaagcagacgacggaaggagctgccctcatgatcttcgcaggtgtggacatcgccaaggtggaccacgtggtcgccgccatcgacgagcgcggcgaggccgtggcaaagccgatgccattcaagaactcggggaccggattcgagaggtgcgtcgcctatcttgaggggcttgccttggacaacgccggcgtcttcgtcggcatggaggccaccggccactactggatggcctgcttctcctacctcgtctcaaggggcttcaaggtcgcggtcatcaaccccatgcaggtcaaggccgtgcgcaagctcaagggatactcacgggtcaagaacgaccgcatcgacagccagatcatcgccgagaccatgcgcatcggggatttcgacgagacgcggctcgccacggacgagctccagtcgctcaagaccctcacgcgctaccagcagtccttgaaacaggaggtcgccaccgtgaagacccaggcgatctgcctgatggacgcctacttccccgagtatgccggcatgttcaccgacatgttcgggacatcgtcgatggccatcctctcgaagtgtccgacgcccgccgagtgcaaccgcacgcacgcggccacgctcgccaagatcctctccgaggcctcgcgtggcaggttcgggaccgagaaggccgccaacgtcaaggcggccgccaagggctcggtcggcatcacgctggggtctgacgccgcgtcgttccagatcaaggagctggtgtcccggatcgtcttcctgaacaagaaggcatccgaggccgacaggcgcatctccgtcctgttgcaggggatcgaaccgctcatcctcaccatacccggcatatccaccaccaccggcgcccagatcgtcgcagagataggcgacgcatcgcgtttccccaatgcggcggccatcgtgagctatgcgggactcaactcggcggtgagccagtcgggcaggttcgaggcgacgggcgagcccatcacgaagcacgggtcgccctacctcaggaggtcgatgtggctcgcggcaaaccgagccaggcaatacgacccgaacctcaaggccttctatgacaagaagcgttccgagggcaagtgccatcgcgtcgctgtcaccgccgtcgcgaggaagctctgccacatcgtcttcgccgtcatgcgcgaccagatcccatacgacccagagagataggccggcggaacagatcacctgcgggaaacacggcatagccgcgtcgcttcgttgtgcccgaaagcattcgatattcgactttcaaagtgcgttctttcaacaaaacacgaaattcaatcccatcgaagtttctagctaaaacctcttgacttcatatagctggt

SEQ ID NO: 8199 - DNA, 1656 bp, unidentified
  source 1..1656: mol_type = unassigned DNA; note = element_cd83820
  misc_feature 1: note = core
  misc_feature 2..315: note = LE
  misc_feature 316..1566: note = CDS
  misc_feature 1567..1656: note = RE
ttcctccatttccccgcgccttcgttgcgcggacacaaatatataaccaaactcaaatcccccaaaactctagtgtgcatctctatataatagtataatcaaagagaggtggtatactacagagcacgtgaaggtgagtaggcaattctactcaaatagaatatcctgaataattataagtcgccgctatcttttcaagcacaaataagttggacttagagccaggacacttatgattgtacaatcaactgagtgattagcttagatagcagtcaatgccacttctcttctttcaatgaaaggagagatttttttatgaagattgttagaccaatctgctgtggcatggatgttcacaagaatatcattgtggctacaatcggtattactaataagaaaactcgtattaccgaatacatccaagaaacgttttcaactttaaaccctgatttactgaatcttaaacagtggctcattaatcacaaatgctttgatgcatgcatggaatctactggtaaatattggattccaattttcaacatcttagaagatgaaatcaatatttacttaactcatccaaaatatgtcaaagcaattaaaggaaagaaaactgacaagaaagattcaaaatggatctgtgatttatttaaacatgatctaatcaaattttctttcataccgcccaaagaaataagagctttacgagaaatatctcgctatcgctataaattggttggaatgcgttcctctgaacgtaatcgatatcaaaactgtatgacagtttccaatatcggtattggttctgtattttcagatccgtttggaaagtctgcacaagcaatcatgaaagaagtacttgagtcaaatatcattgaagatgagaaaattctgaaatgtatccatagatcgtgtaaaaataaagataagattctagattccattaaacactgcaatatcgaaactgatcaaaggtttaaaatgaatgaatcaatgactcatatggaagaattgcaagtccatattaataactgtgaaatcgaaatgatgaaacgtgcagcaccaatgttcgatcaattcaagcacatcacccaactaccaggtatcagcactttatctgcaattcttattatttcagaaatcggagtagatatgaaacaattcgaatcggataaacaattaacctgttgggctggattagcacctgcaaataacgaaagtgctaataagaaaaaatcagttcgtatttctaaagcaggtcaatatttaaaacctttattagttcagtgtgctcttggagcaatcaaagataaggagggctattttggaattaagtattctcgtatcaaaaagagacgaggtcacaagaaagccattatcgcaattgcaagaatgatgcttgtcagtatataccatatgattcttactggagagacatttaatccttcagattatgaatcatttagaaatcctaatccacctataaagcaacaagttttaacagaagaatcagcaattgagtttcttaagaaatcaggttttgatgtttctaaattaactaaaccataatattcaattattctattttttctaaattattcaaacttgtttttaagtttgtctttttttatacgttttgattgatttttgtttcacact

SEQ ID NO: 8200 - DNA, 1433 bp, unidentified
  source 1..1433: mol_type = unassigned DNA; note = element_cd8d120
  misc_feature 1..2: note = core
  misc_feature 3..227: note = LE
  misc_feature 228..1418: note = CDS
  misc_feature 1419..1433: note = RE
  misc_feature 13..204: note = bridgeRNA
gtcctacctttcaagcgggtctgatctggtcattcgtaagatcggagggcccgggggctttgggtatggctgccatggttgagccggctgatggctgaagggacttggccgcccagggcccggcgacgactcgaccgcccattgggagatgcggctcgatcgctgtgtaggacaacgtcggcgaggtcgtctgcgggatcgatgtgacgggtcggcggaggtgaggggtgctccggatctgggcggggatggacatcggcaagcagcaccaccactgcgtggtgatcgacgccgacgggcggcggttgctgtcgcggcgggtggccaacgacgaggcggccctgctggaactgatcgccgacgtcctggatcttggcgaggatgtgctgtgggcggtcgacctcaaccatggtggcgccgcgctgctgatcgggttgctgctcgcccaggggcagccggtggcctacctgaccggccgggccgtccatcacgcctccggcgcctaccggggcgagggcaagaccgacgcacgcgacgccttcgtcatcgccgaccaggcccgcatgcgccgtgacctggggctgctgcggcccggtgacgagatcgccaccgacctgcgcatcctgaccacccgccgcgccgacctggtcgccgaccgcacccggcagatcaaccggctccgcgcccagttgctggagatcttccctgccctggaacgcgcgctggatctgaccgacaagggcccggtcatgctgctgaccggctaccagaccccggccgcgatccgccgcgccggagcccggcgcatccacgcctggctgaaagaccgcaaggtccgcggcgccgccgccttggcccacacggccgtccaggccgcccaggcccagcacaccgccttgccgggcgagaagctggccgccgccatggtggcccgcctggccggggaggtgatgcgcctggatgagcagatcgccgagctcgacgccctcatccaggcccggtttcgcgagcatccgcacgccgaggtgatcaccagcctgcccggcatgggaccccggctcggcgccgagttcctggccgccaccggcggtgacatgaccttgttcggcagcgccgaccggctggccggctacgccggcctggcccccgccccgcgcgactccggccgcatcagcggcaacctgcgcagaccccgccgctaccaccgcgggctgctgcgggtgttctacctgtcggcgctggtcagcctgcaagcctgcccggcatcgcgggcctactacgaccgcaaacgcaccgagggcaaaacccaccagcaggcgctgctgtccctggcccgccgccgggtcaacgtcgtgtgggcaatgctccgcgacggaacgcactaccaaccctcaccagccgccacgcctgcggcttgacatcagcattgggaa

SEQ ID NO: 8201 - DNA, 1165 bp, unidentified
  source 1..1165: mol_type = unassigned DNA; note = element_cd8f907
  misc_feature 1..2: note = core
  misc_feature 3..176: note = LE
  misc_feature 177..944: note = CDS
  misc_feature 945..1165: note = RE
  misc_feature 33..197: note = bridgeRNA
cttgtatcttgaagactgattaaaattaatacgattagatttggcaaaacgtatgcagcccgatgccttccagggttcaagcccgtatatcagcgactggcgcatacgctgagccactcatctgaaacccgaacagttgtccgtattccataacgtatttgcaaggaggggtaaaaatgagtcagccaaatccactttgtgtgggcatcgatgtttccaaagccacactggacatcgctgccagcagtgatgttgctcagtttacagtcagcaatgactctgatggctttaacgcgattattaccggactgagacggcactccgttgctctggttctgatggaggccactggtgggctggaggttgcggtggcctgttcgcttcaggccgaaggttttgaggttgccgtggtcaatcccaggcaggcccgtgacttcgcccgtgcaatgggatatcttgcgaagaccgaccgaattgatgccagagtcctcacgcagatggctgaggttattaatcgtcatcctgagcggaaacgctttatcagggcactgccggatgctgaacgtcaggcccttgctgcaatggtggttcgcagacgccagttgattgcgatgttggtggctgagcgtaaccgactgtatccatcccatccacagaacaagaaaagcattaataccatcattaaagcgctggaagatgagcttgccaggctcgagaaagacatgaacagtcacatccggaaccactttaaagagattgctgagcgcctgagcagtatcaaaggtgtaggcaccatgaccgtttccgcgatgttggcggagattccggaactgggaacgctctcccggcgcgaaatcagtgcgcttataggtgttgctcctgtcaaccgggactcaggactatgcgtggccggcgaaccatttttggcggcagggctggcgtaagatcagcactgtacatggctgcgcttgtggcaacccgctttaatccggtgataaaaacgttttatgtgcgcctgcttgcagccggaaaggccaaaaaagtggcgctggtagcctgtatgcgtaagctgcttaccatcctgaacgcaatgctcagaaagaacgaagaatgggatgagtcgtaccaccacgttgctccataatttttaccttcaagacagttg

SEQ ID NO: 8202 - DNA, 1397 bp, unidentified
  source 1..1397: mol_type = unassigned DNA; note = element_cd9f274
  misc_feature 1..2: note = core
  misc_feature 3..40: note = LE
  misc_feature 41..1090: note = CDS
  misc_feature 1091..1397: note = RE
  misc_feature 1168..1394: note = bridgeRNA
taatgggatggtccgtcgtcttcaactcagatgtggcaggatgaaggcgagcacaggaggattctcccatgaaggtccacgttgcggggttgatatcggtaagacggtctttcacctggttggcctgagtaaggaaggccacatcgtcaccaagaagcgtttcagccgcaagcagctggtcacctttaccgtgaacctgccgacctgcctgatcggcatagaagcttgcccgggtgcacactttctcgcccgtgttcttctgaagcaaggccacaacgtgaagctcatgccggccgagtatgtcaggcccttcgtcaagtccaacaagaatgactatgtcgatgctgaagccattgccgaggctgtgcagcggccaaccatgcggttcgtgccagtgaagaacgaggcccaactggatctgcaagccttgcaccgtgtccgggaccgctggatcggtcgcaggactgccgtgatcaatcagctccgcggttttcttctggagcacggcatcaccgttgctgtaggcccggcacatcttcggcggcagatcccttccatccttgaagatgcggacaacctgctctcgccaaggatgaggaccctcctttctgagcttcgcgaggaatgggaaaagctggaggagcagatcgacacgaccacgcgggaacttgcccagttcgcaaagcaggaggagggctgtaggcggctgctcacgattccgggtataggaccactgacggcaaccgccctcactgcggccatcggcaacggcgctgcctttcgcaaaggccgagatctcgcggcgtggctcggcttggttccgagggagcattcaacgggaggcaaggccaggctgctgggcattagcaagcgaggcgatccctacttgcggcgactgttcgttcacggcggtagggccgtcctgggccaggttaagcgggaacggcaccagtttggtggctggctggataggctcgaagcccgatcaccaagaaacgtggcaatcgtagcgatggccaacaagatcgcacgcatggcctgggcggttctgaccagcggccaaagctataacgctgctctcacgtcgtaaggaaaagaatggaaatcgcgatgcgattaccactttccccttacgacgatgtccacgaggagttcttaagttcccgccaggtttgcaagtagattgttgatggctgaacaggtcaaaccgacccactctgatcctgctggggtatatggtctgcttttgagaccgctagggtaatgaggagagagagggtgcggattccatcatggctcggagcagcaacaccgctccactgagaagccgcatacataggagcagaccgcttccgctatccaacaataccgcttgcaatcaggcgacggaccataca

SEQ ID NO: 8203 - DNA, 1373 bp, unidentified
  source 1..1373: mol_type = unassigned DNA; note = element_cda010f
  misc_feature 1: note = core
  misc_feature 2..83: note = LE
  misc_feature 84..1109: note = CDS
  misc_feature 1110..1373: note = RE
  misc_feature 1133..1323: note = bridgeRNA
gaatggaagggacttcccctgattatgcgcctgattaactcttgtgcaatcatggggtaaacacagccccggagggattcgttatgaccatcacgacagtcggtatcgatcttgctaaaaatgtgttcgctgttcacggtgttgaccagaatggcaaaacagttctgattaaatccagagtaaccccgcaccgctcttcccgggctgattgctggtttgccaccctgtgttatcggaatgggaggcctgttccggagcgcattactggggcaagactgttccggcagtatggtcatgagccgcgtctgatggctgcaaagtttgtatctccttatcgcatggccggtaaatcagggaaaaatgatccagctgatgcacaggctatctgtgaagcggttcgtcgcccacatatgcgatttgtaccagttaaggatgaaagccagcaggcgatgcagtgcctgcaccgcactcgtcaggggtttatcgaagagaaaacagcaacgtataatcgcctgcgaggattgatatctgaattcggcgtcatcgcgccacaaagtactgatgccctgcgacacatggtttctgcacagaagaattctttaccacttcaggttcagcaatgtgttgatgatttgctggagcacgttgctcgtatcgaagccaacatagctgaatatgaccgaattttgtcccgcatggccaaaacagatcatcgcagtcagcggctgatggagctgaagggtattggccccacaacggcctgtgcgctggtcgccagtatcggtaatgcacatgattttaagaatgggcgccagctggcagcctggctggggctaactctatcgcagtacagcagcggcggaaagtcgaagcttggcaggataacgaaagctggcgattcgtatctgagaacacttctggttcagggtgcccgctcggtactgatcggggtggaaaaaaggactgattcattcagtcgttgggtttgctcactggtcgaacgcagaggatactggcgcgctgttgttgccatcgctgccaaaaatgcaagactgtgctgggcatcattgcattacggtgatgatttcaggctgtactcagccagctaaagcacgaagcagcagtataaccatctgacctgcaactcgttgatgataaagggttagaccccgtgaggcctatctggctattgtacaggatatacgtatccgcttaacgaacaagaacctcacgcgcgtctttcatcagggtccgaatcgatgacgattcatcatggccgtttatagtgccgcagtctctccccctttattttttactgaagagcagacagaaaccttgcataccggcgttgacatgccggggaagcccttata

SEQ ID NO: 8204 - DNA, 1246 bp, unidentified
  source 1..1246: mol_type = unassigned DNA; note = element_cdb8df5
  misc_feature 1: note = core
  misc_feature 2..215: note = LE
  misc_feature 216..1235: note = CDS
  misc_feature 1236..1246: note = RE
  misc_feature 32..189: note = bridgeRNA
cctttagacttgccttcgtaacttcaagctgactgtgctggaagagatagaggtgaactaagcagagttagagccttcagggctaatctgtgtatcagtcctctatctcttttcagggtgcggtgccagttagaatcataggcatccaggcctattaaaggttttagcagcacatcctgttccagtacagacaaataaaccttaaaaccaaagttatgaaaacagtctgtaccgttggcattgacatctcatcgcaatggctggatgtagcgctggtagtggacccttcagccaaacccttgagtctgttccgggtgaagaacagccaggagggaattgaatccatgtttaaacgcctgaaaaaggaggtgccagcgggatcacctccctggttttgcatggaacacaccggcaactacggattgcttttgtgttgcctgttacaggaaaagggtatgacctattcggtaataccggcaagagagatccaacaatccctgggcgtaacccgaggtaaaagtgaccggacggatgcagagcgaatcggcgtttacgccttgatccatcatcacaagctccggccatttgtgatccctcaaaaatccatccttcaactcaaagagctgatctcctaccgcgcctcgttggtgcagcaacatacccagaatgtcaatagcctcaagagccgctcaaagctcaatattgtgatcgacaatcacctggttaccgaggatctggaacaacacattcaacggctggaaaagagcattaaggcagtaaacgaggccattgaaaaagtgatcgcctccgatccggagctcaaacagaattttgatctgatacaatctgtcaagggaataggactcattgctgcaacgatgatgctcgttataacccagaacttcactcagttcgatgatggtcgtaagttcgcctgctatgccggaacggcgccttttgaacactcctccggattaaccaagggaaggaccagggtacatcccatggcaaataagcagatgaaagcaatcttgctcaacggagccaatagcgccatgatctacgaccctgaaataagggtctactgccaaaggaaaaaggccgagggcaaacaccacaaagtcatcgcaaacgccgtagcctgcaaactgatcaatcgggtctttgcagtcattaaaagaaaaaccccattcgtcctaacctacgagaaaaaaatcaatcaaaacgttgcgtaagtcttagaata

SEQ ID NO: 8205 - DNA, 1364 bp, unidentified
  source 1..1364: mol_type = unassigned DNA; note = element_cdc2e2d
  misc_feature 1..2: note = core
  misc_feature 3..75: note = LE
  misc_feature 76..1122: note = CDS
  misc_feature 1123..1364: note = RE
  misc_feature 1092..1351: note = bridgeRNA
tgttggggtggacggccctgcggcatcttgtgccaagatttggttgtcaacatccgaacctgaaggaccgtcctcatgaaccttaagcgcattggcctcgacacgtccaaagccgtcttcacactgcatggcgtcgaccaagacgagaaggcagtcctgtgccgcaacatgaagcgggccgagatggaggcgttcttcgccaaactgtcgccgacgcacgtggcgctggaagcatgcggcggctcgcaccattgggggcgtcggctcgcgtcctttggacacacggtgcagctgatcccgccgcagtacgtcaagccgttcgtccggcgcggcaagaacgaccgcaacgacgccgaggggatcagcgaggcagcggcgcgacctgggatgccgagcgtgtcggtgcggtcggccgagcagcaggcggaggcaatcgtgctgtcggcgcgcgagctgctgatccggcagcggacgcaactggtcaacgccgtgcgcggccatgccgccgagttcggcatcatcgcagccaaaaacatcagccagctgccagtgctgctcgaaactgtggctgctgcccaaaccgtgccaaccactgccaagcagttgttggagttcttgggcgggcaagtggcccaactcgacgagcggatcggcgagctggaacgccggatgaagcagcagcacaaggccaacccggtcagccagctgctggccgaggtgcctggcatcggcccgatcggcgcgctgagcctggcgctcacgatcgacccaggccggttccagtccgggcgacactttgcagcgtggctgggcctgacgcccaaggagcactcgacaggcgggcgccaacgcctgggcggcatcagccgagccggcaatgagcggttgcggcagttgctagtgcttggagcaatggcggtgatcaagtatgccaagccggggagcaagactgcttcggcctggttgctggccttgctggagcgcaagccacgcaagctcgcggcggtggctctggccaacaagatggcccgcgtcgtgtgggccatgatggcgaccggggaagcgtatcgaggcagcaagaaggtcgccacgcaggcggccggggttgccgtggccgcttaacccgctcgcaggtgccagggtgcaagaagagctgcaggagatgatgatcggtcgatccgacgaacgagtgaacccgggacgcgcaacggccagtcgaggccgcttgattgttgtggtctcgttcgcggaacccatctgggccagcggtcatgacgccgcgttaaaggccggacacatgaccgccgtcgcaccgcccatgaaatccagcagcaagaccttgcactccaggggccgtccacaca

SEQ ID NO: 8206 - DNA, 1394 bp, unidentified
  source 1..1394: mol_type = unassigned DNA; note = element_cdc3af6
  misc_feature 1: note = core
  misc_feature 2..78: note = LE
  misc_feature 79..1128: note = CDS
  misc_feature 1129..1394: note = RE
  misc_feature 1154..1385: note = bridgeRNA
taatggaatggtccggccgtgttccggccccgccagcgagggaagctggcaaggggcagcaaagacgaggagcacgctatggcatccaagctcgattctgaaatcgccgtgatcgggatcgatatcggcaaaaactcgtttcacatcgtgggtctggatcgacgtggcgcgatcgtgctgcggcagaagtggtcacgcggacaggtggaaacacggctcgccaacctgccgccatgtctgatcggcatggaggcctgcgtcggcgcacaccatctaagccgcaaactcatatcgcttggtcacgacgcccggctgatgccagccaaatatgtgcgtccctactcgagagggcagaagaacgacttccgcgatgccgaggcaatcgccgaggcggtgcagcgcccgacgatgaagttcgtcgccaccaagaccgccgagcagctcgacttgcaggcgctccaccgcgtgcgggagcggttggtcagtcagcgcaccggcatcatcaaccagatccgcgccttcttgttggagcgtggcattgccgttcggcaaggcttgcgcttcctacgcgctgagttaccgcgcattcttgccacaccccgcgacgtcctgtcgccgcgcatggttcacgtgatcgaggacctggccggtgactggcgccggcttgatgagcgcatcgagggtctatcgagtgagatcgaggctcttgcacgccgggatgtgagttgtgagcgcttgatgagcgtaccggggatcgggcccatcatctccagtgcaatggtggctgcgatcggcgctggggacgcgttctctaaaggccgcgatttcgccgcttggctggggttggtccccaagcaaatctcgaccggagaccgcaccatccttggcaagatatcgaaacgcggcaatcgctacctgcgcgttctgttcgttcaggccgcgtgggtcgtacttatcaagccgaagagctgggatcgtcacgggctcaagccgtggctcgaagcggccaagaagcggctgcatcacaacgtcctcgccatcgtgctggccaacaagctcgcccgcatcgcttggagcgtcctggctcatggccgagcattcgaggcaatcaggattcaagcctcgtgatccaacgcgagtttcgaaacgtcttacctgccgaggtctgcgagaggatgaaaacgagatggaggatcggtcttcccggcgcatgcgaacactggtgacccaaatggccccattgaggcctgaccgctaatgagatcgcacgcgcgctgatagccatgatggcccggagctcaaaaagctccaatcaaaggccggatacattgatgcaagaccgcacatccgccaactcggagaaatctgcttgcaacgcacggccggaccataca

SEQ ID NO: 8207 - DNA, 1638 bp, unidentified
  source 1..1638: mol_type = unassigned DNA; note = element_cdc606d
  misc_feature 1..2: note = core
  misc_feature 3..295: note = LE
  misc_feature 296..1471: note = CDS
  misc_feature 1472..1638: note = RE
  misc_feature 54..268: note = bridgeRNA
ctcgtattatatagtagtagtttttagagaccctcttcaaggtctttttaactattaagtcatagtcttttctttacctcttctgtaggtttgactatgatatataagatgctgtggattggtttgattcccctaccacatgatggtttaagaaaggctccaaccacagtctctttgttcatttgttaatcagttagataccgcatgacggtttatttagaacgaggttacaatcgcaaggagcaccctgtggttctaaaacagcattaatacatttcaaaggagatttatttttatgatttacgtaggaattgatgttgctaaggataagcatgattgctttattacaaactctgatggagaagtattattcaaagtatttaccatcacaaacaacctagatggtttcaatgatctttatcaaagaatcgaatccgttatggatgatgtaacaaaagtaaaagtagggctagaagccactggacactatagttacaatcttttaggatatctcattgataaaggtttgcccgcctatgttatcaatccgttacatacaaatctgtacagaaaaagtctaagccttagacagacgaaaacggataaagtagatgcccgcacaattgcttctatgctaatgtctgatgtgaacttaaagtcctactcagacacatcttaccacaacgaagaattaaagtcattaactcgttatcgtttcgataaagttaaggaacgtgccaagcttaagtcttccatttccagactagtctgtattctttttcctgaattagaaaaattagtaccaacacttcatatggcatctgtttatgcaatgctttctgaattcccgggggctaagcatgtcgctaacgctcaccttaccagacttaccaatctactttctgaatcatcaaaaggtcgatatggaaaagaaacagcaataacttttagagatgccgcaagaaactccattggttcaaacatgcctgcaaaatctttagaattaaaacacacgattaagcttattcaagagatttcttctgagattgacgaaattgaaaatgaaatcaaaatcattatggatgaaatcaattctccaatccttagcatccctggcattaactatcgtatgggagctatgattattgctgaaatcggtgatttcaaccgattcgattctcctgataaaatcttagcttatgccggcttttcaccttccacatatcaatcaggacaactagatggtgcatacgcccatatggaaaagcgtggctccagatatttgcgatacgcactatatcatgcggccaaatatgtctgtcattgggatccaacctttgctgaatatctagcaaagaagcgatccgaaggtaaacattataatgtcgctctatctcacgctgcaaaaaagctagtacgagtcatttatcatctcgaaaaaacaaatcagaaatacattaaagcagcttgattttttctaattcaatactccttttttgagcacctacatagatgctctttttgtcatgcagttttcaaggttcatctaactctaactgagttcaaaatatatctaaaatgcatttctgcactttaatcaaaaaatatcattttttaacttgacttttaatagttagt

SEQ ID NO: 8208 - DNA, 1361 bp, unidentified
  source 1..1361: mol_type = unassigned DNA; note = element_cdc9086
  misc_feature 1..2: note = core
  misc_feature 3..72: note = LE
  misc_feature 73..1101: note = CDS
  misc_feature 1102..1361: note = RE
  misc_feature 1107..1350: note = bridgeRNA
ttatgggatggcccgcccctcttcctgccacggtacactggcagggtaacctgaggaacgggagctggttcaatgcagatcgtggttctggggatcgacctgggcaagaacagctgcagcgtggtgggcctggatgccagcgggcgggtggtcctgcgacggcggctgcagcgggagggtgtcgtcaagctggcggcgggcctaccgggctgcgtgatggcgatggaggcctgttgcggcgcgcatcacctcggccgcaggctgcgcgaccagggccaccaggtccggctgatgtcgccggaatacgtgcgcccttacgtgaaggcgcagaagaacgacgaccgcgacgcggaggcgatcgccgaggcggcgacccggccgacgatgcggttcgtcgaactcaagagcgagacgcaactcgacatgcagagcctgcatcgcgcgcgtgaccggctggtgggcgaacggacggcgctgatcaaccagctgcgcgccttcttgctggagcgcggcatcatcgtgccccaggggcggcgcaagctcgagctgcagctcgggaccctgctggcaggggaggaggcctcgctcagcccgcggacccgactgctgatcgaggaccagtgggcagaatggcgcgaactggaccgccgcatcgaggcttttgacgaggagttcgcgcgcgaggcccgtgcggatgaggctgcccgactgctgctgacgatccccggcattggtcccctgaacgcgacggcgctggtcgccgcgatcggcaaagccgaaacgttcggacgaggccgggatctggcggcttggctggggttggtgccgaggcagatgacgacgggaggcaagccgaagctgttggggatcagcaagcgcggcaacgggtatctgcgcaagatgctgatacacggtgcccgagccgcgctgccgacgttgtccaagggcgagacgccgctggcgagctggctgcgtggcctgatgggacgggcacacgtgaacaccgtggtagtagcgcttgccgccaagctggcgcgaaccatctgcgcggtactccgcacagggcaaaaatttgatctgcggtccccgatggtgtcgtagtcaacaagatcggccgttggcgctcacccagcgctggcggctgacgatgtctgcgggtggtggaaacgagatggcctgacagtcgatcggcgttctggaatcctggccaaaaagatggcgctcgacgccgtgctgtttatgaggaccaggacgcgcggatctccatcttggccagggctttgccctgagaccggatacgttggcgtagactgatcggaccaggtcgtggaattcacttgcagacggggcgggccatacgt

SEQ ID NO: 8209 - DNA, 1511 bp, unidentified
  source 1..1511: mol_type = unassigned DNA; note = element_cdc9a6c
  misc_feature 1..4: note = core
  misc_feature 5..241: note = LE
  misc_feature 242..1495: note = CDS
  misc_feature 1496..1511: note = RE
  misc_feature 22..202: note = bridgeRNA
gtcactagggcaccatccttcctacgaggttgttggatgaccttgtaggagctcggcgagggtcgggagatggcttgggtcggtcgcccttcgagggccacgatgacaccgccactcccgatccttgccggggctgccgaccggccacagggagaagcgccgcagagcgccagttagtgaccacccggcacacagccccgctcgtcgagtcacgtcgctgccaccgcaaggagagttgttgttgtcccccaacgctatgggagccttgttcttcgtcgggatcgactgggccgcggccacccacgcggtgtgcgtgctggacgccaccggccagaagatcgccgcgttcacagtcgagcactccgccgacggcctggccggcctggtgcgccgcctggcccggctcggcgaaccggacaccatgccagtggccatcgaacgcccggacgggcgcctggtcgatatcctgctggaggccgggcaccccgtcgtgccggtcaaaccccacgcgatcaagacgtggcgagaatccgaagccggctccggcgccaagtccgaccccggtgatgccgaggtcatcgccgactacctgcgctgccgccaacgcaaactgaccgtggccgtgccctactcggccgaaacgaaggcactgcgcacggtagtccgtacccgcggcgacctggtcgacatgcgggtcgccgcgaccaaccagctcgccgcgctgctggacgcgcactggcccggcgccaaggccatcttcgccgacatcgagtcgccgatcgcgctggagttcctgacccggtacccgactgcccggcacgcggtgggcctgggtgccaagcggctggccgcgttctgcgccaagcacggctactccggccgccgcagcgctgatcagttgctgacccggctgcgggccgccccgacaggcaccaccgaccagaccctgtgcgaagccctccgcgacgcggtgatcgctctggtcaccgtcctcaaagccctcggcgccgcgctgaaagacatcggccgcagtgtgaccgccacactcggggagcacccggacgccgagatcttcacgtcgctgccaaggtctggtcagatcaacgccgcccagatgctcgccgagtggggcgatgcccgcccagcctacgcaggaccggaatcggtggccgcgctggccggcgccacacccgtaaccaaggagtccggcaaacaccgcgccgtgcacttccggtgggcctgcaacaaacgcttccgccaggcgatcaccaccttcgccgacaacagccgccacgaatcggcttgggccgcccaggtctacaccaacgcccgcgctcgcggcctggaccacccgcacgccgtgcgtgtcctggcccgcgcctggatccgcgtcatctggcgttgctggatcgaccgaataccctacgacccgggccggcacggcaacgccgtacgacttgcagaatccgggcaaccaacacaggttgccgcctgaggttgacacagggagt

SEQ ID NO: 8210 - DNA, 1425 bp, unidentified
  source 1..1425: mol_type = unassigned DNA; note = element_cdccef3
  misc_feature 1..4: note = core
  misc_feature 5..205: note = LE
  misc_feature 206..1411: note = CDS
  misc_feature 1412..1425: note = RE
  misc_feature 4..172: note = bridgeRNA
ttccctaagaatggttggcggtccgggaggaccgggtatggctgatggggttctgccgttgatggctccgaaggaatggccgcccggtcctccgggacgctccgaccactgattgagaactgcggccatcgctggttagggacctgtcggcggagtgttcttcgggccacggaagtgctggtcacggtggaatggaagcgacgggttgagcactcgacagggccggatatgggtcggcatcgacgcgggcaaggggcaccactgggcggtggccctggacgcagacggcgagacgttgttctcgacgaaggtgatcaacgacgaggcccagatcctcgctctcatcgagaccgcccgagagcgggccgacgagatccgctgggcggtggacatctccggccgagcttccacgctcctgctggccttgctggtcgcccacggacagagcgtggtctacgtgccgggccgcacggtcaaccggatgaccggcgcgtacaagggcgaggggaagaccgacgccaaggacgcgcgggtcatcgccgatcaggcacgcatgcgcccgaagggcttcgccgttttggacacgcctcctgagctggtcaccagcctgagggtgctgacgaactaccggaccgacctgatcgccgaccgcgttcggctgatcaaccggcttcgcgatctgctggtgggcatctgcccggccctggagcgggccttcgactactccgcggccaaaggcccggtcgtcatgctgaccgagtaccagaccccggctgccctgcgccgcatcggcgtcaagcgtctgacgacctggctcgaacgccgcaagatccgcagcgccgccgacgtcgccgccaaggcggtcgaggccgcccagtcccagcagatcgcactgcccggcgagaaacggtcggcgaagctggtctgcgacctcgcccaccagctcctggccctggacgagcggatcaaggacaacgaccgggagatccgtgagaccttccacaccgacgaccgcgccgagatcatagagtccatgcccggcatggggcccatcctgggcgccgagttcatcgccatcgtcggcgacctgtccggctaccgcgacgccggcagcctcgcctcgcacgccggcctcgccccggtcgcacgggactccggccgccgcaccggcaactaccaccggcccaaacgctacagccggcgcctgcgccgggtgttctacatggctgcccagtccgcgatgatgcggccgggcccgtcccgggactactacctcaggaagcgaggcgaggggctgctgcacactcaggccctgctctcgctcgcccgccgccgagtcgacgtgctgtgggcgatgctgcgtgacggaaagccgttcacctccgccccaccggtcacacaagcggcttgacttcgtcattgaga

SEQ ID NO: 8211 - DNA, 1480 bp, unidentified
  source 1..1480: mol_type = unassigned DNA; note = element_cddaf9d
  misc_feature 1..2: note = core
  misc_feature 3..229: note = LE
  misc_feature 230..1459: note = CDS
  misc_feature 1460..1480: note = RE
  misc_feature 10..230: note = bridgeRNA
ctaataaggggtaccgggtcgcctttgggagactcggagttaggtggccgccggcaggtgagcactgcgcaagccccgggctttgagcccttgagtcagatggtgcccttgccggtgaccgggagagccgatcgctgctgggatgtcgtgcccgcttgccgcgtgagcactgttattagggcgctgatgttctctcccgctggctgccgggctgttctggcgggcatggatgggagtgcgggtgcggctgttcacgggtgatgactgggccgaggaccatcatgacatcgaggtgatggacggggcgggcaaggtgctggcccggcggcggttgccagaggggatggccgggatatcccagctgcatgccctgctcggcgggctgggtgacgatgatgacgaggtggaggtgctggtcgggatcgagactgatcacggaccgtgggtggcggcgctggtcgcggcgggctaccgggtgttcgcggtgaacccgcagcagtcggctcggttccgggcccgccatgcggtgtcgggggccaagagcgacgctggggacgcgcacgtgctcgcggacatggtccgcaccgactcccaccagctgcgtgaggcggccggggacagcccggacgcagccggaatcaaggtcctggcccgcacccacaagacgatgatctggaaccggacccgggaggtccagcggctgcggcaccagctgctgcagtacttcccggccgcgctggaggccttcagtgacctcgatgctcccgaggccctggagctgctgggcaaggtgccggacccggcccgggcccggaagctgacccgggcgcaggtatcggcggcgctcaagcgggccggccggcgggacatcaccgggcgggccacagcgatcctggcagcgctgcgcagcgagcagctgacccagccagcggccctggccgccgcctacgcggccacggcccggtcgctcatcgccgtcatcaccgcgctgaatgagcagatcaggcttctggaagagcaggtgagggagcattttggccggcacccggacgctgagatcatcttgtcccagcccggcatgggcatgatcctcggcgcccgggtgctcgcagagttcggcgacgaccccggccgctaccgcgacggcaaggccaggaaaaactacgccggcaccagcccggtcacccgcgcctccggccggaagaaggtcgtcgcggcccggcccgtgcacaacgaccggctcgtcgacgccctcaacgcccaggcgttctccgcgctcagcgtctcacccggggctcgcgcctgctacgaccagctccgcgcccgcggcatcggccacaacgacgccctgcgacggctcgcgaacaggctcgtcggcattctgcacggctgcctcaaaacccgcaccccctacaacgaaaacaccgcctggggccaccgccagcaactagccgcttgacacgctaagcccctgggatgt

SEQ ID NO: 8212 - DNA, 1186 bp, unidentified
  source 1..1186: mol_type = unassigned DNA; note = element_cde4cf7
  misc_feature 1..2: note = core
  misc_feature 3..208: note = LE
  misc_feature 209..1171: note = CDS
  misc_feature 1172..1186: note = RE
  misc_feature 6..213: note = bridgeRNA
cttgtatgtttaagccggaccagcgcgatagagtcgagccgccgatgagacgaccagaccgatccgcgcagcctggaaggttcttgggctttgaagcccgtctctgagtagatggcgcgcggtcatcgtgctggtcttcttccaaacccgaacggttacaggcgccggctctaccgagcgcgcatggacaagaaagggatcgaaggccatgtctgcattctcagtggtagcgggcatcgacgtcgccaaggcgcatgtcgatgtggacgttgtcggtgcacagttcgctgcgcagcgattcgacaacgaagccgaaggacacacggcagtcgcggtggcgctcaaagcgctcggtgtcggcctggtcgtcatggaggcaacgggtggatacgagacggcgctggcttgcgccttgcaaggcgccggactggctgtcgcggtggtcaacccgaggcagccgcgcaagttcgcggaggccatgggctacctcgccaagaccgatcgaatcgacgccagggtgctggcggaattcggtcagactctggctcgacgccctgatctgagccgcttcattcggcctatggacgatgctgaccagcaatggctggcagcattggtcactcgccgtcggcagttgattgcgatgatgctgtccgagcggcaacgactgcagctcacgcccaagaaattgcaccccagcattgaagccatcatcgcggcgatcaaggcgcagctcgacgacatcgagggccagatggtcgcgcacgtcaaggagcacttcagcgcgctcgacgcgatcttgcaatcggtcaaaggcatcgggccagtctccagcgccaccttcattgctgaactgcccgaactgggcaagctcaatcggcgtcagatcgcctcgctcgtgggtgtggcgcccttcgctagggaatcgggcacgtccaaaggtcgacgacgagtccagggaggtcgtttcgacgtgcgtcgcgtgctctacatggccacgctcaccgcagccttccgcaaccctgtcttcaaagcgttttatcagcgtctggtcgacgctggcaaactcccaaaggtcgccctcgtagcctgcatgcgcaagctcctgaccacgctgaacgcgatggtcaaaactggttcgacttgggatccagagcactgcagagcttgacatcggagacggtta

SEQ ID NO: 8213 - DNA, 1398 bp, unidentified
  source 1..1398: mol_type = unassigned DNA; note = element_cdef819
  misc_feature 1: note = core
  misc_feature 2..88: note = LE
  misc_feature 89..1114: note = CDS
  misc_feature 1115..1398: note = RE
  misc_feature 1164..1390: note = bridgeRNA
caatggtatggacccctcccaccttacggcatcgatgtgccagtttggtagaatttaaatttccaaacaaccggaggaggagtccgagatgaatattaaacgagtcggtattgatttagcaaaacaagtctttcaagtgcatggcgtggactatcaggataaagcggtgttgcgaaaacagttgcgcagaaaccaactgctgagttttttcgctatgttaccgccgtgtttgattgggatggaagcctgtggtggtgcgcatcattgggcgcgggagttacagaagctgggccataccgtaaaactgattgcgccgcagtttgtgaagccttatgtaaagagcaacaagaacgatgccaatgatgccgaagccatttgtgaagcggtaggccgacctacaatgcgttttgtgtcggtcaagacaattgcccaacaagacttgcaggcgatccaccgaattcgtagcgagctggttcgtcaacgaactgccaagatcaaccagatcagggggttgttggcagagtatgggcttgttgtcggccgacatgtggccactctgcggcgagctttacctgagctgcttgaaaatgccgaaaacggtctcagttttgatttcagaggattattggaggatttgcggcaagacctcaatcggttggatgagcgggtggccgagatggacaaaaaagtccacgccctagcccatagtgagcctgctgccaagcgtttgcttagtattcccggcattggcccaattagtgccaccgctattctttctgcagtaggcgatggcaaacaattcaagcgtggacgtgacctagcggcttggatggggctgacacccaagcagcatagcagtggtggcaaagaccggctgttggggataagtaaacgtggcgatacctatctgcgaacactattcattcatggagcgagggcggtactgaaagtgtcggacaaaaaagaggatccgcgaagtcgctggatacaaaacttatgcagccgccgcaataaaaatattgcggctgttgccctggctaacaagaacgcgcgtattgtgtgggccttgttgaccaaagaaaccgatttcctgccggaaggcaaacctgcttgagtccgaaggcaagccttcaaacccaagcaggttgagataaaaggaggtattcacccacgattgtgaagcaacaactactgatggtaaacaggtcgaaccggcgtttacaaaccctgatatatccggtgtgcctcagagcacgacaggtcgatttaggagtaaacgcgcgaatagcccattatggcccgagtcaatatattcaattatgaggccggatatacgtgtgcagtcgtacccaaaaaccaacggtgatttatgcttgcaaaacgggaggtgtccatata

SEQ ID NO: 8214 - DNA, 1543 bp, unidentified
  source 1..1543: mol_type = unassigned DNA; note = element_cdf25cf
  misc_feature 1..2: note = core
  misc_feature 3..243: note = LE
  misc_feature 244..1422: note = CDS
  misc_feature 1423..1543: note = RE
  misc_feature 3..220: note = bridgeRNA
cttgtattatagagtagtagttattaaagcccctctccaagggctatatgctacactgtaagggatgctgtggattggtgttcaagtcctaccacgagatggtttcagaaaggttccaaccacagccccttacaattttgttaattagttaaataccgccagacggtttatgtggaacaaggctacaaaagtaaggtgcactgtggatgcagcatcacatatttatcgttggaggtatctgttatggtggtttctgttggcatcgatgtttcgaaagataagcacgattgctttatcgtcagctccgatggtgaagtcctggcagatgtgttcacaatttccaatacgttggatggattccactacctattgcagcgaatccaggattgtaccacaccgaaggacaaaataaaagtagggcttgaggctaccggtcattacagctacaatctgctcgggtttctccttgacaatggtctgaccacctatgtcctgaaccccttgcgcacaaatctttaccgaaagagcttcagcctgcgaaaaaccaagactgaccgggtggatgcgcgcacgattgcttctatgctgttgtccgatgtaggcctcaaaccctacacagatacagcataccacaacgaggagttaaagtcactgaccagataccgttttgacaaggtgaaagagcgtgccaaactgaaaagttccattgcccggctggtctgtatcctgttcccggaactggaaaagcttgttccttctctgcatattgcttctgtctacgccctgctggaggagtttcccggtgctaaacagattgccgcagcccatttgacgaggttgaaagcacttcttgaaacggtatccaaaggccgctacaaacgggatgtgactcttgaaatccgtaatgccgccagaaactctattggctcctggatgcccgccaagtcccttgaattacagcacaccatccggctcgtccatgaactggattccgagattgcagaaatcgaaaagcagattcagtccttaatggatgaactcgattctcccattaccacgatccccggattgggattccgtatggcggccatgatcctggccgaagttggagacttcacccggtttgactccccggacaagctgttagcttataccggaatgtcaccttctacttatcagtccgggcaactgaagaattgctacccgcacatggaaaagcgtggctcccgatacttacgctacgcactttacaacgcgaccaaatacgtctgtcactgggacccgacttttgccgcctatctctccaagaaacgggcggagggcaagcactacaacattgcactttcccatgctgccaagaaattggtgcgacttattttcgctatggagaaatccaagcagccatattgcccagcggcttgagtgcaactacttgaatagccagcaggggtctgtcaagacctcagctttgctataccttttttgaactatctcttttttcatcatcaccattcatttttggggttgacttttaatagttaat

SEQ ID NO: 8215 - DNA, 1514 bp, unidentified
  source 1..1514: mol_type = unassigned DNA; note = element_cdf82c1
  misc_feature 1..2: note = core
  misc_feature 3..243: note = LE
  misc_feature 244..1494: note = CDS
  misc_feature 1495..1514: note = RE
  misc_feature 6..230: note = bridgeRNA
ctaatgagatcagtcgggtccgcttctgggaggctcgactgcagcagcggccggctggtcagcactcgccctctcaggctcctttggaagcctattggcagatcgtgcgcccgccggttcgccggtggctggactgctgatgggatgccgtgccccgtgttggcgggagcacttgatcattaggtcgcaggggtccccgggtgctgtgatcttgccggatgggacacggaggagttgctgcgggtgctgttcattggagacgactgggctgaggatcaccacgatgtcgagctcgaggacgagggtggccggcggttggcccgggcccggttgccggaaggactggagggcatcgcccggttgcacgcgctggtagccgagcatgcccgggcgggctggtcggggctgtcgtccgaggaggtggccggccgggttgtcgtcgggattgagaccgaccgtggcccgtgggtgtctgcgttgcgggcggccggttaccaggtattcgcgatcaacccgctatcggtggcgcggtaccgggagcggcattccacttcgggtgcgaagagcgacgcgggggatgctcacgtgctcgcggagatcgtccgccttgaccgtggccatcaccgtgcgatagcaggggacagcgagctggcggacgccgtcaagctcctgtcgcgtgcgcaccagaccgcgatctgggaacggacccggcatgtgctgcggctgcggtcggtgctgcgtgaattctttcccgccgcagtggaggccttcgacgacctggcctcggcggacgcgctgtcgctgctcggacgggctccggacccggcgcgggcagcgaaactgccccgcgcccagatccccgccgccttgcgagccgcgcgccgccatcacgccgaggcccgggccgatgccatgctgacggttctgcgagctcccggactacgtcagccgccggtcaccgagggcgcgtatgcggccgttgtcgccgggcaggtccgcatcatcacggctctcaacgagcagatcgcagggttgcaggaggtgatggccgggcattttggccgtcacccggccgctgacatctacctcagccagccgggtttcggcgtggtcctggcggcccgcgccctcggcgagttcggtgacgacaaccagcgcttcagcgacgcccgggcccgcaagaactattccgggcagagcccgatcacccgtgcctccggcaagaaaaccgtcgtgctggcccgctacgccaccaaccgccgcctcggtgccgcgctgcacctgcaggccttcgctgcgctgggcgcatcaccgggcgcccgggcctactacgacgcgctgcgcggcaggaacatcggccaccacgcagccctccgccagctcgccaaccggctcgtcggcatcctccacggctgcctcaagaccggcaccctctacgacgaggacaccgcctggcagcatcaccacactgacactcagaccgccgctgcttgacaaatttcaggatgggatgt

SEQ ID NO: 8216 - DNA, 1148 bp, unidentified
  source 1..1148: mol_type = unassigned DNA; note = element_cdfb253
  misc_feature 1..3: note = core
  misc_feature 4..208: note = LE
  misc_feature 209..1138: note = CDS
  misc_feature 1139..1148: note = RE
  misc_feature 16..191: note = bridgeRNA
gcttgtgtctgccagcttgtctagcattggggtgagagcgatgggtggcatgctgaacccatgcagtgtttgaagcacgggcgggagcctaagcagccacccattcgcctctggcccgaagcccgaacagttgatcgagtcacccctcgaaatgcacaagcgtgggctagctagagtgctctcgtcccgagcataggagaatctggtcatgtcgtcatgggtaggcatcgatgtttccaagaacacgctcgcggtctgggtaaggccgtcgggcgtcaactttatcgtctgcaactcaagcgaaggtcatcaggccttactgctgaatctggctgacatccaggttgaacgggtgcttttggaggccactggcggttacgaacgtgccgtgatgggttgcctggcgcaggccggctacccggtcgtgcgcatcaatccccgacgcgcacgcgcattcgcccaagccatgggaaagctggttaagaccgacccggtcgatgcctgcgtcctggcgcacctggcccaggtgatcgagcctagcgcctgccagactgtttctctcgcacgagatgaactgcaggagctggtgcggcggcgagagcaggtagtaaagctgcgcgatgatgagcgccgtcgcctgacccttgcccgctccgcagtggtccaggaaagcctgcagacgaacatctcccagttgaacgagcagatcgctcgactgaacagtgcgatcgaggcggcagctcagcgaaccgacaaccagttggttaagcaattgggcgccatcgcgggcatcggtccggtgactgttgccagtctgctggcttatctaccagagctgggtcagttgaaccgacgccagattgcagccttggccggcctggcgccctacaacaatgacagtggccagcactccggcaagcgctgcatcaagggcggccgtgcttccatccgccgcgtactctatatggctacatggtcagtcattcgttgccattcaagctttggcgcccgctatgcctcgcttcgagcccgcgggaaatgcgctaaggtcgctctggtcgcttgcatgcgtgttctgctcattcgcttgaacgcaatggtgcgtgaccattcgtcctggcgagcggaggctgtatgagaagacagtt

SEQ ID NO: 8217 - DNA, 1395 bp, unidentified
  source 1..1395: mol_type = unassigned DNA; note = element_cdfb9f8
  misc_feature 1: note = core
  misc_feature 2..75: note = LE
  misc_feature 76..1125: note = CDS
  misc_feature 1126..1395: note = RE
  misc_feature 1163..1386: note = bridgeRNA
taatgggatggaccgaccgtgctcttaagcgcaccgtattaattgggggcgctttccacgagaggagcacatgtcatgtccaggaagcaaagcaatcccacagtgattggcatagatatcggcaagaacaatttccatctgatcggccttgatgatgccggcgagattgttatgcggcgcaaactatcgcggcggcaattggcggagcggctggtgaatttaccaacctgtttgatcggtatggaagcctgtgtgggcgcccatcatttatgccgccgtttgttggcgctgggccatgatgcccggattatgccggcgcagtatgtcaaaccgtaccttcggggccagaaaaacgattatcgagacgccgaggcgatcgccgaggcggtgcagcggccgcgcatgaggtttgtgacgctgaaatcagttgagcaactcgatctacaatcaatgcaccgagtgcgcagtcgccgggttcgccaccgtacttccatcatcaatcagatccggacgttcttgttggagcgcggaataccggttcgccaaggagcgcgttttctaattgccgccctgccagagatccttgcccaacatagtgacctgctctcaccgcgtatggagcagatactgatggatctgtgtgatgagttacatcgactggacggccgcttgaagagcatcactgaagagatcgaagccatcgctgaagccaatgaagcttgccagcgtttaatgaccgtgcccggcgttggtccggtgatctccagtgccatggtggccgccgtcggagacggcgcagccttcgacaggggacgggactttgccgctttcctaggcctggtgccaaagcagatgtcgacgggcggtgagaccatccttggacgcatctctaagcgtgggaatacttatctacgcacattgttcattcgtggtgcaaagatcattctgatgcattcaaagaactggccaaaacatcgatttggtccctggctggaggcagcctccaagcgcatgcataagaacgtgcttgcggtggcactggccaacaaactggcgcgcatcgcctggagcgtgttacgccatggtgatgattatgatcccaagggtgcattcacggcggcataggctgcccacctgaacggataattgaaaagaggagaacccccgccgaggtcttgcgagaccgaatgaaggatggaacaaccgtctgctggcgtgttcgaaccctggtgacccaaatggcccaaccaaggcctatcggctaatgagaccgaatgcgcgctgatacccatgatggcccggagcaacgaagctccacattgaggccgaatacatttgtgcaggaccgcttatccatcccgattttgttcttgcaacgcacggtcggtccataca

SEQ ID NO: 8218 - DNA, 1329 bp, unidentified
  source 1..1329: mol_type = unassigned DNA; note = element_ce13850
  misc_feature 1: note = core
  misc_feature 2..260: note = LE
  misc_feature 261..1313: note = CDS
  misc_feature 1314..1329: note = RE
  misc_feature 20..258: note = bridgeRNA
ctgtgaggatcgacagcgcagcctgatcgtgctgggctgtggtcgactgcttcgggtgtgactcttggcctgactggctttgtgcctttgaccggacttgtccgctcggggtggtcggccccggcccggtcggagtttgactggcctgatcaggagcttgaccgccggcgttcgcagcgtcggcgtgtcccgtcacagtcctgccgtgactcctcccggaccggacccttcgtccgctccagagcatcgggaggaacgcaatgaacagtttgtccgagatcgtcgaggtcgtcatcggcgtcgacacccacgtcgagacccacaccgccgcggtcgtcgacgccagaactggtgcggtgctcgatgagctgaccgtgcacaccaccccgcagggttaccaggacctggtcgacctcgctgacgcgcacagcgcgttgcgggtatgggccatcgagggcaccggtggtcacggcgccggcctggtccgacacctgggccgcgccgaggaagtggtcgtcgagctggaccggcccgaacgcaccaagcggcgccacggtgccaagtccgacctgttggacgcggtccgcgccgcccgcgaggcgctggcccgcccgaagctgggtaccccgcgcgctggtggggaccgtcaggcactgtcggtgctgctggccgcccgccgctccgccgtggacgcctccactgtggcgcaacggcagctgttctcgttggtcatcgccgcccccgagcacctgcgtaccaagctgcgcgggcgcaagctgcccgagatggtgcgggtcgccgctcggctgcgcatccagagcaactgggaccgcgagtccgccgcgaccgcgaccacgctgcggaccctggcccgacgcacccaggccctgaccatcgaggccgccgacctggagaagcagatcctggccatcgtccgctcctggcgcccggacttgctcgaccagcccggtatcggcccgatcgtcgccgcgacagtgctgtgcgcgtggtcccaccctgggcggatccacaccgaggccggattcgcgatgctcgccggcgtcgccccgatccccgccaacagcggtcaggtcaccacccggtaccggctcaaccgccacggtgaccgccagctcaaccgggcgctgcacaccatcgtgctggtccgccagcgctaccacgaacccaccaaggcctacaccgaccggcgcaccacacagggcaagaccccacgcgagatccgccgctgcctcaagcgctacatcgcccgcgacctctaccgaatcctcgaacatcacccatcaacggcttgacaacccataggagcgt

SEQ ID NO: 8219 - DNA, 1403 bp, unidentified
  source 1..1403: mol_type = unassigned DNA; note = element_ce1b039
  misc_feature 1..2: note = core
  misc_feature 3..89: note = LE
  misc_feature 90..1127: note = CDS
  misc_feature 1128..1403: note = RE
  misc_feature 1145..1389: note = bridgeRNA
tgatggggtggacgccccctgctccccggcatccaggtgccatatggtggtcgtcgtgaaatcggccacagtcgagaggagacgtccaaatgcaaattaccacgatcggattggacctggcgaaaaacgtgtttcaagttcatggcgtcgatgccgaaggcaacgtcctgattcggcgcaaattgcgccgcgcacaggtccgggagttcttcgcgggacttgcgccatgcctcatcggaatggaagcctgcggcacggctcatttttgggctcgagaacttatcgcaatggggcatcaggcgaagattatgcccccgtcctacgtgaaagcatacgtgaggcgtggaaagaacgacgcggcggatgcggccgcgatctgcgaggcggtgatgcgaccgcacatgcgcttcgtgccggtcaagaccgaagagcagcaagcggctttgatgctgcataaggcgcgcgagttgctggttcgtcagcagacgatgctgatcaacgcgatgcgcggacatatggccgaactcggcatgattgcaccgcagggctctgcgaaaatcaaggatctgatcgctgttatccaggatgacgaagatcaaagcattccggctctcgcacggacggctttgcagcctctggttcatcagatggaaacgctcgacaagcagatcgaggcgctcgatcgggagatcaaggcttggcataagacgaatgagacaagtcgtcggcttgcgacaattccgggcataggcgtcatcaccgcatcagcaatcgcggccacggttccagacccgtcgttcttcaaatccggtcgtgaatttgcagcctggctcggcctgaccccaaggcaaaattccagcggcggcaaagataggcttggccggatttcgaagaaaggaaacacctatattcgccgtcttctcgtcaccggcgccacgtcaatgttgcgctatgcgcgcgcgaagacagcgccaggagccgattgggtcaatgggcttctccaacggcgcccggcgcggttggttacggtggcgatggccaataagaccgcccgcattgcgtgggccgtgatgaagaaggaggaaaactttcgagttccggtcccgcccgtgaccgaagcggcataatcacggaagtcgaaaaaaccgaacgaccttaccgtttaatcgagctttgcaagggtgatcagacaacgtgatgccaaccggtcgaaccggggattgggacaactcgccacgcgacatgcagcaacaactgcgtctgattgattgagacccgatccgcgaacttcatcagggcccgcggtcaaccgccgcaagcgaaggccggacacatgaccgcacccgaccaaattggcagcgtagcgtcaaaaaacttcttgcaaagacgggggcgtccacaca

SEQ ID NO: 8220 - DNA, 1396 bp, unidentified
  source 1..1396: mol_type = unassigned DNA; note = element_ce200e2
  misc_feature 1..3: note = core
  misc_feature 4..100: note = LE
  misc_feature 101..1129: note = CDS
  misc_feature 1130..1396: note = RE
  misc_feature 1169..1393: note = bridgeRNA
cgatgagatggtctcctccctctccctctacggcgtcgtgatgcgcctgagaatagatgctaaacatctattgagaagcgaacggagacaggaggagaccatgaacaaatctatgacagtcggcatcgatctggcaaaggctattttcttcgttgtcgttctggacccgtcgggtaaacaggtgcaccgcaagaagcttcgccgtcagcaggtattggcttttttggcgaattacccgcaagcagtagtggccatggaagcctgttccggatcccattactgggcacgggaaattgaagcagctggtcatcaagtgaagctattgccaccgcagcacatcaaggcttacttgcgccgtcagaagaacgattataacgatgccgaagccatagccgaggcagctcaatatgggcgagtacgcgccgttgcggtgaaaacggttgagcagcagctggatcaaagccttcaacgcatgcggcaggctctgcttgccgaccaaatcgggttgatcaatcgcacacgcgccctgctggcagagcacggcattgtcatgcccgaaggcaaggcgaacttccgcaagacggtcgtagccttgctggaagatcctgagaacggattgccttggcgtctgcgcgaactggtcaatcgtcagtatcagcagtactgcatttgggagcaggaactggagtggtacacacaacagattgagatcagagcgaatcaggatgaggtctgccagaatctaatgagcatcccgggctatggcgaaatcgtcagcagtgccttccgctgctggataggcgatggccaccaattcaagaatggccgggatgcctccgccgctatggggctggtccccaagcaatacagtacgggaggcaaaattatcctgggcaggatctccaaatgtggcgacaaacgtatgcgggcgttgctggtgcatggtgccagggcattcgcgcgcgtggccagcaagcgcaatgacagactcagtcgatgggtgtgcaacctgattgagcgacgaggctacaacaaggcagtcattgctctagcgaacaagttggtacgcataggctgggctgttgtaacccgctgtgaaccttatcgggcgatcaatatcagtcagtaaaagctgggcaaggcacgggttaacaagaggagttccccccaaggttgcgaaggcaatcagcaagcgatgacaacacaggttaggccggtgtatcgaaaacctgcggagggtcagggccatcaaggccgtgaactcgattaggacgatacacttacggtactcatcgaggcccgcagccgcaggttgcatacagaggccggatatacgacagacaacctacatgccatcaaatgctggaggccttgcaaagagggaggggaccatata

SEQ ID NO: 8221 - DNA, 1426 bp, unidentified
  source 1..1426: mol_type = unassigned DNA; note = element_ce21be3
  misc_feature 1: note = core
  misc_feature 2..237: note = LE
  misc_feature 238..1413: note = CDS
  misc_feature 1414..1426: note = RE
  misc_feature 14..249: note = bridgeRNA
ctactagttctattgaccttaggtcgggccttggccgaggctcggtttaggtgtctggggtggtcgctctgtttgcggctgtccgtggcgtgatgttggcccgtgactctcatttggcgtgcgctgccccaggcaccgatcggggcgggagaggctgaagaagggaatgctctgccattagtagcggtgccctcctggctccatccatcgatcggaacgagacaggaggaggacgttatgggtgtggcgcggcgggttgtgatcgggatggatccgcataagcggtcggtgaccgtggaggtgatggaggccgacgaacagatcgtggggcatgaccggttcggtaccgatgttgctgggttcgccgagctggtcgggttcgccggtcaatgggccgaccgggtgtgggcgatcgagggctgtgaggggatcgggcggcacgtggcgcagcggctgttggcggctggtgagcaggtggtggatgtgccagcgaagttgtcggccaggatgcggatgttcgccaccggtcagggccgcaagaccgacgacaccgatgcccactcgatcgccttggtcggggtccggatcagtggcctgcaaccggtcgtctccgatgaccagctggagatgctgcggctgctggtcgaccggcgccgccggatcggccaggaacatgtgaccaagatctgccagctccatcagctgctgttggagcttgtcccgggcggggcgaagaaggacctgtccgccgcccaggcccgcaagatcctcgccggcgtgcgacctggtgatgaggtgggcaagctccgcaagcggatcgcgctcgaactggtcgtcgacctggaacggatctacctgcgcaagaagcaggccaacaaggaactcgtgaccctgctcaagaccaccggcaccgggctggtcgagctgcacggcatcggacccacgggtgcggccaggctcctggtcgaggtcggtgacatcacccgcttccccaaccgtggccacttcgcgtcctggaccgggaccgcacccatcgatgtgtcctccggggaccgacaacaccaccggctctcccgcggcgggaaccgacagatcaacatggtgctccacatgatggccgtcgttcagctccgcaaccacaccgaaggacgcgcctactacgaccggaaagtggccgccgggaagagccacaacgaggccatgcgctgcctgaagcgacgcctgtccgacatcgtctatcgagccctgctcgacgactacgtcacggccaaggcgacaggcccgggagggcaccggggaacgacacatcaatccagcgtggccggctcacatccccacaccagcacttcggacaagccacttcccggacccgtcaccacaaagcctacgaccaccctgcccaaggcctcttgacacagaagggagc

SEQ ID NO: 8222 - DNA, 1522 bp, unidentified
  source 1..1522: mol_type = unassigned DNA; note = element_ce22de2
  misc_feature 1..3: note = core
  misc_feature 4..245: note = LE
  misc_feature 246..1376: note = CDS
  misc_feature 1377..1522: note = RE
  misc_feature 3..219: note = bridgeRNA
cttatattatatttagcgcagttagctactgccaaagcccaagtggtatacttggaataagccactgtggattagttcatttcctccaatcgcttgacgatttccgaaaggctctaaccacagcttttgtttcaattggtaatgagtttgataacgcatagacgtttgatctcgtctaaggtaacaaggcaaaaaattcgtggataaccaagtagacttgaaatactatatctggaggtactcccatgctttatgtgggcattgatatcgctaaaaataaacacgatgttacagccttgaatgttccaggaaaaactgttcttaaaccactcactttttcaaataataaagctggttttgaactcttagatctgtctcttcgacagctcaaccaagactgtctcatcgctcttgaaaataccggacattatgcctttaatctactgaacttcctgcatgaacaaggatataaagtttacacctacactcctttgctcatcaaggaatttgccaaatcattatcacttcgcaagactaaaacgaataagaaagacgctcatggcatcgctcttaaacttctttctgaccccaatcgtgaacaatttcaacacgataatcggcaagtagaactaaaaatactggctagacatattcatcgtctcaagaaaaaacagtctgattggaaagtacaatacactcgttgtcttgatatcatctttcctgagttggataaaatcgttggaaagcattcagaatatacctaccaactcttgacacgctaccctaatcctcagaaaaggcttgaggcaggatttgataagctgatagaaattaagcgattgaccgcttctaaaattcaggatatcctctcagtcgcacctcgttctatcggaacaacatctcctgctcgtgaattcgaaatcatcgaaatcatcaaacattacaagaggctcattgacaaggcggaaacatgtgtcaatgacttgatggctgagttcaactcggtcatcacgacggttactgggattgggggtcgtttaggggcggtcattttagccgagattcgaaatattcatgcctttgataatcctgctcaattacaagctttcgctggactggattcttctatttatcagtcaggtcagattgatttagctggaagaatgatcaaacggggttcccctcatctgcggtgggcactcatacaagctgccaaagcatgcgctcgcttttcacctgcttttaaggcctatcttaagactaagttagaacaaggaaaacattacaatgtagccatcatccaccttgcaaaaaaacttatccgaaccctgttttatatcctaaaaaagagctgccatttgacgaacaaaaagtgatgtaatttctgaaattaacacaggattacctttgaaaaaatggactttttcaagggctttttgccgtgctctaaaatcatcgccaaatcatcaaattgaaataagaaatagtttagataaaactattgacttttcttatagtttgt

SEQ ID NO: 8223 - DNA, 1371 bp, unidentified
  source 1..1371: mol_type = unassigned DNA; note = element_ce24a5e
  misc_feature 1..2: note = core
  misc_feature 3..75: note = LE
  misc_feature 76..1110: note = CDS
  misc_feature 1111..1371: note = RE
  misc_feature 1083..1359: note = bridgeRNA
tgatggggtggacgccccccgacggcatcgatgtgccagagtggaggtgttgaagcactactgagggaggcgtccgtgtcagaggttaccacgattgggctggatatcgctaagaccgttttccacgcgcatggcgccgacgagcggggcggcctggtgttcagccgcaagctgggccgggcgaagctgctcgacttcttcgcgaagcagccggcgtgtctggtcgcgatggaggcgtgcagcggtgcgcatcattgggcgcgcgagctgcggacgatggggcatgaggtgcggctgatcccgcccgcctacgtcaagccgttcgtgaagcggcataagaatgatgcggtcgacgcggaggcgatctgcgaggcggtgcagcggccgggcatgcgcttcgtggcggtcaagagcgaggagcagcaggcggccggcatggtgttccgcacccgggatctcgtcgtccggcagcgcacccaactcgtcaacgcgctgcgtggccacctcgccgagttcggttgggtcgcaccacgcggcctggcgcaggtgacgatgctcgccgacctgctcgacgaggaggagatggcctcgtcgctgcccgaggcggcgcaggccatgctgcgcgtcatggccgacatgctcgccgggctcgatgaccgcatcgccgatctcgacaaggagatcgcccggcgtgcccgcgaggacgaggtggcgcgcaggctgatgaccattcctggcatcggaccgatcgccgccactgccatcgtcgcgcttgccccgccggccgagaccttcaccaagggtcgcgacttcgcggcgtggcttggccttgcgccgctccagcactcgaccggcggcaggcagaagcttgggcgcatctccaagatgggggagcgcactatccggcgactgctcatcatcggtggcagctcggtcgtcaggcaggcgactgtccgtggcgcgccggcgggttcatggctcgagcgcatgctggcgcgcaaaccgcacatgctcgtctcggtggcgctcgccaacaagatggcgcgcatcgcttgggccctcatgaccaggaacgaggattacagagatccggcggcggtcgcggcgtaagccgggacagcggtcagaggcgtcggggacgtaggcggtcgaaggagggtatggcacaacggtcggcgagacggggccggaagaaccagggaatggcggagcgctagccaagcgcggaaagctgatgtggttccggtccgcgaactcccatactggcccgcagctatggcgctgctcatcgaggccggacagatgacagcatccgactacgtgccgatctaccccgattttaccgcttgcttccgcaggggcgtccacaga

SEQ ID NO: 8224 - DNA, 1424 bp, unidentified
  source 1..1424: mol_type = unassigned DNA; note = element_ce282dc
  misc_feature 1..2: note = core
  misc_feature 3..241: note = LE
  misc_feature 242..1123: note = CDS
  misc_feature 1124..1424: note = RE
  misc_feature 1122..1411: note = bridgeRNA
tgttggggtggacgacccccgaacggcatcgaaatgtgccagcatgaggtcgttacggatctcaaacaaaggaggccgtcctggaacagattatcaggatcagaatggacacgtctaagcatttttttcagcttcatggtgtgaatgctaccgaccaactggtgctgcgcaagaagctgcggcgcaaggagatggtggcgttcttcgagaagctgccgccgacggtagtggggatcgaggcgtgcggggggcgcatcactgggcgcggttgcttggatcgctggggcacgaggtgaagctgcttccgccgcaatacgtcaagccctatgtcaagcgcggcaagaacgatgccgccgatgccgaagcggtgtgcgaggcgatgagccggccgacgatgcgcttcgtcccgatcaagggcgccgagagccaggcgacgttgatgctgtttggcatgcgcgaccggctgatccgtaaccgcacccaactcgccaacgcgatccggggctatgccgccgagttcggactgaccgccgctaagggcatgtacaaggtcgagtcgctgctcgagcggatcgcagccgatgagaacctgcctgagttggcgcgcgctctgttcgcacttcacgcgaaggaatatgcgcaactgcaagcggaactggagaccatcgaggcaaagctgatggcgtggcaccgcgaaaacgagtgcagccggcggctggcccagatccccgctgtcggcccgatcgtcgcctccctgctgacgatgaagacaccggcgcccgagctcttccgatcgggccgcgacttcgcagcctggattggtctgacgcccagggatcattcgaccgccggaaaaacccggcttgccgtcatcacgcgcgcgggcgacgaaacgttacgaagcgcaatggtggtaggtgcgacttcacttcttcgtcaggttcgtgctggtcgtggcaagaacgccttgccctggcttgtcaacctgctcaagcgcaagccccccaagctcgcagcagtggcgctggccaacaagatcgcccgcatcgcctggaagatgatggtcaccggcgaaaattatcgaaaacctgctgttcagccagaccttgcatgtgcagcttaagtgatcagtcggtcacggtcagcggagagacaaagctaccgtgctgatctgatgcgttaacttgcaagaaacagcagatggtatgatcgatcgattcgggactcgtgacactccgcttggcgcaatggtcgctgtagtcgcaatggcagctgcaggtcgcaaaattgtttggaacacgagtcgcgaaccccatcttggccagcgttcatttgtgagcgccacaacaggccgaacatatgcacgcaagcgatccgatcaaatcactgccaaaaacccttgcaaggagggggtcgtccacata

SEQ ID NO: 8225 - DNA, 1629 bp, unidentified
  source 1..1629: mol_type = unassigned DNA; note = element_ce2a95f
  misc_feature 1..2: note = core
  misc_feature 3..296: note = LE
  misc_feature 297..1508: note = CDS
  misc_feature 1509..1629: note = RE
  misc_feature 22..316: note = bridgeRNA
ctcctgatctactacaatgtttttatggttgatatacctaacagccagttaggttattatccatcttgttgcttaaactgttagaatgtatgaagcaatcggtatatcggcttccttttctggacttcgcgtccgttaattagactgatagccagctcctcgttcgcagtgttcgttttatgcaggttgaactgcctctaaggtgcgttcgtgtcacaccacagtagatagaataggcaatgagtaaaactggtactgacccattgcaattattattctaaagaagtgacatatatatgaacgcagtcggtattgatgtttccaaagggaaaagcatggttgccatcctccgtccgggtggatcaattgtctccaagccctttgtggttcgccatttatccggagaattacagtcctttattcaacagattaaatctctggaagatgagactcgtattgtcatggaacacacggggcgctattatgagccaatcgcacgtgagctttcagaggcaggtctctttgtaagtgccattaatcccaaactcatttgtgactttcaagatgaagataatccgcttcgtaaagtcaagtctgataaagcggatgctgttaaaatagctcgctatgctcttgacagatggcagaaattaaaacaatatggttctatggatgaaatacgcaatcagttaaaaactatgaaccgtcagtttgctttctacatgaaacacaagactgctatgaagaacaatcttattggtatcctcgacctgacctatcccggggtaaatgcctactttgacagccctgcccgtgaggacggcagccagaagtgggtcgatttctccactacttactggcatgtaaactgtgtttgtaagatgtccctcaatgcttttgtcgagcactaccggaaatggtgcagccgtatgaagtacaacttcagtagatcaaaagctgaagaaatctacggaacagcaaaggaacttgttcctgtacttcctaaggacgaaacaaccaaacttatcatcaaacaggcgattgaccagttaaatacggcttctcagacagttgaacggcttcgctctcttatgaatgagaccgctgccaaactacccgaatatcctgttgttatggctatgaaaggtgttggatcttctcttggcccccagcttatggctgagattggagatgttacacgctttacccataaagccgccattacagcatttgcgggtgttgatcccggcgtaaatcaatccggtgattatgagcaaaagagcgttcacgcttccaagcgaggctcacccacgctgcgtaaaaccctatttcaggtcatggatgttcttatcaaaacaaagccacagaacgaccctgtatatctgttcatggataagaaacgtgcacagggtaagccttactacgtttacatgactgccggtgcgaacaagttccttcgaatttattacggacgtgtaaaagagtatttatcttcacttccgcaataaccattacctacctatcttttttagaccagcaataatcggtggtctatttccaatgtccaaaaatccacataaaactttttacctgaaatcatcaatttactattgactttttctttgcagg

SEQ ID NO: 8226 - DNA, 1339 bp, unidentified
  source 1..1339: mol_type = unassigned DNA; note = element_ce3718e
  misc_feature 1..2: note = core
  misc_feature 3..236: note = LE
  misc_feature 237..1208: note = CDS
  misc_feature 1209..1339: note = RE
  misc_feature 6..209: note = bridgeRNA
cttgtatctcgactttgtcttctcagaaggtaaagttctcgactgatcatcgagggaaaggcgtgaagacgaccggctcctagtggcgttatagcctgcgaagtagatccattctccgcctttccaacctcactcattgagctcgtacgatatctagggccacgctgtgagctcgcatttacaaggtcgaagccgagtgacgcgatgattgatcttcagttgaaaaggagaacagcatgtctgcattcgttggcgttgacatggccaagaatacttttgatgttgcgacgccgttggaaaatggcaaacaccgcaccaagggcaagttgagcaatgatgccaagggatttgccgagttcgagtcctggctccagaagcatgccaccgccgatgcgctgattgtcattgaggccacgggtaactaccacgaagcgctggcagatttccttttccaaaagggatatcggcttcatatcgcgaaccctgccaccaccgccgctcatgccaagtcggagttgtcacgcaacaagactgacaagactgatgccaaactcatctccgatttcgccatgcagaagcatcgcaagctaaggctttgggtgcctgagccacagtcgcggcgccgcctgagggcgttggtccgccgtctggaagatctcaacgagatccgtcagatggagaaaaaccgcctggaagttgccagcccgaacgtcgtaacgtcgatcgaatcggtgattgctcatgtctcggaagaaatcaccgaaaccgaaaaagcgatcaagcagcacatcgacgatgatcctgacctgcgcggcaagagcgagttgatgacctccatcaatggtctaggcgagaaaactgccgcgctgatcctcgcggaactgggagaccctctggattacgagggaccgaaaaagctctctgccttcgctggattatcgccccgacaggaccgctctggaggctacgtgggtccaacccgcataagccgaaccgggtcgtcgcggctcaggggcggtctttacatgcccgcgatcgtaggaattcaacacaatgaggtgctgagagaattcgccaagagattgaaggcgaacggaaaggctcccaagcaagttatctgtgcagtgatgcgcaagatgttgcacctggtctatggcgtgcttaagagcaacaagccattcgaccctggaattgctttggccgcttgaaggctgatcgactaggacttggatggccaaggggtcgttgccgggtgagctgcggaggtaccttcgtgcctgactagaagcagcagcgctaacgcgctgctggggttgcagtcgagatatcaagacgatat

SEQ ID NO: 8227 - DNA, 1365 bp, unidentified
  source 1..1365: mol_type = unassigned DNA; note = element_ce38db9
  misc_feature 1..2: note = core
  misc_feature 3..85: note = LE
  misc_feature 86..1111: note = CDS
  misc_feature 1112..1365: note = RE
  misc_feature 1088..1352: note = bridgeRNA
tgatggtgtggatacctcacccagaaacggcatcgcaacgtgccaaagtggtgatgtcgaaaacacctgatcggaggaggtatcaatggaagaggttacagtcatcggcattgatttggcaaagtcggttttccagttgcccggcgccacggtgaccggcgcgccaatgttccgcaagaagctatcgcgggcgcaggtcctgaaatttctgggcgaacagccgccttgccttgttgccatggaagcctgcgcatcctcgcattactggggacgcgagatcatgaagctggggcacgaggttcgcctgatcccgccgatctacgtgaaaccgttcgtcaagcgccagaaaaatgatgccaatgacgccgaggccatcgccgaagcggttgtgcgcccgaccatgcggttcgtgccggtcaaatccgccgagcagcaagcccgctcgatggtcttcaagacccgcgatctcttcgtccggcagcgcaacgcgatcatcaatgctctgcgcggccacctgatggaatatggcatcatcgcgcctcccggtcggacattcgtcaagcggctggccaagcagattgacgctccaaacagcgatctgccgccggtcgtcatcgaactctgccggctgcacctcgaccagctcgacgccgtaacagagaaaatcaaaaggatcgaaaaacgcctgaaagaagcggcaggatccgacccggagacaatccggcttcagaccgctcctggcgtcggcccggtcagcgccatggcaatccaggccttcgcaccgccgctggagggcttccgccgcggacgcgattttgcggcatggctcgggctggtcccggtacagaaatccacgggcggtaaacaggttctcggtcgaacgtcgaagatgggtcagcgcgatatccgacggttgctgatcatcggcgccatgacccgggttcgatgggcggtccgaaacggcgctcccaaggggtcctggctggagcagatgctggcgcgcaaaccccgcatgctggtcgccatcgccctggccaacaagaccgcccgggcaatctgggcaatgatgacgaaaaaggaagacttcaaggatccggtcgcggtcgcctgagacggctttggccggatgatgtgagaaggacatttggacagtaaggataagcgatcggccagatcgaggttggggaaaccaggcattcccagagagctcagcgctcgtgccattgatatggacccaaccttcgcatcgccataccggcccgcggcatgtgacgcgccgcacatgaaggcctgacacatgaccgtacccgatcacatgttcgaaccgtccagaagaaagcttgcatcgcccgaggtatccacaca

SEQ ID NO: 8228 - DNA, 1464 bp, unidentified
  source 1..1464: mol_type = unassigned DNA; note = element_ce3bb86
  misc_feature 1..5: note = core
  misc_feature 6..201: note = LE
  misc_feature 202..1449: note = CDS
  misc_feature 1450..1464: note = RE
  misc_feature 23..234: note = bridgeRNA
tccttaagttcgtaggtgcagttacttcgtgttgttacgttgtgctgtgacccgggtgggtcgggtgaggcgaatgtttgtttgccggcccgttggtgcggcttgaaaggactggccgcccggcccgcctggacttcctcgggccgctgattgagatctgcgagtgatcgcttgtttaaggaaatgccggcgaggttgtccgtggggatcctgttggcagacaagcgaaaagaggtttcgatgacggctgctcagttttgggctggtgtggatgtcggcaaggaggtgcattgggtgtgcgtggtcgacgacaccggtgcggtggtgctgtcgcgcaagctggataacgacgagcaatgcatccgagcgctgatcggtgagatcgacgcgttgggtgagcaggtttcctggacggtggacttgaccaccgtgtacgcgactttgctgctgacggtgttggctgatgccggtaagtcggtgcgctatctggcgggccgcgcagtctggcaggcctcggtgacctaccgcggcggtgaggccaagaccgacgccaaagacgcccgggtgatcgccgatcagtcgcggatgcgcggtaccgatctgccggtgctgcatcccgacgatgacctgatcaccgaattgaggatgctcaccgcccatcgcgcggatctggtggctgatcgcacccgcacgatcaaccggctgcgccaacagctcgtggcggtgtgcccggcgttggaacgggtcgctcaactgacccaggatcgtggctgggtagtcttgctgtcgcgctaccaacggccgaaagctattcggcagagcggtattacacgtctgacgaagatcctgaccgacgctggtgtgcgtaacgcgcacacgatcgccgaggccgctgtcgttgccgcgaagacccagacgatgcggctgcccggcgaagaggtcgccgccgggctggtcgccgaattggcgcagggggtgatcgccctcgatgaccgcatcaagaccactgacgctgacatcgagggccgatttcgcaaccatccactcgccgaggtgatcaccagcatgcccggcatcggattccggctcggcgctgaattcctcgccgtcgtcggtgatccagcactgatcggatcggccgaccaactggccgcctgggccgggctggccccggttgcccgggattcgggaaaacgcaccggacgactgcacacccccaagcgctacagtcgccgactgcgccgagtgatgtacatgtccgcactgaccgcgatccgctgcgactccgcttcccgggcttactaccaacgcaaacgggatcagggaaagcgacccatcccggctaccatctgcctggcccgacgccgcaccaacgtcctctacgcgctcatccgcgataaccgcacctggcaacccagttcacccccgatcgctagaacggcggcttgacatcctcattgagag

SEQ ID NO: 8229 - DNA, 1400 bp, unidentified
  source 1..1400: mol_type = unassigned DNA; note = element_ce3fea4
  misc_feature 1: note = core
  misc_feature 2..222: note = LE
  misc_feature 223..1362: note = CDS
  misc_feature 1363..1400: note = RE
  misc_feature 14..237: note = bridgeRNA
ctacttgtttcattgatctacgaccgcagcccggccaggcttggtcgaggtgaccggcggagtcgctcgctcgcggctgtccaccgcggtttggtgtgactcactcatggcatgcgccctgccggtcaccgcggcgcggagtggctcaagagggactgcccagctcaaagtagcgctgccctcccgccggcatccactgtcggctcgaggagaggcgaacacatgggccaggtcatcatcggagtagatccgcacaagcgttcctcgaccatcgaggtcatcgaccagcgggaacgggtgctcggcaagggcaggttcggcaccgaccgcgacggctaccaggccatgctcgccgccggacgtaaacacaccgatcgcgtgtgggcggtcgagggttgcaacggtatcggccggcacgtcgctcagcgtctggtcgccgacggcgagaccgtcctggatgtgcccgcgaagctgtccgcccgggcccgggtcttctccaccggtcaaggccgcaagaccgacccggtcgacgcgcacagcgtcgcagtcgtcgccctgcgaactcccgacctgcggcatgtggtcatcgacgacaccacgatggcgctacggctgctcgtcgaccgccgcgaccaactcggctacgcccgcaccgtgatcgtgtctcggctgcaccacctgttgctcgaactgattcccggtggagcgaagaagttcctatccgcccagcaggcacgcgccctgctcaacaccgtccggccacgcgacgtcgtcggcaagacccgccgccggctggcctccgaactgatccacgagctcacggtggtcgacaagaagatcaaaatcgcgaaccaagaactcaccgaactcgtcgcctcgaccggcagccggctgcagcagctgcacggcatcggcccgtccggcgcagcgcgcctgatcggcgacatcagtgacatcagccggttcaccagccgtggtcacttcgcgtcctggaacggcaccgcacccatcgacgcgtcctcaggcgaccagaaccggcaccgcctgtcacgggccgggaaccggcgcatcaaccgggtcctgcacatcatggccgtcgtccaactgcgcaacgacaccgaaggccgccgctactaccggcgcaaaatcgcccaaggcaaaaccaccatggaagccatgcgagctctgaaacgcagactgtccgacgtcgtctaccgccagatgaccgccgacgccaaacgactcaagacgggcccgggaggacacgtgggggcgactctgcaatccagcgcggccgacccaaaccccaaggccgacacttcggaaaaagtcacttcccggacccgccgaaccccagcctagaacatcgcttctcactgcttcttgacacagaggggcgc

SEQ ID NO: 8230 - DNA, 1445 bp, unidentified
  source 1..1445: mol_type = unassigned DNA; note = element_ce43f1c
  misc_feature 1: note = core
  misc_feature 2..227: note = LE
  misc_feature 228..1430: note = CDS
  misc_feature 1431..1445: note = RE
  misc_feature 9..224: note = bridgeRNA
cgttaccgtcttcgtggccctgaaacagggctcccggcctccggccccggtatgactcggtcccccagtcgatgatgatcgaaaaggtggtgtcgccggtgccggaggcattggcagaccgctgattagaggcacgagcgcccttgggcagtctcttcgtaacgtggatgccggcacgctgatgccgcaggtgaggccgggaagagtgcgagcgcgggagcgaaggcatgtcggatgagccgggcatagacgtctatcttggcctggacgttggcaagggcgatcatcatgctgccgctgtgaaccaggcggggaagaaggtcttcgacaagccgctgcccaatagcgaaccaaggctgcgggagcgattcgacaagctccaggccaagcacggaacggtgctggtggtcgttgaccagccggctaccatcggggccctgccgctggcggtcgcccgggacgcgggctgccaggtcgcctacctgcccggactcacgatgcggcggatcgctgacctttaccctggcgaggcgaaaacggacgcccgcgacgcgttcatcatcgcggacgccgccagagcgatgccccacactctgaggaccatcgatctcgcggacgagaccgttgccgaactcgcgatgatcgtcggattcgacgacgatctcgcaggcgagtccacacggatcgccaaccggcttcgtggccttctcacccagatccacccgtccctggaacgagtcttgggaccgcggatccagcacccggccgtgctcaaactgctagaccagttcggctccccggcccagatccgcaaagccggacgtcgtcgcctcgtgaccctgatacgtcccagggcaccacgaatggccgagcgactgatcgaggacatcttcaccgcactcgacgaacagaccgtcgtggttcccggaaccgatgctgccgcgctgatcgtccccagcctcgccagttcactccagtccgtgcttgaccagcgcaaactcctcgcggcacggatcgaggaactcctggacgcccaccctctttcccaggtcctgatctcaatgcccggcatcgggatcaggaccgcggcccgcatcctcatcgacgtcggtgacggcagcggcttcgccaccgccggccacctcgccgcctacgccggcctcgcgccggtaacccggaactccggctcctccatccgcggcgaacatccctcccggcgaggcaacaaacaactcaagagggccttctacctggccgcgttcgcctcgctttcccagcccgagtcacgcgcctactacgaccgcaaacgacgcgaggggaaacaccacgtcgccgccctcatcgcgctcgcccgacgccgcatcgacgtcctcttcgccatgctccgagacggaaccttctaccaaccacccacaccagcaacggcttgacgaaaaccatagagg

SEQ ID NO: 8231 - DNA, 1558 bp, unidentified
  source 1..1558: mol_type = unassigned DNA; note = element_ce473bf
  misc_feature 1: note = core
  misc_feature 2..83: note = LE
  misc_feature 84..1145: note = CDS
  misc_feature 1146..1558: note = RE
  misc_feature 1320..1549: note = bridgeRNA
taatgggatggcccggccgtgctcagcggcctaaaactaccgttgggcaagacggggaggcatcaaagctcaaggagctcacgatgcacacccaacagaaatcatccgatccggtcgcgacgatcggcctcgacatcggcaagaacaccttccacctcgtcggcctcgatcaacgcggcgccatcgccatgcgcatcaaggtattgcgcaaccagcttatccgccggcttgtcaacctgccgccctgcctgatcggcctggaggccggctctggctcgcatcacatcgcgcgccagatgaagccactcggccacgacgttcgcctgatccccgcgcaatacgtgaagccttttctcaaaggacacaagaacgactaccgcgatgctgaggcgatcgccgaggcggtgcaacgaccaactatgagcttcgtcgccatcaagacgcccgagcaaagcgatttgctgtcgctgcatcgcgtgcgctcacgtctcgttcgccagcgcactgccatcatcaaccagatccgcggctttctcatcgaacgcggcatcaccgtgcgccaaggtccagcacccttgcgcaaggcgctacctgaggtcttgagttcacctcccgaggcgctctcgccgcgcatactgcgcctcatcgccgaactcgctgaggactggcgccacctcgacgcgcgcctcgaagtgctgtcagccgagatcgagagcctctcccagcacgatgtggcctgccagcgcttaatgaccgtgcccggtatcggcccgatcatctcgagcgccgtggtggcagcgatcggtaccggcagcggcttcaagcagggtcgcgacttcgccgcctggctcggcctcgtgcccaagcaggagtcgaccggcgatcgcaccaagctcggcaggatctccaagcgtggcaacaagtacctgcgcaccctctttgtgcaggccgcccacgtcgtccttgagcggcgccctgcggcggccatgcgtgccttgtggccctggatcgagcgggcctccaagcgcttggcgcatcgcaatctgctggctatcgcgctcgctaacaagctcgcgcgcatcgcttgggccgtgctcgcccgcggccgcgactacgaaccacggatcacccccaatgctgcttaagatccgctcgctcagattcaccaagggaatggacgccgtccctctccgccaccctcgctcgccaatccttttcgattgggcaagcgagcgaggatggctcagagggaatggcttcacgtgactcccagatgaccaaaaagtgaaagggtcaaatatcgatcggttcaacagcttccccaccgaggtctgcgagatggaatgaggagatggacgaacggactgcccggcgcaaccgcgagactgggtgccaagatggcccttcgaggtctttccgttagtcagtgtcggatgcgcgcggatacccatcctggcccggagcatcaatgctccacaccagaggtctgatacattgatgcagctctcacgttcgaccgctcaacattccgccttgcgacgcacggccgggccataca

SEQ ID NO: 8232 - DNA, 1640 bp, unidentified
  source 1..1640: mol_type = unassigned DNA; note = element_ce4e972
  misc_feature 1..2: note = core
  misc_feature 3..295: note = LE
  misc_feature 296..1516: note = CDS
  misc_feature 1517..1640: note = RE
  misc_feature 16..318: note = bridgeRNA
ctcctacaataagattacaaggtacagataacccaacagccagttaggtacctgctcccttcattgctaaagctgttagaatgggatggcatggtagcggaccgtcacctccttggaccataagcgtccgtacgaaagccagtcccccagccactctcgttcgcagccgttcgatttatgcaggttgaaccgttgtacataagttacaatgcgtccgtgtgataccccaggagattgaataagcaatgagaaaactggaaccattgcataatcaatgaccgggaggaaatcagctatgttaaacgcagtaggtattgatgtatcaaaaggccgcagtactgttgctgtcctgcagccaggcggtattgtgattcataagccttttgatgtaaagcacacatccactgagctccaccaactcacaacttatcttggatcactggagggtgataccagagtcgttatggaaagcaccggacgttatcatgagcccattctgaaagcactaaccaaagcaggtctgtttgtcagcgcagtcaatccacatctgatccgaaattatggcaacaatacaatccgcaaggtcaaaacggatccagcagacgcgaagaagattgctcgatacactcttgacaactgggctgagcttcgtgagtatacagatatggatactactcgcacacaactgaaaactcttaattcccagtttaacttcttcatgaagcagaaggttgccgccaagtcaaatctgattgccttgctcgaccagacctatccgggtgtgaataagctttttacaagcccaactcgctctgatggaacggaaaaatgggtggattttgcctattccttctggcatgttgactgtgtacgcaagtccggtattaaggcatttaccgagcgctacgagcgattctgccaacatcacggctataactaccagccggatatgcctcagcgaatctacgatgcctccagagacctgattgcagtacttcctaaggagtccgtttacaaagaactcattcaggacagcattcaggaactcaatcttgccgccagacacgtggaagagcttcgatccaggatgaatgaactggcgtcaatgcttccggaatacagcacagtcatggccatgcatggtgtcggcaaaacctttgggcctcagctcattgctgagattggcgatgtaagtcgttttacccatcaggaagcgcttactgcttacgccggcgtagacccaggaagagatgactctggccagcataacagtacaagtgttaatgcttccaaatgtggatctcctcgcctacgaaaaacactttttctgatcatgaccgtgattctccagaatggagaaaccgatgaccctgtaagcaagttcctcttcaaaaaacgatctgaaggaaaaccctaccttgtctatatgactgctggtgccaataaattccttcgcgtttactatggcaaagtaaaagagtgccttcggaatcaggaacagacaacgactgaataacacagtcaagcagctttacagttttgaattagagagactgcctgaatgaaggtggtccagttagttgtgcccaaatttctgttttcatttttcttcaaattctccttgactttttattagccgg

SEQ ID NO: 8233 - DNA, 1717 bp, unidentified
  source 1..1717: mol_type = unassigned DNA; note = element_ce5477e
  misc_feature 1..2: note = core
  misc_feature 3..331: note = LE
  misc_feature 332..1573: note = CDS
  misc_feature 1574..1717: note = RE
  misc_feature 39..315: note = bridgeRNA
ctcgtataaatatgtatatctacatttactaactacagttactgccaatcggtttggtgatgcccatgatactattgactctgtgtcaatcaggtaaaagttctttgtcctcctgttggatcctttggatcacttcatagttaagtcagttcccctgacacggaagttagcttcaaaccagctggttgtttgccagagtctgtgaacttcctcccggcagtgaggatcgcatcagttcacctctggctggattcttattcgcgagggtgtcgatgctccgtgatcatgggtattaccaaaccgattgaccaccaataacgaacgaaaggaggtgactcaattgaatccactttacgtaggtattgatgtcgcaagccacagcaatgttgcctatctgatgaagccggacggttccaaacactccgtgtttcccatcaccaactcgaaggcgggctgccagcagcttgtaaaacgtattgtgtctgccatgactggcaacggactttcggaaatgaagatcggtatggaagcaacttccatatacggttctcatctcgtctacactctcaaggaggacttttctctttcggcttataccaaagagatccatgtcctgaatcccaagcaggtcgccaagttcaaagaatcctatgatgacctgcctaagaatgactatgtagatgcctatgttattgcagactgcctgcgcttcggaagaatcaacaatgaggtttatctcggggattaccgctacgaggccctgaagaagctcactcgtgcccgttataccgctgtcgtaaacctctcaagggaaaaacaacgattcctcaacactttgtttctgaagtattcaacctttgcacaggagaaggtgttttccgacaccttcagtactacggccctggctgtctacgaagagtttgaatccgcagaccagctggctctgatggacttacatgaactcactgaattcatcaaggagaaagggaagaaccgcttccctgaccctgatgcagtggccaaagccattcagaaggctgcaaggagttcctaccgtctgcctaaaacagtgaacgactccgtgaaccaggtgctttctatatccataagctccatgagagctctggaagcaagtattaagcagtatgacaaagccattgctgaacaaatgaatgccatcagcaatcctctgatatcggtcaaaggaatcggctctgtttattctgcaggtatcattgctgagatcggtgatatccatcgctttaaaaatcaggcatctcttgcaaagtatgcaggccttgcctggaagcaacatcaatctggaggatttgaagcggaaaatacgcctctgatccataccggcaaccggtaccttaagtattatctgtgcgaagctgttatgtctcttgtacgatgcgatactgagtacaacagctactatcatctcaaatacaaagaggtgaatcgcgcacagcacaaacgcgcactcgtgctaactgcccgtaaattcgtgcggctcgtttattgtctgttaagcgagaaccgcatgtatatcgccccggaagagcgataacttagctgctccatccggcattctcagccccgcttctgaaaaagcggaatcgacggggcttgggtgagtgtttttgccttgagaaaaaggcggagatattacttgtatctctgcttaatatcaagttgacatctcacctctgga

SEQ ID NO: 8234 - DNA, 1392 bp, unidentified
  source 1..1392: mol_type = unassigned DNA; note = element_ce54d11
  misc_feature 1..3: note = core
  misc_feature 4..85: note = LE
  misc_feature 86..1123: note = CDS
  misc_feature 1124..1392: note = RE
  misc_feature 1123..1379: note = bridgeRNA
atgatggtgtggacggctccccactcggcatcgaatgtgccaggatgagccattgaaacagtcaccatcaaagggagccgcccaaatgaacgctagcacggtcggactggatatcggcaagaggtattttcaaattcacgccgtcgatgaggtggggacggttgtccaacgcaagacggtgacccggggccgcctcctacagcagttcaggaagatggagccggcccttgtgggcatcgaggcttgtgcgaccggacattattgggcccggcagcttaaagcgatgggccatgatgctcggctgatcccgcccacctatgtgaagccttacgtgcgccggcaaaagtctgacgcagcggatgccgccgccatctgcgaggccgtcagccggccctcgatgcgcttcgttccgatcaaatcggctgatcagcaggcttttcgctcattgacgcgggtccgggaaaggctcaagagccagaagacggccacggtgaatgcggtgcgcggtcatctggcggaatttggtctggtcaacaaggaaggcaaagatgggctcgccaggctgaaggcctgcatgcagcaggccgatgaaaacgcgctgcctgctacggcgaaagaggcccttcagccgcttatcgcgatcatcgaggaactggatgccaagatagcggcactcaacaagaagatcgaaagggagcaccgcgcgaacgaggtcagccgccgcctggaaacgattcccggcatcggcccgatcaccgccagcaccttccggggcgccattcccgacccgggctttttcaaaagcgggcgtgagttcgcggcgttcattgggctggtccccaaacagcattcaacagggggcaaaacccggctcggtcggataagcaagcaaggagaccaacgtttacggagccttctggtctgtgatgcggccagtatactccggtctctggagcgcgatccggaaaaaatgaagcgcaatcaatggattgctcagttgttggcaacgaagcctcgtaaaaaggtgatcgttgcgatagcgaacaaaatggcccggaatatctgggctgtcatgaccaagggtgtgacctatcaaccggcatctggttttttgagcgcctgatccgagtctgcaaaggaaaggccgcttaaaaccgaatgcttgcaagagaaggatgatggacggggcaatgcctccgcttaccggacaaacccggattgcgccatcgggcttcgaacccgaaaagatgattgggaccggaagcgggcgccatcagggccagcggccaagggttacacggccgcatcgaaaggccggacacatgaccgcaggcgactgctttaccccgcccagccgtactttcctcttgcaagccggggagccatccacac

SEQ ID NO: 8235 - DNA, 1566 bp, unidentified
  source 1..1566: mol_type = unassigned DNA; note = element_ce65ae2
  misc_feature 1..3: note = core
  misc_feature 4..267: note = LE
  misc_feature 268..1437: note = CDS
  misc_feature 1438..1566: note = RE
  misc_feature 3..245: note = bridgeRNA
cttgtattatagagtagtagtgtttatagtccctctccaaggacttttatgctatactgtttagagatactgtggatcagttctcatcccctaccgcaagacggttacagaaaggctctgaccacagagaaaggctctgaccacagtctctttgtacagttgttaattagttagatatcgcatgacgatttatttagaacaaggttacaatcgcaaggagcaccgtggactaaacagtatcgaaatctatttaaaagagggatcagtatgatttgtgtaggaattgatgtggcgaaggacaagcacgattgcattatcgtaagctcggaaggtgaggtactttttaagccctttgttatcctcaacaaccgtgtcggattcgatgagctttacgagaaaatttgctccgtcggcgtgagttttgacaaaataaaagtaggactcgaagccacgggacactacagctacaaccttctgggctatctccttgataagggtctgccaacctatgttatcaatccgttacataccaatctttacagaaaaagtctaagccttagaaagacgaaaacggataaggtagacgctcatacaattgcgtatatgctgatgtctgacgtggacttgaagtcctactcaaacacattataccacaacgaagagctaaagtcactaacaagatacagattttctaaagttgaagagcgtgctaagctcaaaacatctgttgcaaggctggtaaacattctttttcctgaactggaaaagatcgttccaacccttcatattgcgtctgtatatgcgttattaagcgaatttccgtctgccaagctgatttcaaaggttcatctgacaagactcaccaatcttctctccgaggcttccaaggggcgatacggcagggataaagctattcttatccgcgacgctgcaagaagctctatcggctcatacatgcctgctaaggagcttgagcttaaacacacgatcaggctaatacaggagcttaactcggagatcgacgagattgaagaccacattaacgagatcatggaagagatggatactcctattctcacgattcccggtatcagcaatcgtatgggtgctatgatacttgccgagatcggcgattttgagcgtttctcatcacccgataaaattcttgcttatgccggattatccccctccacctatcaatcagggcagctcacctcgtcgcattcgcacatggagaaaagaggttctcgttatctgcggtatgcactatttaatgcgacaaaattcgtttgcaattgggatccgaccttcgctgattatctgcaaaagaagaggagcgaaggtaagcattacaatgtggcaatatcacacgcctgtaaaaagcttgtaagagttatctatcatttacaaaccacaggagaagaatatcgaagttaacttttattcgagtatatccttttttgagcgactgcttagttgctctttttgtcatgcgatttttcggttttccacatgaggaaaacttttcgttttttttgattttcctattgacttttaatagttagt

SEQ ID NO: 8236 - DNA, 1500 bp, unidentified
  source 1..1500: mol_type = unassigned DNA; note = element_ce67849
  misc_feature 1..2: note = core
  misc_feature 3..253: note = LE
  misc_feature 254..1480: note = CDS
  misc_feature 1481..1500: note = RE
  misc_feature 21..241: note = bridgeRNA
ctaatgagagctagcgggtcggcatccggcagactcgttggctggtagccgctggcaggtgagcactgtgacgaactggacgtttgagtcctgacgacagaccgtgcccctgccggttggccgggagagttgatcgctgatgggatgtcgtgcccgcccggtttgggcgtgagcactgcttcattaggtcgctgatggttctcccgcgggctgctgatggggtttcgaccggggcagagagggtgggagaagagtgttgcagctgttcgtcggtgatgactgggccgaggatcaccacgatgtcgaggtgctggatgccgccggccggcggctggccagggtccgtctgcccgagggtgtggcggggatcgcccggctgcacgcgatcatcggcgatctggtcggtgaggacgacgaggacgtcgaggtgaaggtcggtatcgagaccgaccgggggccgtgggtggacgcgctggtcgcggccgggtaccaggtgttcggggtgaacccgctgcgggcggcccggtaccggcagcggcacacggtctccggcgccaagagcgacgtggccgacgcgcacgtgctggccgacatggtgcgcaccgactcccatcagcttcctccggtggccggtgacagcgcccaggccgaggggatcaaggtggtgacccggacccacaagacgctgatctgggagcgcaccaggcacacccagcggctacggcacgcgctgcgcgactacttccccgccgcggtggaggcgttcgaggacctggacgccgccgacaccctggcgctgttggccaaggcgcccgatccggcgtcggcggccaagctcacgatcgcccagatcagcgcggccctcaagcgggcccgccgccgggacgtggcggtcaaggcggccaggatccaggccgtcctgcgcgcggaccagttgggccgcccgccggtggtgaccgcggcctacgccgcctcggtgcgcgcgctgatcgctgtcctgtccgtgctgaacgagcaggtcaagacgttgcaggagcaggtggaagcccattttgggcagcacccggccgctgagatcctcacctcccagcccggactcggcccgatcctcggcgcccgggtgctcgcagagttcggcgacgacccggaccggtacgtctgcgccaaggcccgcaagaactacgccggcaccagcccgatcacccgcgcgtccggcaagaagaagatcgtcgtcgcccggtacgtgcacaacgaccggctcatcgacgccctcatgagccaggccctctccgcgctgaccgcctcacccggcgcacgcgcctactacgaccagctcaaagcccgcggcgccggacacaacgccgcgctgcgccagctcgccaaccggctcgtcggcatcctccacggctgcctcaaaaccggcacgctctacgacgaagcaaccgcatggtcacaccactccaaaacactcgctgcttgacacctaagcccctgggatgt

SEQ ID NO: 8237 - DNA, 1644 bp, unidentified
  source 1..1644: mol_type = unassigned DNA; note = element_ce6c8a3
  misc_feature 1..2: note = core
  misc_feature 3..234: note = LE
  misc_feature 235..1629: note = CDS
  misc_feature 1630..1644: note = RE
catttagccttggagtaggtccgcggctgggccgaacgtccgaccgggacacctggtgatccctgaattttgagtggtcgaccgcgggcccggtgtctggtcgagcggtgtccttgttcgggaacttggagccagcctgtgaggtgtggactcctgcttagagaatgtctgggccgcggccgcgatggtcagccacctgggtgaacaggatcagggctgacaggagtaacgacgatgacattgacgttgggtatcgacgtggccgtgcgggcggcgcaccaggcgacacttgcccgtgacggggtcacgctgtggcggggtcggaagttctcgacccggccgagggatctggagcggctgtggtcggatctggagctggccgatccgaatgatgtgaccgtagtagtcgaaccgacccgcaacgcgtggatcgtgctggccgagtggttccgccgtcgcggcgcccgggtggtgatggtccccaccacgcagtcggcggatctgcgcaagtactactccaagcacactaagaacgatcggatcgactcagaactgttggcccggttaccgttgctgcaccccgagggattgcgggagtattccggtcaggggccggcagatccgttgcggcggttggtcaagcagcgctccaccatggtcaaacgccgggtcgcggtctacgccaggcttgatgcgctcgtcgagctgctcggtccggcttggtatgcggtgctcggctcgaactacggcatcgcggcactggaattcctcgctcgctacgccgacccgaacgccgtgatccggctcggccagggacgtctgagccggttcttgatcgcccgctcccgcggcgcctggcgagatgatcacgccgccagcctcatcgtcgcggccaaggaaaccctcgcgctgtggggtcccgatgggatgaacttcgccgaactcgccgacgacatcgcccacgaagccgaacaggcactgtttttaacccggcaggtcaagcagatcgacgagcgggtcgccaacctctacgccgacgccgaccccgacggcatcgtggcctcagcacccggcgtcgggccggtgatcagcgctgtgatcgccggacggatcggcgatccccaccgtttcacctcgctagctgcgatccgcgcttacaccggactggtcccgaaggtgagtcagtccgggctgagcaaggtcgagtcctcgatcaccaaggccggcgacccgctgctgcgcgagatgctgtgcaccgcagctgaccaggcccgcaaggttgacccgcagatcgctgcgaaatatcagcgactgatggccggcgaccgtcaccacgactcagcgatctgtcacctagcgacgctgctggtcacccggatcgccagctgcatgcgcaacggtcagccctacgccctgcgcgacgtcggcggcaccccaatcaccgaggcccagggccgcatgatcgtcacgcagcgctaccaaatcgagccacgccgccgtgacaacatccgtcaccagcgcatgcgagaccgccgcaagcaggcggcgggccaggagtcacaggagtcgccaagcgctccaacatcccagcccgccaaacccaagcctacgagccgccacgtggcttgacaccccttaggaact

SEQ ID NO: 8238 - DNA, 1326 bp, unidentified
  source 1..1326: mol_type = unassigned DNA; note = element_ce74977
  misc_feature 1..2: note = core
  misc_feature 3..68: note = LE
  misc_feature 69..854: note = CDS
  misc_feature 855..1326: note = RE
  misc_feature 1093..1324: note = bridgeRNA
ttaatgagatggtcactccctccttcccagtactatgctgaggacaggctttcattcggagaaccatcatggaaaacattgcgcttattggtatcgatctgggtaagaactctttccatattcattgtcaggatcatcgtgggaaggccgtttaccgtaaaaaattcacccgaccaaagctaatcgaatttctggcgacatgcccggcaacaaccatcgcgatggaagcctgtggcggttctcactttatggcacgcaagctggaagagttagggcattttccaaagctgatatcaccgcaatttgtccgcccattcgttaaaagcaacaaaaatgacttcgttgatgctgaagctatctgtgaagcagcatcacgtccatctatgcgtttcgtgcagcccagaaccgaatctcagcaggcaatgcgagctctgcatcgtgtccgtgaatccctggttcaggataaggtgaaaacaactaatcagatgcatgcttttctgctggaatttggtatcagcgttccgcgaggtgctgccgttattagtcgactgagtacccttcttgaggacagtagtttgcctctttatctcagccagttactgctgaaattacaacagcattatcactatcttgttgagcagattaaagatctggaatctcagttgaaacgaaagttggacgaagatgaggttggacagcgcttgctgagtattccctgcgttggaacgctgactgccagtactatttcaactgagattggcgacgggaagcagtacgccagcagccgtgactttgcggcggcaacagggctggtaccccgacagtacagcacggaggtcggacgacattgttagggattagcaagcggggcaacaaaagatccgaactttgttggttcagtgtgccagggtattcatacaaaaactggaacaccagtctggcaagttggccgactgggtcagggagttgttgtgtcggaaaagcaactttgtcgtcacctgtgctctggcaaacaagctggccagaatagcctgggcactgacggcgcgacagcaaacttacgaagcataaaggcagaaatacaccagtttaaacaatcattcatctggttttgcgaatactgatattgatgatactaacggcccaccggcctgttgaggaacctgtaaaacggaaaggctcattgaagccgtatattttctggaggttcatcaggcgcggaactcatcgaggcgcgggaataaaatcccattcagacgccggatagattcaagcaagccaacttgtcgtcaaaatcggtgttgcaaaaacgggagtgaccataga

SEQ ID NO: 8239 - DNA, 1153 bp, unidentified
  source 1..1153: mol_type = unassigned DNA; note = element_ce80fc6
  misc_feature 1..2: note = core
  misc_feature 3..205: note = LE
  misc_feature 206..1141: note = CDS
  misc_feature 1142..1153: note = RE
  misc_feature 12..207: note = bridgeRNA
cttgtcttatcctgaacctggctcttgtgcgatacaggagccgtcgtccggcacggcatttatgccgggcgacggcgagggtcggatcgtttccttcttggtcgtgacggaccgtcgaggagtaaggtcgccctcgtcttttctaatgacctgaacggatacttgggcttggggcccgtatgacaagacaaggtggaaaagacacatgaacaataccattgggatcgatatttctaaagacacacttgatgtgtatcgtttgacagatggtcaacataggcagtttctcaatggaaaggccgggcatacacagctgctcaagtggattaaattgcggccggggcagctggttatctttgaggcaacgggtgcgtatcaccgacaattggagcgagcgcttggcagtcaatccgtcccatttgtcaaagtgaacccaaaacaggcgcgtagatttgcccaggccagtgggaaactggcaaaaacagatcgtgttgattgcgagatgttggcgaagatgggtgccgtattacaactcgtgccacaacctcctttcgcagaaagtttgtatgatctgaaagagttattgtctgcgcggcgggcgctcatcaaagaccgtacagcagccaaggcccgcaaggctacggtttctaacgctctggtaaagcagcagctcgaaaaacgcctacgccaaatcgaaagtgatattgaaaaaattgatgcgttgatgctggaattggcgcgccaagatcaacacatgggtgaacgactggatattctcttcagcattcccggaattggaatgatcacagcgcttatgatcctcgtggatatgcccgaaattggcacgctgggtaacaaacaggtcgccagtcttgcagaggtagcacctatgtcacaaagctcgggaaaatggcaaggaaaggcgcggatacagggtgggcgtcctaacttgcgcaatgccatcttcatgccagcgcttgtcgcgatccggttcaatccagatctgaaagccaactacaatcatttggtggccgctgggaaagagaaaaaggtagccatcacggctgtcatgcgcaaactgcttgtcctagctaatgcgctcctacgagatcagcgaaaatgggctgaaaaagtaacttgatcaagacggata

SEQ ID NO: 8240 - DNA, 1221 bp, unidentified
  source 1..1221: mol_type = unassigned DNA; note = element_ce8d7c3
  misc_feature 1..2: note = core
  misc_feature 3..222: note = LE
  misc_feature 223..1218: note = CDS
  misc_feature 1219..1221: note = RE
  misc_feature 36..199: note = bridgeRNA
tcctttagatttgtattgtaaaaaattactacattagaaagagcagagcatttaattaaactgaaagattcctgtgaataaaattcatattccgattaagaattaaatgcccttttctattcatcaaaacttagatagaaatttgggaaacaaagcccgttattaaggtattaagtcgtgatgaatattctctttctgattgtaaaattgtaaatcaaaagtatggaaaaaattgtaatcggtattgatatcagcgcaaaaacattggatatctgtatcaaaaaatcaaacgattattctttcgaagtcattgataatgattccaaagccattaaaatcttcttcaaaaagattcagaaaacatattctgagattgttgtttctatggaaaatacagggaggtacaactggaatctctatcaggctttggagagttttaattttaaggtttttgtgcttaaccctttgcatctgaaaaaaagtttggggcttataaggggtaaaaacgataaaattgatgccagaagaatttgcgattttacagataaaaacgagcaggatctcattctatggaagccttgctcagaaacaataaagaaaatcaaggtgttattttctgaaagaaattcgaagataaaactaaagtcttctctgttaaagcaaagagttctttattcacaattagaaaagatgaatattgattctaaactgatgaaaatgaataagaaagaagtgaagctactggaggatcatattgcttttcttgaggcagagattgagaaactgattgaaagtgatgaggatttatcgtgtaagaaaaaaaatatccaaagtattcccggagttggaaaagttgtcagctggatgatcattgccaaaacggaaggctttaccaaaatagacaatccaaggaaaatggcttgctatgcgggagttgttcctttcggatatcaatcgggaacttcattgaaatacaaacctaaagtatcctattatgcagataaatctttaaaaagcattctgcatatggcagcaatgagggcgataaggttagaaaatgatctgaaagaatactatgagcgaaaaataaaagaaggaaaaaataaaatggcaattttgaatgccgtaagaaataagattattcacaggattttcgcactcgctaaaaatggaaaatcctatgaaaaaaattatataaatagtttgaatatgtcatagaaa

SEQ ID NO: 8241 - DNA, 1355 bp, unidentified
  source 1..1355: mol_type = unassigned DNA; note = element_ce9006e
  misc_feature 1..3: note = core
  misc_feature 4..74: note = LE
  misc_feature 75..1100: note = CDS
  misc_feature 1101..1355: note = RE
  misc_feature 1114..1345: note = bridgeRNA
ttatgggatggcccgcccctctccggagcgatcggttagattgctcttgttgcaaacgagagaggaacggaccgatgtctatattcgtgcttggaattgatctcggcaagaacgtgtgcagcctcgtcgggttgaatgaggctggtgccgttgttctacgccgtcgccttcgtcgtgacggcgttgcggattttgtctgcaagatgccgccttgcattgtggcgatggaagcctgctgcggagcgcatcacgtcggtcgggtgctcggcgccatgggccacacgatccgtctaatgtcgccggaatatgtccgtccctatgtcaaggccaacaaaaacgacgatcgggacgccgaggcgatcgcagaagccgcaacccggccgacgatgcgcttcgtgccggtcaagagcgaggcgcagtcggacatccaggcgctgcatcgtgcgcgtgcgcgcctggtggccgaacgtacggcgctcatcaaccatctgcgtgcccttcttctggagcgggggatcgtcgtggcacagggacggcgcaaactcgaggatacgctggcaaccttcgccgacgaggaggacacgcgactgtcgccgcgcatgcgccttctgatcggggatctgcgtgccgagtggcgcggactcgatgagcggatcgctgcctttgacgccgagttcgtgcacatggcgcgcgaggatgcctctgcccgacgtctggcgacgatccccggcatcgggatcatcaatgccaccgcgcttactgcggcggtcggcgatgcacagaacttcggtcgcggacgtgatcttgccgcttggctgggtctgacgccgcggcaagcgacaacgggtggcaagccgcggttgctgggaatctccaagcgcggcaatcgctacctgcgaacgaacctgatccatggcgcgcgagcggcgctgccgcatatcgcggcacaggatacgccgctgggccgatgggtgcgcagcctctcacaaagagtgcacaagaacatcgtcgttgtggcgctggcagccaagctcgcccgcatcgcgtgggcagtgctgcggaaggaccgcggcttcgagccagcgatggcggcggcataggactgtgacgagcattggcggccgacgaacggtcgcggcaatctgcgggtggtgataggaagatggcctgacagtcgaacggcagcttggaaacctgggcaacttgaacggtcgcctgagaccggtcagattatgaggaccaagctgcgcggatctccatcttggccgaggcgagacctcgagaccggatacgttgacgcagactgaacagagctgtctttcaaaaaaccccttgcggacggggcgggccatacg

SEQ ID NO: 8242 - DNA, 1489 bp, unidentified
  source 1..1489: mol_type = unassigned DNA; note = element_ce9b4c6
  misc_feature 1..2: note = core
  misc_feature 3..204: note = LE
  misc_feature 205..1392: note = CDS
  misc_feature 1393..1489: note = RE
  misc_feature 6..199: note = bridgeRNA
ctgatggcactaccttcctttcgcacgggaacctccgaggaacgctttcggcgcttgtcccttgagggctgagatgagacggcgtcctcgggggtacccggcgcaggcctgacgcccaggagggtgttgtcccgtgaggactggtccatcagcacggcgccgtacctgctccgcccgtgaccgtcggagtggaaggagacacggatgctgggagtgggggtggactgggcggagtcgttccacgacgtcgccctgggccgtcccgggaccggggtggtcgagcagttccggatcgaccacggcccggccggtgtgggccggctcgtcgcccgctgcctggagctcgagccggaccccgcggaggtccgaatcgtgctcgagacccgccacggcctgctcgtcgaggcgctggtggatgccgggttcacggtgttgccggtcaacccggacctggttgcccgccgtcgtgggccggccaggaagaaggacgacgccgaggaggcccggatctgctgcctgctggcgctcgaccagtacgccgagctgcgccggctgatcccgcacggcccggtcggcgccgagctgcgcgcgatcgcccgcgacgacgaacgcgccgcccgcgacgagcgccggctgggcaaccggctgcgcgccgacctgctcgcggtgttcccggccgccgtcgacatcgccgacggcgacctgggcgcgccggtgttcctgaagctgctggaacgctggccgtcggccgccgaactggccgccgcgtcccgcgacgaggtcgagggcctcgctcggtcggcccggcacggctggcccggcaggttcaccgaccgcgtcaccgacgccctggcccagccccggctgccggtccgccccgagctggcccgcgccaagaccggctcgatccgcctcgccgtggcccagctgctcctgctgcgtacccaacgcagggcctgggaacggcggatgggtgagttgctccttggcgcaccccgcaccggacgcgacaagaccgtgaaggaccccgacccggggaaggcgttccctggcggcgagatctacctgagcttccccggcctgggtgaccgtctcgccgccagggtcgccggtgagatcggcgaacggatcgaccagtaccccacgccgaacgcgctgcaatgctacgccggcgccgcccccgtcacccgccgctccggccgctgcgagttcgtcgtcgcacgccgcctcgcccacaaccgctacctcggcgacgccgtccaccaatgggcgttctgcagcctgacccgcagcgcctgggcccgccagttctacgaccagaagatcgccgccggcaagagccaccacaccgccctgcgcgccctcggcaaccgctggctcgaggtgctctgacactgcctgcgcctcgacgtcccctacgacgagcacacccacaccgcgaaccgcacacgttccctcaaggaggccgcctgaggttgacagagggtgt

SEQ ID NO: 8243 - DNA, 1322 bp, unidentified
  source 1..1322: mol_type = unassigned DNA; note = element_ce9ba28
  misc_feature 1: note = core
  misc_feature 2..251: note = LE
  misc_feature 252..1316: note = CDS
  misc_feature 1317..1322: note = RE
  misc_feature 14..236: note = bridgeRNA
ctattggtacacagtgttggtgccgggacgcttcgacgggagccaaccggtgggctgctgggtgactcggagaacacgtgtcgcagatggctttccgttgatttgtccacggcagcttagggcgagagccctgaccgggagtgacttgatagaagcctgctgagccgtcaactcgcaataggtctgtccgcccgggcagagccctcgccgtcgtcccgtcatccgtgagagcacgacgaagggactctttgatggtgacagtcgggatcgacccgcacaagcgcgttcatgtcgcggtcgccgtggacgacaatggccgacgcgtcggccgaggcctgaccgtgagcaacgatgagcatctcattatcgctttgctgcaatggattcgatcgatcagcgatgagggggcggtgacctgggcaatcgaggacggccgtggctttgcccgacgcctggcagatgagctattgctggctggccaagaggtggtgtgggtacccagccggcttacactggcacaccgcaagcttcacgcagccaccggcgccaaatccgacgtcatcgacgctgccgccgtcgcgcgtgccgcgatcgcgactccaggcttgagccggcaccaggttgacaaacgggtccgtgaactgcgcattctcaccgactaccgctcggatctggtcaaacgtcgcacgatggtggtcaaccaactcaaagcccaagcgcatctgtggctcgactacaccccgggcgacctggcccgcgccaaaacgctgaccctgctcagggcccgcctggacgcagcgcctgtgagtacccacatcactcacgtgctcagcgaaatgatcaacgagatgatcgagctcaacaaccgcatcggtgagctcgatgccacgatcaaagagctcgtgacaccgctggcacccaacctcctcaagatcgttgggatcagccataactcagcggccgtgctgatcaccgaaatcggcgacatctcacggttttccacctcagcgaagctcgctcgctacaccggctgcgccccgatcccggtctactcatccgaccacgaacggcatcgccttcaccgcggtggaaaccggcgtctcaacagcgtcctctacaccgcggcgatcgtgcaaaaccgcttccaccccgccgctcaacaactcaccgcccgccaccaaccgaccaagggagcccggggcgcacgccgaatcctgaagcgacacctcgtcgacgtcatccaccgcgcaatgcagctcgaccgagccagctggcaacaccacatcacccagcacccggcccacgcgttgacatagaagcat

SEQ ID NO: 8244 - DNA, 1204 bp, unidentified
  source 1..1204: mol_type = unassigned DNA; note = element_ce9c4c3
  misc_feature 1: note = core
  misc_feature 2..212: note = LE
  misc_feature 213..1178: note = CDS
  misc_feature 1179..1204: note = RE
  misc_feature 35..203: note = bridgeRNA
tcttaagtttgattctgattaaattatagtcataaatcagaaagaacaaaagagaggaacaaggtcaatatagccataggaagtatcgattccgtcaacattgatgaccccctctcttttccactcaagaattcgttcagttctgtgagaccaagatctcgatttcaagttgttgaagctcaagtggagcgtcctttccaaaacattttcctatgaataaagataaagaaatccacggagtggacatcagcaaggatgtatttgatgtgttcgaccatgagggtgttcaccatcagtacccgaacaccttgaaggggttcagggattatttcaggtgtttaaaccccaacagtctagtggtaatggaggccactggttattaccattatctattggcccagttcctttatgaccagggcatggccgtatcggtcgtcaaccctttgtccgtaaaacgttttgtgcagatgaagctttccaaggtcaagacggacaagagcgatgccaaggccatagcggagtacgccaaggtcaacgctgttcccctgtacgacggcaagggcgaggaccaagctgagagcctccaattattggctttgatggacatctatctcaaacagcggacacaggtaaagaacaagctgcacggtgaaaaggtcctgggcataccctcaagggcagtccattcatccttggtgcgaacattgaaaagcctggacagggagctggaggcccttcagtcgagattgctagcattggtcaagaaaacacagcaaaggcagctaacgaacttgaagagcataccgggacttggggacaagacggtggccttgctgatcatattgacggatggctttaccaagttcgagaatgcgggacagttatgcaattacgcgggaataaccccgacgaccagacgttcgggcagcagtgtaaggggaaagagcaggataagtaaggtcggtaacagaaaattgagaaatctattgttcctatgcgctttttccgcctgcaagcacaacaaagcgtgccgggaaatgtatgaacgcataacggccaagggaaaaagcaagaaactggcattgatagcggtatcgaacaaactgttgaagcaggcatttgccattgcaaaatctgggctgccctatgatgaaaactatgtttcgaaattaaactaaaagaacttgttttttaactcagttct

SEQ ID NO: 8245 - DNA, 1327 bp, unidentified
  source 1..1327: mol_type = unassigned DNA; note = element_ceace9f
  misc_feature 1..2: note = core
  misc_feature 3..72: note = LE
  misc_feature 73..1104: note = CDS
  misc_feature 1105..1327: note = RE
  misc_feature 1085..1312: note = bridgeRNA
agataattggactccccttcctcatagcgatactctgcttgagtcgcttagaataaataaatggagcccataatggacaatactatcgctggggtagatttagctaaagatgtgattcaagtttgtgttttcacaaacaaaaaagtgcgttctaattccgaattgacaccgtctgaattcatagactttctcgctaactcaaaatcgataaccgttgtatttgaagcatgtggcacctccaattactggaagcaaaaagcgatatctttcggccatgatgcccggcttatttcagcacagttagtatcagcggtaagacagaaccaaaaaaccgataaaaatgatgccctcgcgatcgttcaagcgacattattaccggatgtgacatttatctctgggaaatcaatcgagcagcagcaactacaatctatcatgagattgcgggaactgtgtgtaaaacaaaaaacggccacaggaaatcaaatcacatcactcttgctagagtttaatatcaaagtgtctagtcgaaatggtggtttaaaaggggcgattaaatcaactctggaagatgctgagaacgggctatcatttgaattcaggacggcgttaaacgcggcttggaaccagtatctattaatcgcaaaatccattgatacttatgatgactgcctagagaaatccatggaaacacatgcggaatgtaaaaaactgctcaagcttgaaggggtaggaacattaaatgcggttaacttatacatcgcattaggttgtgctgaactgggcgtttttgaaaaaggaaaagatgcctcagcttgcattggtttgacgccgatacaatattcttctggcggaaaaaccaaacttggttcgataggaaaatatgttaaaaacagcatcctgcgaagtcagttaattacaggggcgatgtctgcggtaaaccacgcgacaaaacgagaagctataacgaccaaagatctgtggatacagtcgatggtagagcgtcgaggaaaaaaatgcacggcagttgctttagccaataaaacagtaagaacggcctatgccatgcttactcaaaacacagaatatagagccgaattaatctaggttttagcaagcgttcaatcaacaaaaatgcacaatccaagataaaaatcagctggttaaagcagtcgacaacattgagcttagagctcgcaaggtagatttgctaaccagttcgcgtaaatatcatagagcctgggttcgctactcaattagagctcgtacataagtacgcatttatttcttttattggcttaattgttgttgacattggggagtccacata

SEQ ID NO: 8246 - DNA, 1309 bp, unidentified
  source 1..1309: mol_type = unassigned DNA; note = element_ceba7c0
  misc_feature 1..2: note = core
  misc_feature 3..209: note = LE
  misc_feature 210..1235: note = CDS
  misc_feature 1236..1309: note = RE
  misc_feature 3..168: note = bridgeRNA
ctcgtatattgagagggtccgattcctgggtgatggtgaggacgcgatgacagccgcggcaccgaccgcgtagcgaagattgtcccccgtcaccttgggtcggccagagcgtggaccgtatcgtgtggctttgaccacgtatcacgagcgcacgtcacggccgcccgtggaatcgctctcgtccttcgccgcgtggaaaggagcctcctgtgaccgctgcctcgcccaccctcttcgtcgggatcgatattgccgcgaaaaccctcgctgccgcctggctccgccccggtgaggcggccagtcgcccgatcaccctcgcccaatcgccgcaagggtttgccgcgctgcaggagcggctcggccagaccggctgtgtgcctgcggaggtccatgtcgtgatggaagcgaccggctcgtattggatcgccctcgccacgacgctggtccattccggctatcgcgtgagtgtcatcaatccggcccaggcacaccatttcgccaaggcgctcctcaagcgtgccaagaccgacgcgattgacgcgcagactctggcgcagttggcggcattgttgcaacccgcaccttggacgccaccgccgaccgtctattacgaagtccagcagcgtctcgcccagcgcgatgccctcctcgatgtgcagcggcaactgatgaatcagttgcacgcgttgctgctcacgccgttcgtggttgcctccgtcaaggcgcggatggaggaattgatcgacacactggggcagcagatcacggcgctcgacgctgaggtgcgtgaggcgctcgccgccgatgccgcctgggctgcctcggcggcacgcctgcaaagcatcaaaggtgtcgggttgatcacggcggcatggctgctcgtcacgacgctcaacttcacgatctgtccgacccccgaggcggcagccgcgtacgccgggttggccccgaacccctacgaatcggggaccagtgtgcgcggtcggccgcgcatcgggcataccgggaacgggcggctgcggacggcactgtacctcgcgacgctcagtgccgcacagcacaatcccgtcatcaaggcgttctatgagcgcttgcgcgctgcgggcaagccaacaaaggtggcgcgttgtgctgcggcgcgcaagctgctgcatatcgcatgggcggtggtccgcaaagaggaagatttcgacccggcatatgcgcagcggcaccctcagccaatggccgcgtgagccgggaaaacaccgaggagcgtgaaggaaatgcccgaggcgaccgattcaggacttgacaagcgataccgtat

SEQ ID NO: 8247 - DNA, 1362 bp, unidentified
  source 1..1362: mol_type = unassigned DNA; note = element_cec045d
  misc_feature 1..3: note = core
  misc_feature 4..296: note = LE
  misc_feature 297..1103: note = CDS
  misc_feature 1104..1362: note = RE
  misc_feature 1126..1349: note = bridgeRNA
tgatggggaagacggccccgctccctcggagccggcgatatactgccgatgcacggaaccgctaacaggagccattgaccaatggaagtcgcgacaattgggttggacatttcgaagcacgtatttcacgtccatgcagttgacagcaagggccaaataaccagtcgccaacgcctccggcgaggcgagatcgtgtcgttcttctcctcgatcgagccgtgtctggtcggcatcgaagcctgcgccaccgctcaccactgggcccgcgagttcagcggtttggacacgaggtgaaattgattccgcctgcctatgtaaaaccttatgtgcggcgaggagctaagaacgacgccgccgacgcggccgcgatctgcgaagcggtgacccgccccaatatgaggttcgttccgatcaagagcgtcgagaaccagggcttcctgatgcttcatcgcgcaagaggcctgctggtccgccagagaaccatgacggcttgtgccattcgagctcacttcgctgagttcggaatcattgtcgggcaaggccggcaacgggtggacggtctggtggacttattggatgacgaggccctgtcgttaccagccaatgctcgtctggcactcgccgctctcgtgaaccaactgaaggaattggaccagcaggtcgaggccatcgagcgtgagctggctctcatccagagaactaatccgatggcgaagttgttgtcctccattcccggcattggtcccataacggccacggctctcgctgcgaccgtgccggacccgacaatgtttcgctccgggcgagagttcgcggcctggcttggcctgacacctaagcagaattcaactggcgggaaggatcggctgggcagaataacaaaacagggcgattcctatctcaggcacttgcttgtgatcggagcacgtaacgtcgttcggtacccaaaggcacgctccagggtcggaggcggctggatcgaagccctgcttgaacggcgtcggcccatggtggtcgccatcgccgttgccaacaaattggcccggatcatctgggcaatgatgaccaccggggaattctatcggcctaagctcgcggcttaactttccgcgtatcctggccaccttatggtgtgagggcaaatgacagcatgatggaaaccggcggagctggggatcgagcaagcccgaagagctttaagcgcacaagcgcgacccgttgatgaggcctcgatccgcgatctccatcagggcccgcggccatggcatcggtcgcactaacaggccgtatacatgaacgcacccgaccggtatccaaagtatgctgccaaaaatcccttgcatccgcggggccgtctataca

SEQ ID NO: 8248 - DNA, 1475 bp, unidentified
  source 1..1475: mol_type = unassigned DNA; note = element_cec3880
  misc_feature 1..4: note = core
  misc_feature 5..256: note = LE
  misc_feature 257..1465: note = CDS
  misc_feature 1466..1475: note = RE
ctcactggtgcaccctccccggggaggtagctgaaaggatgcttgggaactcccggtacccgtcgggccactgccagcttggcttgcctggtgaaggccacgatgagttctgcagggtccgacggcccgggacgccttgagcggcaacagggcaacgcgctgtcaagcgccgatcagtgagccacctgccacggcgtcccggtaccggcgggtgcaaccgccccctcccactgccacagcagcggaaaggatcagcatggatggtgccacaccagcccgggtggccggactggattgggcctcgcgcctgcacatggtgtgtgtcctggaccccgacgggcaggtccgcgcccgcttccaggtcccccacaccggcaaggacctgcgtggcctgaccagacgactggccaagctggcggtcggccgggtggcgatcgagcggcccgacggccccgtcgtccaggcgctgctggacgccggattcgaggtcgtcgtgctcccaagccgccaggtcaagcacctgcggggaaggtacgcgtcggccggcaacaaagacgaccggttcgacgcctatgtgttggccgatgtcctgcgcaccgacggccaccgcctgcacccgctgcgtcccgactcgcccgagaccgccgggctgcgggcggtcagcccggcccgcaagcagctggtcgaccagctggccaaccagctgcgcgccaacctggaggttgccttccccggcgccgccggcctgttcgccgaggtcgacagcccgatcgcgctgcgcttcttggcccagttcccctccgccgaacgggccgcctggctgacccaggcccgcctgggcgggttcctgcgccgggtcggctactgcggccgggtccccaccgccgagctctaccagcgcctggtccacgcccccgctggactgcagggcagccacggcgatgcctgcgccgcggtcaccctgagcctggtcgccaccctgcgcgctgtccgcgcccagatcgaggagctggacggcgagatcctcgagcgcctggccgcccacgccgacggccacatcttcaccagcctgccccgctcgggccgggtccgggccgccgccttgctggccgagatcggcgactgccgccaacgcttccccgaccccaccgccctggaatgcctgagcggagcagccccctccacccgccagtccggcacccacaccaccgtcaccttccggttcgcctgcgacaaaaagctccgtcaggccgtcatggacttcgccggggactcccgccacgccaacccctgggccgcccacctctacaaccaggcccgcgcccgcggccaccgccacccccacgccgtacgcatcctggcccgagcgtggctgcgggtcatctggcgctgctggcaggacggtacggcctacgatcccgcccgccacggcgcctaccagcgcctcatcgccaaggaggcttgacacagggcta

SEQ ID NO: 8249 - DNA, 1600 bp, unidentified
  source 1..1600: mol_type = unassigned DNA; note = element_cecbd9c
  misc_feature 1..2: note = core
  misc_feature 3..82: note = LE
  misc_feature 83..1111: note = CDS
  misc_feature 1112..1600: note = RE
  misc_feature 1342..1586: note = bridgeRNA
tgatgggatggacggcccccgtttccggcctcgtggtgccaaatgaagggtgttgacgtccttcagcaaggagaccgcccagatgcatgctacgaccatcggcctcgacttggcaaagtcgctgttccaggttcatggcgttgacgctcacggaaaggtggtggtgaccaaacgcctgcgccgggacgcggtgctcgagttcttcgccactctgccgccgtgcgtggtcggcatggaggcgtgcgccaccgcgcaccattgggcgcggcaaatcgccaggttcggccacaccgttcgcctgatgccgccgcagtacgtgaagccctacgtcaaacgccacaagaacgatcaggccgacgccgagacgatctgcgaagccgtgcagcgcccgaacactcgcttcgtgccggtcaagaccgaggagcagcagagcaccctgatcattcaccgcgtgcggggaacgctggtccaccagaagacccagctgatcaacgccctgcgcgggcatctggcagagttcggcatcgtcgcgcccaagggtgcgagcaagttggtggacctgacggcgcggctggcggatcctggcgaggagcggctgccggagatggccagggctctgctccaggtgctggtcgatcagcttcgcgacaccgagcgccggattgccgacctcgacgctcgcctgcgggaccaggccaagcaggacgagagctgccggcgcctgatgacgatccccggtgtcgggccgatcaccgccaccgtgttggtggcgacgatcggcgacgggaaggcgttcacgtccggccggcatctggccgcgtggctcggtctggtcccgcgccaacattccagtggcggcaaggaccgtctgggcggggtctctaaggccggcgacggctatctgcgcagcatgctggtcaatggagcccgcgcggtggtgcggtggtggcgcagcagctcgccctggcttgcctcgttgctggcgcggcggccggtgaatgtcgccgtcgtcgccctggccaacaagatggcccgcatcgtctgggcggtgctgacgcgcggagaaacctatcggcggccgataccgacaccgacgccggcggaggcttgagatgaagatggtaagctccgggtccgaccgttcgcaggttaccgccgtgctcggtgccgacaaggccaagccgctggcgcggcggcccgaagggccggccttgtcggcgcctgcgcgcggcgctggtcggaaagcaggtcgggacggagaggtggtcccggcggccgaacaaagaggtacggcgatgacgatgctcaaccaattccccgtatccgctgccggtccggcagcctgaacatgggatcactggccccccttcggttgcgagggcgatacacgacgtgatggcataccggtcggaccgggatcggcgtaccccgacaagcccagagagccaccaagctcgtatgactgattgggtgccgatccgcggatttcatcaaggccagcagccgcaaagttgcacacacaggccggatagatggcagcaaccgacttccatggccgtctcctgtgaaaagctcttgcagagcgggggccgtccataga

SEQ ID NO: 8250 - DNA, 1370 bp, unidentified
  source 1..1370: mol_type = unassigned DNA; note = element_cece387
  misc_feature 1..2: note = core
  misc_feature 3..83: note = LE
  misc_feature 84..1106: note = CDS
  misc_feature 1107..1370: note = RE
  misc_feature 1082..1357: note = bridgeRNA
tgatggggtggacacccccctcgacggcatcgatgtgccagaatggtggttgttgcagccaccggagagaaggagtgtccacgatggaagttagcacgatcggcctggatttggcgaagaatgtgtttcaggcccatggggcggacgcgtctggttgcgtcgttttccgcaagcaattgcgccggaagaacgtgctcgaattcttcgccaagcagcccgtgtgcatggttgccatggaggcatgtgccggtgcgcattattgggcgagggagattggtagatttggtcacactgttagattgatcccgccggcctacgtcaagccgttcgtgaagcgacagaagaacgacgcggccgacgccgaggcaatttgcgaggctgcccagcgtccgacgatgcgtttcgtcgctgtaaagagtgaggatgctcaggcaagcgccgttgtgtttcgggctcgggacttgctggtgcgacagcgaacgcaagttatcaactcgctccgcggtcacctcgccgaatacggcttcgtcaccgctcagggtccatcgcatgtcgccgggctcatagaatacgtgacggatgataagaacactctgccggacgcagctcgtctggcgctcgccatgttggtcgatactctgcgatcgctggaggaccggatcaggcagctcgaccacgagatcgcacgtcgcgcccgagaagacgcggacgctcggcggcttgcgacgatcccaggtgtaggaccgataacagcgacggcattgacagcattggctccagcggcatcgaccttcaaaagaggacgtgattttgccgcctggctcggcctgacgccacttcagcgatctactggcggaaaacagaaacttggcgcgacatcgaaaatgggcgagcgaacattgcggcgcctccttattcttggagccagctccgtggtccggcaagccgctcatcgtggtctgccagagggatcgtggctcgggcgcatgctcgtccgtaagccacgtatgcttgtgatcgtcgccctcgccaacaagctggcgcgcatcgtttgggcgctgctagcgaaaggcggggtctatggagctccagtagcggccggataaaccggccgcaaacaggaggcgtcgaaggtgtaggagggtcgaaaggaaggtatggcgcacagtcgataagagacgggatcggaaaaccaggcctgaacggagtgcccagagcacgcttttatgatttggacccgatccgcgaactcccatacgggcccgcggcatccagatggtcgcaacagaggccggacagatgtcagcacccgactacgcgcaagtaccgtgcctggaaaatcctcttgcacttacgggggtgtccacaga

SEQ ID NO: 8251 - DNA, 1378 bp, unidentified
  source 1..1378: mol_type = unassigned DNA; note = element_ced0984
  misc_feature 1..2: note = core
  misc_feature 3..78: note = LE
  misc_feature 79..1119: note = CDS
  misc_feature 1120..1378: note = RE
  misc_feature 1124..1365: note = bridgeRNA
tgatggggtggacggccccctacggcatcagctgtgccagaatgaggttgttgcaaatctcagacaagggagccgtccatgagcgagattatccgaattgggatggatacgtcgaagcatatttttcaactgcatggggttgatgcctcagagcaggtggcactgtgcaagcgacttgggcgcaaggcaatgctggcattttttgccaagctggcaccgacggttgtcgtgatcgaggcgtgcggggccgctcactacctggcgcgggaactcggcaagctgggccatcaggtgaagctgatcgcgccgcagctggtgaagccctatgtgacgcgcaacaagaatgacggccgtgatgcggaagggctgtgcgaggcggcgagccggccgcggatgcggtttgtgccagtgaagacggttgagcagcaggcggcgctgatgctgttgggcgtccgcgaccaactggtcgcgcgccgcacgcagctgagcaacacgatccgcggttatgcggcggagtttgggctggtcgaagccaaaggtctggacaagattgcctcgctcctggccgcagttgcgcgcgacgaaagcgtgccggcgttggcatgcgagctgtttgcaacgctggctcgcgactatgcgcaggtgcaggtcgaactgaaggcggtcgaggcaaagctcgtgacctggcaccgcgccaatgccctgagccggcggctggcgcagatccccggcgttggcccagttactgccgcagcactggtgatgaaggcgcccgacccgcacgccttccgctccggccggctgtttgcagcctggctcggcttgacgccgaaggaccattccacggccggaaagacccggctcggcaagattacccgcgccggcgatgagagcttgcgccgactgctggtggtcggggcgacctcggtggtcaagcaggccaaagggacgcgaggtcgcgggccacgctggctcctcgagcttctgaagcgcaagacgccgaagcttgcagccgtggcgcttgccaacaagatggcccgcatcgcctggaagctgatgacgaccggggagagttacgacagcgcgcgcatcgatgctcaagtcgcatccgccgcttagttgattggatcgactggcgggttcgctcgccggccgaccggagctgcaagagcagaggagatggtgggatcgatcgatccgggatgcgagcaaatccgtggaatccattggccgaaccaaggtcgcgtggttgattggaactcgtgtcgcggacaccatcttggccagcggtcacaccgcaccaacaggccggacatatgggtgcaagcgatccgatcacacctcaacaagctcttgtgccacgggggccgtccacata

SEQ ID NO: 8252 - DNA, 1184 bp, unidentified
  source 1..1184: mol_type = unassigned DNA; note = element_ced3a6f
  misc_feature 1..3: note = core
  misc_feature 4..218: note = LE
  misc_feature 219..1166: note = CDS
  misc_feature 1167..1184: note = RE
  misc_feature 31..182: note = bridgeRNA
gattgtaagttaaatctccagtataatttcatgtaaggagtcaaattaaagtgaaaagctttagttataacctaagcgaccgtacgaggacagatttaaacaatcgtagtcatcaaggtacttaggctatctccttaatacgtttgaatagttggatggtctataacgaccgcttacaatcgtaaacatagaacaaatatactaaggagatatttaaaatgtatcataattttattggaattgatatatcaaaaaatgattttgtaatagctgtacatagaaataaaaaagcatttaaatatctcaataaccctaaaggcttcaatgagctactaaaagaacatcctattctaaaaaataattcttttgtagttttagagactacaggaggatatgaaaaagcacttttagactacttattatcgcataaaattgctgttcatagagctaatactcgagtagtaaaatattttattcgctcaactggacagttaggtaaatctgataatattgatgctataggcttagctagatatgggcatgaaagacataagtgtctaactctttataaacctaataaggataatcttcaagagcttgtaaaatatactcttaggaagcaagatcttaagaagcaattagttgctgaaaagaatagatctcaagctccagatcaagaatgcactaaagagtcacatataagagtaattgagtttctagagcaagaaaatgctattgtagagagtttaattgatgatcttgtaaaggactgtgaatacttaacaaaagctagagacttgttagttaaagaggttgcaggtttgggaaaagctacagctacatcgttacttgctcttatgcctgagctaggcaatttaaaccgtaagcaagttgcctttttagctggagtagctccttatccttatgagagtggtaagaagattggatacagaaaaacttatggtggacgagctgatttaaaaccagtattatttatgcctgctatgacagcttctagaagtaatggaaagcttggtactttctacaataaacttgtagaaaatggtaaaaaaaagatggttgctcttatagctgttatgagaaaaattatagtcattgctaatgctaaaattagagatttgaggctaaaaatgcaaatttcgtaaataatttacaacatagtt

SEQ ID NO: 8253 - DNA, 1496 bp, unidentified
  source 1..1496: mol_type = unassigned DNA; note = element_ced4e21
  misc_feature 1..2: note = core
  misc_feature 3..159: note = LE
  misc_feature 160..1206: note = CDS
  misc_feature 1207..1496: note = RE
  misc_feature 1264..1491: note = bridgeRNA
agatggtatggacgctccccgttctgcaccgcggtgaatgtcgaccgcgaggttttggctgttgattgtttggcagataaggggaggacccccgcacctgcggcatcgatgtgccaaagtggaagctcgaccaaccactgaacggagcgggagtccaacatgaaggctactacgatcgggtttgatttggcaaaggcggagtttcaggtgcatgcggtggatgcagccggcaaggtggtgatgcgcaagaagttgcgccgcgcccaggtgctgcccttcttcgccaagctctcggggtgtacggttggtatggaagcgtgcgcaagtgcccaccattgggcgcgtaagctcatcgggcttggccacacggctaagctgatggctccgcagttcgtgaagccctacgtcaaggcgaacaagaccgatgcggccgacgccgaggcgatctgcgaggcggtggcgcggccgaacatgcgctttgtgccggtgaagagcgtggagcagcaagccatcctcgccgtgcaccgggtacgctctggcctggtggctgagcgcaccgcagagctcaatcggctgcgcgccttgctcgccgaattcgggctcatcgccccacgcggccggcgcgccttgatcgagcgcttgccggcgctcctggccgacgaaaccctgcccggggtggcgcgccagctgttcgagcgccagagcacgcgcatgcgcgaactggaggcgcaaatcacagccgaggaggccgtgatcatgcactggcatcggaacaacgagctctgcaggcgcatcgatgccgtggccggggttgggccgatcaccgccacggcgctggtggcgagcttcggtgaagcgcgtgagttcgataacggccgtcagctggctgcctgcctggggctcgttccgcgccagcactcctccgggggcaagacacggctgctggggatctccaagcgcggggatagctatgtgcgcatgctcctgattcatggcgcgcgggcggtgatccgcacccttgagcgtcgcgccaggggcgcgctcaatcggaccgaccaatggctcaccaagctgcttgcgcggcgcaatcccaacgtggcggcggtggcgctcgcaaacaagacggtgcgggtgatctgggcgcttcttgcgcatgatcgcacctacgacaggaactggatgaaccagcagcctatcgccgcctgagcagcgatagggcgttgaacccaggacagatcggcacagcacagcagcaaatgcgtttctcgattgcaaaggtgatttctcaatcgatggcaaccaggtcagaccgtggtcgattcaaccttcaagctcgctgggaccatcgagtccgcgtgggagtacaggcatcgaccagcgtattccatcagggtcagcggcaaccaaggccgcgcatacagaccgaatgtaagcacgcagtcgtaccttccttgccagcgcagagaatcccttgcaaaccggggagcgtccatgta

SEQ ID NO: 8254 - DNA, 1595 bp, unidentified
  source 1..1595: mol_type = unassigned DNA; note = element_ced61ee
  misc_feature 1..2: note = core
  misc_feature 3..262: note = LE
  misc_feature 263..1474: note = CDS
  misc_feature 1475..1595: note = RE
  misc_feature 12..282: note = bridgeRNA
ctattacaataagttttggttggaagcccagcatccggctgggtttctttccttctcatgcctaagctacaatgaggggagcaactggctgaccatgtcctccttgggcttccgtgtccgtaaaaaagactgtcagccatccccttattgcagcgttcgatttgagcaggttgagccttggagttcgcgtcacccaatagattgaatcggcaatgagaaaaagatggattccggttgcgattcacagatgggaggaatgcaaatgaactctgttggcattgacatttccaaaggcagaagcacgattgccgtcatgcgcccctttggagaggtcgtcatctcgccctttgaagtccgtcacaccgacagtgaactgagcaagctggcaaggcggctcaaaagcctgaacggtgagacacgcgtggtcatggaggccacaggaaactaccatgcgccggttgcaaagctgcttcacgacgcagggctatatgtttccgtcgtcaatgcgaagctggtgcatggctacgggaacaacgatctgaggcgggtcaagaccgaccgaaaggatgccgtaaagctggcaaactacggccttgaccgctggcttactttgccgaggtacattccggaggaaaatacccgactgctgctgaagaactgctaccgtcagtatcggcagtattccaaggtgcagacgattctgaagaacaatctgatctcgttgctggatacggtatttcccaatgtaaaccgtttgttcagcagtcccgcccgtgcagatgggagtgaaaagtgggtagattttgtggccgaattctggcattgccgctgcgtcagcgagaaatccgaaaaggtcttcacaaacaaataccagcgttggtgcagaaaacacggctacaatttcagcgaggaaaaagcgcacaccatttacgtcgaagccagcgggcacattggcgttatgccaaaatccgaaacgacaaagctactcgtggagcaggctgttgctcaactcagagcgacttctgctgcgcttgctgcactcaaacacgaaatgcaatcattggcttccatgctgccggaatatcccgttgtcatggatatgttcggcgtaggcccgactctggggccgcagctcatagccgaaattggggatgtgcgtcgcttttattccaagaaagcgctcgtggcctacgccggactggatgctccgccaaacgattccggcgatgtaaccggcaggcacaagagcatgagcaaagttggtgcgtcgtccttgcggcggacactgtttcttgtcatgggcgtctatttgcagaagtcgccattggatgaaccggtctacctgttcatggacaggaaacgcgccgagggcaagccataccgcgtctacatgatggcctccgccaacaagttcctgcggatctactacgccactgtgaaagcctatttggagtcgctggaactcaccgcctgatctcaccataaagcattggctggccgccgtttcatttctgagatgcaaagcggcttggttcgctatactcatttcccagtaacgctacgttaaaatttctacttgacttttcttagcaggt

SEQ ID NO: 8255 - DNA, 1462 bp, unidentified
  source 1..1462: mol_type = unassigned DNA; note = element_cee041b
  misc_feature 1: note = core
  misc_feature 2..227: note = LE
  misc_feature 228..1235: note = CDS
  misc_feature 1236..1462: note = RE
  misc_feature 9..231: note = bridgeRNA
cgttactttattcgtaccccttataatggggtgttagccagccagacccggcatgattactgcccccagtcgtccatgatccgggggggatgtcaccgggtctggcggggcgctggtaaccgctaatagggggcaggtcaggcacttttgccgggaccgtctgtaacgtggatgccggtacctgctccccgtggttatctggttaacccatatacaagggagacagaatgaccgaatccagcgattacgaatccgtccaggtctttatcggcgttgatgtcggtaaagatacgcatcacgctgttgccatcaatcgttcaggtaaacgcctgttcgataaagcattacccaacgacgaaaacaaactcaggtcgctaatatctgacctgaaacaacatggtcagatactgctggttgttgatcagccagctaccatcggtgcgttacctgtcgccgttgcccgctcagaaggagtccttgtcggatacctccctggactggccatgcgccgcatagccgacttacacgccggtgaagctaaaactgatgctcgtgacgctgccatcattgccgaagctgcccgtaccctgcctcacgcgctacgcacgctgaaactggctgacgagcaaatcgccgaactctccatgctctgcggcttcgatgatgatcttgccgcacagacaacgcaggccagcaaccgtatccgcggccttctgacccagatacatccggcactggagcgcgttctcggttcgagacttgatcacccggcggtactcgatcttctccagcgatatccctcaccagaaaaactcgcttcgctggatgagaagaagcgggcagcccggctctgcaaacttgcgcctcgtctgggtaaacgccttgcagcagacatagctcaggcactggccgaacaaaccgtcgtcgttcccggcacgaatgccgctgccgtagtactgccacgtctggcactccagctcatcacgctgcgtaagcaaagagacgaggtggcgcttgaggtagaacagcgagttcttgctcaccctctttacccggtcctgaccagtatgcccggagtcggtgtcaggaccgcagccagactcctcaccgaggtcgcctgccgcgccttcgcctctgccgcacatctcgctgcttatgctggctttgcgccggtaactcggcgatccggctcgtcaatacgcggtgagcatccctcgcgacggggtacggggtaataaagctctcaaacgggcgttgttcctgtcggccttcgccgcgctcagggatccgatctccagggcttactacacccgcaaaatgagtcagggaaaacgacacaatcaggcgcttatcgccctggcgagacgacgctgcgatgttctgttcgccatgatgcgcgacgggactttttataccccgcaggcgtcataacatgcttgacagcttaatagggggccccccc

SEQ ID NO: 8256 - DNA, 1465 bp, unidentified
  source 1..1465: mol_type = unassigned DNA; note = element_cee58db
  misc_feature 1: note = core
  misc_feature 2..148: note = LE
  misc_feature 149..1450: note = CDS
  misc_feature 1451..1465: note = RE
cgttaccttgttggtggtcctgggtggtccggggccgggccagttgctgtgggcatgatgtcttgcccctgtccgtagatgatccggggggtgttgtcacccgcagcagccggacgctggtgaccgctgataaggggaacggcccgcagtgtgtgaggtctttcgcaggcgtgggtgcgggggccggcttgtccaccggctgaccctcacccatgcagcgagaggcggcaggagagatggatatcgaggacatcgaggtcttcatcggtaccgggcgtcggtaaggagcgagcactgggccacggccctgagccgggacgggcagaaggtcctcgacagggccctgcccaacgacgaggagcgcctgcgtgctctgtaccagaagctggccgatcacgggagcctgctggtggtggtcgaccagcctgccaccatcggggccctggccgtggcggtggctcaggacatgggcatcaccgtgggctacctgcccggactgtcgatgcgccgcatcgccgacctgacgccgggcagcgccaagaccgacgcgaaggacgcggccgtcatcgccggcgcggccaggagcatgcctcacaccctgagagccatcaacgcctcggacgaggatgccgcagcgctgagcatgctgactggtttcgacctggacctggctcgccaggtcaaccagagcgctaaccggatccggggactgtacacccagatccaccccgccctcgaggccgtggtggggccctggctggagcacgacgccgtcttggaagtcatcgccgcctggcccactccagccgatctgaagcgagcgggcaaggcaaggattgacgccaggctcaagaagcacgggtgcaggcggcacgccacctgggccggccagatcgtctcggccctggagcaccagaccgtggtggtcgccggcaccgacgcagccgcaacggtgctacctcacctggccaggcagctcatctccctgcacgctcagcgggccgatgtcgccgcccaggtcgaggccctggtggaggcccaccctctttatgaggtcctgatctccatgcccgggatcggggtcaggaccgccgccgtcttcctggccgagaccctgggcaagaccttcaacaccggcgcccagctggcctcctacgccgggctcgctcccgtcacacgccgctccggctcatcgatccgcggcgaggtgcgtctcccacggcggcaacaagaggctcaagcgcgccatgttcctgtccgccttcgcctccctgcgctccgaccccgtctcccgggcctactaccagcgcaaacgcgaccaaggcaaaccgccttgggccaggccgttctcgccctggcccaccgccgcatcctgaccctgcacgccatgatccgagatggagccctctacgacccacaaccagccacgaaactacccgccgccgcttgacacaccacatagggg

SEQ ID NO: 8257 - DNA, 1394 bp, unidentified
  source 1..1394: mol_type = unassigned DNA; note = element_cee5c10
  misc_feature 1: note = core
  misc_feature 2..75: note = LE
  misc_feature 76..1104: note = CDS
  misc_feature 1105..1394: note = RE
  misc_feature 1159..1391: note = bridgeRNA
tactgagatggaccccgcgccgccccgatagcaaactgagcggctcatcaaccgtttctggattggaggtctgcgatggacgtcgacattctgggcatcgatttggcgaagcgtgtgtttcagctccacggtgcagatcgcagtggtcacgccctgcatcgctccaaggtcacgcgcgacggcttcgtggaggcggtgcgctcgttgcgaccacgcatcgtagcgatggaggcatgcagttcggcgcaccactgggcccgaagcttccaagccatgggcatggaggtgcggctgatcagcccgcagtatgtctcgccgttcgtgaagaccaacaagaacgatcgcaacgacgcacaggccatcgtagaggcggccagtcgcccgacgatgaacttcgtggccgtgaagtcggtggaacagcaggacatgcaagctgtccatcgcgtccgcgacctgttgacccgtcagcgcaccgcgttgatcaaccaggccagaggcttgctgggtgagcgaggcgtgacgatggccaagtcgcccgaagcattcaagcgcgcggttccgcaggtgctgagctcttgcgatggcgaagtcaccggcatctgccaggcgatggtcttggaacttaccgagcagatcaaagtactggaagacggcatcgatcgtgccgagacgttgatcaagtcgttcatgaagcgatcgccgctatgcaagagaatcgccgtcatcggcggcgtcgggccgatcacagcaaccgcggtggttgctgcgattggcgacgccaaggagttccgcaacggtcgccatctgtcggcctggatgggactggtgccacgacagtactcgtcgggcggcaaatcgcagctcaagggcatcagcaagcggggcgacacctaccttcgaaccctgctgattcacggagctcgcacagtgcttcgctacgtggtcggcaagacagatgtccagagtcgatggctccaggacttgatcgccaggcgtggctacaaccgcgcggcggtggcactggccaacaagaatgcgcgggtgatccaggccctgctcagcagcgacacaccttatcgccctggcgccgccgcggtgcactgagcgacgaaccggcgacctcaccaagttttgatcagggaggattaacccccagcactggtttgcgaagctttcggaagtgatgacagaactggttggaccaacaccctcaagcctgttttttatgccggctgctccttcaggctcaagccgtcaatctgctaaggacggggtgtgcggatctcatcgaggctgcgggcatgtttcgacgcgcccaccggcaagccgtatacatgcatgcagaccgtttgaagtcaccgaaaagagcttgcaaaaggcgcggggtccataca

SEQ ID NO: 8258 - DNA, 1358 bp, unidentified
  source 1..1358: mol_type = unassigned DNA; note = element_cee6a11
  misc_feature 1..2: note = core
  misc_feature 3..68: note = LE
  misc_feature 69..1094: note = CDS
  misc_feature 1095..1358: note = RE
  misc_feature 1124..1355: note = bridgeRNA
ttaatgagatggtcacccccaccctacaggcggttacgctgtagggtgttttcatttaggaggccatcatgcaaagcacagcactggtagggatcgatctgggcaagcagtctttccacctgcacggtcaggatgcacgaggcaaggcgctttggcgcaagaagctcaaccgcaagcaactcacggagttttttgccacgcttgagccttgcgctgtcgtcatggaagcctgtgccggtgcgcattggatggcacgcaagctgactggttttggtcatgaggccaagctgatttctccgcaatttgtccgtcctttcgtcaagggtaacaagaacgacttcgtggacgctgaagcgatctgcgaagctgcttcgcgcccttccatgcgcttcgtctcgcccaagaccgagactcaacaaaccttgtccgcactgcatcgagtccgtgagtcgttcatccgtgaccggactcgcgcggtcaatcagatacacggtttcctgctggaattcggcattagcttgcccaccggcatggccgtcatcaaacgcttgccagtggtgctctgcgagcacaccctgccccctcgcatggtggcgatcctggaaggtctgcacagtcacgtcggctacttgagcgagcgcatcgcagagatcgacaaggagatgtcccggcaacttgccgaagatgacttggggcaacggctgttgacgatgcctggtgtagggccggtgacggccagcatattggctgccgagatgggcgacggtaaacaatatggatgtggccgcgactttgcagcctcattgggattggtcccacgacagtacagcaccggtggcaaggctaacctgctgggcatcagcaaacgcggcgacaagaacattcgtcgcctgctggtgcagtgcgcgcgaagttacatgcagcgccttgaccgccagacgggacagctcgcgcactgggtgcgatccatgttgttacgccgacattccaacgtcgtggcctgcgcgctggccaacaaattggcgcgtatcgcctgggccttggcgacccggcacaccgaattcaatccgggaccagacctcaagacagcctgatccctctactgcattgcgtgttttaccggtaggacacccacctggttttgcgatcgctgacattggatgacgtgaacggcataacggcctgacggataacctgaccaaaaaatcggccatcaaggccgaggcgttttttaggaccgtctggcgcgactctcatcgtggcgcggggatttcgttcccaataacgacgccggatagatttaggcaagccaaacacttcttcaaaatcagccttgcaaaaaagggggggaccataga

SEQ ID NO: 8259 - DNA, 1370 bp, unidentified
  source 1..1370: mol_type = unassigned DNA; note = element_cefc545
  misc_feature 1..2: note = core
  misc_feature 3..86: note = LE
  misc_feature 87..1112: note = CDS
  misc_feature 1113..1370: note = RE
  misc_feature 1139..1358: note = bridgeRNA
tgatgctgtggacggctcctccaccggcacgtgagtgccatagacgtgggtgctgttgaagctcccacgaatcggaggagctaaacatgcaagcgatcacagtcggtctcgacattgcgaaatccgtttttcaggtccatggcgttgacgctgacggccaggtggttatccgtcggcagttgaagcgtcgctatgtcctggcgttcttcgagaagttggctccgtgcgtgattggcatcgaggcctgcgcttcatcccaccattggtcacgccaactaagggcactgggccacacggtgcggctcatgccaccggcctatgtgaagccctatgtcaaacgacagaagaacgatgccactgatgccgaggcgatatgcgaggcggtcggcagggccaacatgcggtttgtgccgaccaagacaccagaacagcaaagtggtctggtactccatcgcacgcggcacttgtttattcgacagcagacctcggtgatcaatgcaatcagagcccattgcgctgagtttggcatcgttgcgccggtcggtcgccgcggggtcgaggagctgcttaatgtcatcgccaacgaaaagcgggttccagagcttgcccgtgcctgcctgttagcgcttggcgctcagctgcgcaggatcaaagagcagattctggagttcgatcgtatgattacagcttggcatcggggctgcgagacgagcaggcgccttgatgagattccgggcgtcgggccggctctcgccaccgctgttgtcgccagtattgccgatccgcgagcattccgatcgggtcgagacttctctgcctggattgggctagtgccgaaacagagctcgagcggaggcaagccaaagctcggcagcatcagcaagcagggcgatcgctatctgcgcggcctgtttacggccggtgcactcgcggtcattcgctacgccaagatccgcggcaccggacaccgcccttggcttaccgcattgttagcgcggcggccgattaaggtcgcagccatcgcgctagccaacaagatcgccagaatggtttgggccatgatggccaggggcgaacggtatagagaacccgtcgcacttgtcgcgtattgagatcgcgtcagtcacctgacgtgatgtgaaggttgggagggcgaacagcacgtaatgcagagccggtcgatttggcgatcaggacaacccaattgtgccgttgcattctcgaatgcgggcttctgaccgggacctgatccgcgaagggcattatggccagcggtcatgtgaaccgcgcaaacaggccgaacacatggctgcaccgactaactctgcgaacgtgaaaatatcccttgccaactcggagccgtccacaca

SEQ ID NO: 8260 - DNA, 1432 bp, unidentified
  source 1..1432: mol_type = unassigned DNA; note = element_cf05416
  misc_feature 1: note = core
  misc_feature 2..62: note = LE
  misc_feature 63..1100: note = CDS
  misc_feature 1101..1432: note = RE
  misc_feature 1207..1426: note = bridgeRNA
tactggcatggtccgccgcctaagctccccgcgggtgtagaggtaagcacaggaggtgttccatggagatccgcatcattggtatcgatttagggaagacagtgtttcactttgtaggcgtccacgcacggggcgaagttgtggttcgcaagaagggctcgcggactcagctgctgcgctttaccgcgaaccttcgtgagtgcctgatcggcatggaggcctgcggaggatctcattttctgggtcgtgctctgcgcgaacaagggcatgatgcgcgcctgatgccggcccagtatgtgaagccgtacgtgaagacgaacaagaacgattacatcgatgccgaagcgtgtgccgaggctgtaacccgccccacgatgcgctttgttccgatcaagaccgacgatcagctcgatctgcagacgctgcaccgggtgcgcgagcggtgggttgtgcgtcgcacggcagtgataaaccagattcgcggattgctgctcgagcgcggcatcaccatccgcaaaggacgaaatcatattgagcagtctttacccggcattctagaagatgccgacaacaagctgtccggcgcattgcgagtacttctgacccaactgcggctggaaatgcaatatctgcacgggcagatcggcgaaaccgacaagctgatcgggcgcatctgcggcgaacttgaacagtgcaggcgccttgtagcgatccccggaatcggtccgatcactgctaccgccacagtcgcagcgattggcaacggggcagccttcaagaagggccgcggattctctgcctggctcggagtggtgcccggcgagcactccaccggaggcaagcaaaagctcaccggtactagcagacgaggaaacaaatacctgcgcaaactcttcgtgcaaggggcgcacactgttctactgcagaaaaccaagcaatcttcaggcctgagtacgtggctcctcaatctcacatcacgcaagcgcaagcaggtggcgacagtggcattagccaacaagatggcgcgcatggcctgggcggttttgttcaaaggagaggcttatcgcccgccaacagcagcacaagtaatcgcagcctgatggcctgcaattgacgcctggcacgagcgccaggcttggaaatcgctgacgcgattcccacatctgcagtccaacgacgacgactgatctgagtttgagattcctgccaggtttgctggcgaaacatgagatggcacaacggtcgatcccggcgcccccgaaaaccggtaaccggaaaatgccttaaaaaggcagcgttactaaaaaggacgagggcgcagcgcattccattcaggccaggagctcgctactccaatcaaggccgaatacattcgcgcagaccaattctgtcatcctcattcttcgcttgcaaaacggcggcggaccataca

SEQ ID NO: 8261 - DNA, 1145 bp, unidentified
  source 1..1145: mol_type = unassigned DNA; note = element_cf084cc
  misc_feature 1..2: note = core
  misc_feature 3..190: note = LE
  misc_feature 191..1129: note = CDS
  misc_feature 1130..1145: note = RE
  misc_feature 31..200: note = bridgeRNA
cttgtatgacgagaaagtagcatattgagcggtgacgggggtcggttcacgacgccgcccccgtcgcgaccggaagcccgccgccgcctcggcttatacaccgtgaatgagcttggtgctccagtcgtatcttccatacccgaacagttgccagggcatgaacccgcatcagcaaggaaggggcaggtagatgacagatcagtgctacggcggaatcgacgtatcgaaggattgcctggacgtgatggtgctgccagagcggcaatccttttcggtggacaataatgccgccggttgcagcgagttggtcaaccggctgcgtggcttgtcgatcgtcgccgtcgggatcgagccgagcggcggctacgagcgcagcgtcatccgagcgctgctcgcggcaggcttgtcggtgcggcggatcaaccccaataagctgcgtcagtttgctcgcgcccgtggcgtgctggcaaagaacgatcgcctcgatgcgcggctgatcgcagagtatgtcgcaatcatgccgacacgcgtcgtgcagcgcgaccctgctgcagagcagcttgccgaggtcgtcaccatgcgccgccagctttgcgacgagcatgtcgcggtcgcgaaccagaccgcacatctcgaggacaccatgctgcggcgtctcaacaaacgccgcttggcgcggcttgaggccgatatccttttgctcgacagacggatggcagaaatcgtcggcggcaatgctagtctcgcgcggcgttatgagctgctgacgtcgatgcggggcgtcgggccgacgctcgccttcaccctcatcgcgctgctgccggagcttggccagatggggcgcaagcagatcgccgcccttgttgggctcgcaccttacgacttcgacagtggtaggctgaaaggacatcgctgcatctacggtggccggctgccagtccgtaacgtgctctacatggccgctctgagcgcttgccgatacaatcccaccctcaaggtcttccaccgtcgcctcgccggtgccaataagaagcccaaagtaaaaatcgtcgccgttatgcgaaagatgatcgtaatcctcaatgccatgctgcgtgacaacgtcgcctggcagccgaatttcgcctgagcaaatatcacagttg

SEQ ID NO: 8262 - DNA, 1190 bp, unidentified
  source 1..1190: mol_type = unassigned DNA; note = element_cf0e426
  misc_feature 1..2: note = core
  misc_feature 3..209: note = LE
  misc_feature 210..1187: note = CDS
  misc_feature 1188..1190: note = RE
  misc_feature 37..195: note = bridgeRNA
tcctttagatttgaaaatcttaaattgtagtataaaaagaagagaaaagagtttgagtacactataacgagttcagagctatataatctcatattctgattaagactcaactctttcttatcaaattctcaaatagaaattcgggttaaaaacccattagtaaggaatcgagttattgataagtttctcttctcattaaattcaaatttatggaaaaaattgttattggtattgatgtgagtaaattaactttagacatctgcattcaagaaaatggagtgaatcgttttgatactattgctaatactgaaaaagctatcaaatcttttttgaaacaatttgttaagagacaaaatattctaattggaatggagaatacagggagatttaacatccttctttacaacgtattaattcaacattcttttgctgtttatgtcatcaatcctttgcatttgaaaaaaagtatgggattagttagaggtaaaaatgataaaattgacagcgaacgtattgctgtatttttacttaaaaattatatggatcttcaacagtggaagcctaattcgaaagtcattgaaaagataaaattattgaatgctgaaagaaaacatcgcgttaaaataagagcaggattactagctcaagcaaaagatgaacaattcttaaaatcaactatggataaagctgtattacgcttaaacactaagcttattgatgtcttaacgaaacaaattaatgaaatagaagaaagaatctatcaattaattaacgaagatgaacagcttcataatcattataaaagaatacaatcaattcctggtgtaggaaaagttttagcatttaatatgttgattaaaacagatggttttacaaccataaatacacctagacaaatggcttgctatgctggaatagctccatttgattttcaatctggaacttccataaggcgaaaaccgaaagtttcatcaatggctgataaagatttgaagaaactattgcatttagctgcaatgagtgctattcgtttagataatgacttggctatttattatcatcgaaaggtagaagaagggaaaaataaaatgtcggtcttaaacgcagtcagaaataaaataattcacagaatttatgcactaattaaaaatcaaaatatttataaaaataacttggttttgtcatagaaa

SEQ ID NO: 8263 - DNA, 1409 bp, unidentified
  source 1..1409: mol_type = unassigned DNA; note = element_cf112c7
  misc_feature 1: note = core
  misc_feature 2..301: note = LE
  misc_feature 302..1375: note = CDS
  misc_feature 1376..1409: note = RE
ctctaagtttgcagtcaatagataaaaggtcggaaatttattttaaaaaagtcaagcgcgacggataattacctccgcatcttaccagaaaaatatcagtcttattatctttgtcgtattaagataaagactgataggcgggaagaggataccataaaagagaaagcacttgaggctaccccacgtaacgggctctctccgccaagctgcaaagctccgatagaatatcaaggttgcgagcctatttagagtttagagttcaaacagcttttaccaatcttaaaataaacacagcaaaaatatgaaaaaattatttattggaattgatttttcaaaagagaaacttgacgcgacgataattctcgcgtgtggcatgaacgaaataggttcccgtgagtacggatgtttcccaaacaacaatacaggctaccgcaagctctgtaattgggttaaaaccaacgcttgggatactatttccggtgaatggttattctgtggtgaagacacggggtcatgcagtataggactgagcaaatggctttacggaaaaggatatgacatatggattgagaacgcttataacataaaacacagcagtggaattcaacgtgtgaaaaacgataaggcggactctgcaatcattgctgaatatgcatggagacaacaggacaaggctgtaccctttgaaccattaaatgaatccctggcacaactacgggaggtcttcctgtaccggcataagctagtggggcagagagtggcaatggaattacgcaaagaggacaaatcacaatcaaacaaatcaaaagcaatatccttcatcaaccgcaagagtaaacacctgatcgacgagataaacaaagcaattgccgaatgcgataagatgattgataacattatagaggctgatgaggaactgaaagaaaattatgcgattataacatcaatcaaaggcgtagccagacaaaacgcaacctgcatgttggtctacacaaacaacttcaagaaattcggatatgaccccagaaagattgcatgctattatggagtcgcacccttcggaaaacaatcaggaactagcgtaaatacacctgctcatacaagccattttgcaaataaacttatcaaatcattattgggacaagcggcgcatatagccaagatatataatcctgaaatcagagattactatcaacgattgatcaacaaagggaagaaaccacaagtggctttaaacaatgtaaagaacaaactcatacggatcatagtcgcactagtcaggaagaaagtaccatatgatcaaaatacatataaatattatgaagaacgagaagtaatgaaggagaaaaagaacgagaagttaatttattgttaaacagaattagatattaggatattagcatagaata

SEQ ID NO: 8264 - DNA, 1387 bp, unidentified
  source 1..1387: mol_type = unassigned DNA; note = element_cf2a979
  misc_feature 1..6: note = core
  misc_feature 7..309: note = LE
  misc_feature 310..1350: note = CDS
  misc_feature 1351..1387: note = RE
  misc_feature 122..278: note = bridgeRNA
cagatctcactctaagtttgcaccgagaattggcgaagcccaataattatccaaaaaacaatctgaaatgaaaatagatttcaactgcaagagacgatttcttacctttgttgtctaaaggaaggaatggtctgtcgaagaggtaaaccatagatctcacgagcctgcaaggctaagatctgcttaggacctcctcgacatagttgcagagaccagatagaaagataatggcttggagccttgttagagtgttagtccatacaactatcgaccaattccgtaattattaatctttagcgtagcaaagatatgaagaaaatttttattggtattgatttttcaaaagaaaaatttgacgtggtcatcatcatggctgagaatttggaggagaaggctccaagggtgcacgaacagtttgcaaacgacaaggccggctaccgtaagttcctcaaatgggtgaaggtgaactcgcacggcgtggacatgtcgctgtggcttttctgcggagagaacacgggcgactacagcaaggggctggcgaacttcctctacggcaaggggtgcgacatgtggcttgagaacgcgaagtgcatcaaggacagctgcggcatacgacgcctcaagagcgaccgtgcagacgctgccatgatagccgagtacgcaatgaggaaccacgaccgaatgacactgtacgagcctctcagcgggccacttgcgcagctcagggagctgttcctgttccgacagatgaacgtgcgcaagagaagcggctacatcgtccgcaagggcgagaagggcaggactctggacagctcgccagccaagagcttcatggccaggaagtgcaagcacatgatagccgagctggacaagacgataaaggagtgcgacaagatgatcgaggcgctgatagcatccgacagggatcttcaggagacctacgagatagtgacctccgtgccgggcataggaacccagaacgccgtgtgcatgatggtctacaccgacaatttcaagaggtttgactgcaaccccaggaagatagcctgctactacggaatcgcccccttcgggcatgactcaggaacaagcgtccactgcgacccgcacgtccactacatggccaacaagaccataaagggaatcctcacgcaggcagccctgtgcgccatcaaccactgcccaccggttgcgcactactacgcaaggctaatcgagcgtgggaaaaagacgatggtggccctgaacaatgtaaaaaacaagctggtcagaattgtgacggcactggtcagaaccaaacaaaaattcatccccgaatatgaatttgcaaaaagatacgctatggactaattttttcaacaaaaaatttggaaattaacatagaaag

SEQ ID NO: 8265 - DNA, 1402 bp, unidentified
  source 1..1402: mol_type = unassigned DNA; note = element_cf360e7
  misc_feature 1: note = core
  misc_feature 2..89: note = LE
  misc_feature 90..1127: note = CDS
  misc_feature 1128..1402: note = RE
  misc_feature 1175..1394: note = bridgeRNA
caatgggatggacgcccccacccgtaacggcatcgaagtgccagagtggaagtgtctgcaaccactcgaaccggaaaggtgcatccaccatgaagatcacgactgttggcatcgatctggcaaagaacgtgttccaggtgcacgcggtcgatgagcgcggccgagcggtgctgcgcaagcagcttcggcgtgatcagatgactgcgttcttcgcgaatctgacgccgtctctcatcggcatggaggcttgcgccagcgcccatcactgggcccgcaccctgcagaggttcggccataccgtgcacctgatggcaccacagttcgtcaagccctacgtgaagagcaacaagaacgacgtcgccgacgccgaggcgatctgcgaagcggtgagtcgaccgaacatgcgcttcgtgccgatcaagagcgtcgagcagcaggcggtgctggcgctgcatcgggtgcgacagagcttcgtgagggctcgtacggcgcaaggcaaccagattcgtggcttgctcggtgagttcggactgatcatgcccaaaggcatcgtcaacgtggccaagcgggtgcctaccctgctcgaggccgcaggtgacgagttaccagcatcgttgcgacagatgatcgagcgcttgactgatcacctcaaggaactcactcggcaggttgacgagctggagacgcagatcaaggcgtggcatcgcagcagcgagctcagccgcaagttggagaagatccccgggatcggacccctgggagcgagcgcactggtcgcatcgatcgccgatgcgaacagcttcgacaacggccggcagctgtccgcctggctgggactggtgcccaggcaggactccagcggcggcaagcccaagctgctgggcatcagcaagcgcggcgacgtgtacttgcgaaccttgctgatccacggagcgcgttcggcgatcctggcggcgcagcgcaaggcggtcaacacaaacgtctggctcgccagcctgctcaaccgccggcatccgaacattgcggccgtcgcgctggctaacaagaacgcgcgcacggtctgggcgctgcttgcacacggccgagagttccgagccgactacgcgcctgaggtctcggccgcatagccgagtcggcggatcgacaagacacattcgacacaggagatcacaccaccgattgctcaggcgatcacgtagtgatggcaagacaggttagaccggggttggcgaagcccagagtgaccgcagcacctcgagtgcgacaaagcgattgaggagccaaccagcaaatcccatcagggacagcggccatgccgcatcgaaagtccggatgtacgggtgcaatcttcccttccagccgtcatgaactgaaagcttggcaaaccgggggcgtccatgta

SEQ ID NO: 8266 - DNA, 1365 bp, unidentified
  source 1..1365: mol_type = unassigned DNA; note = element_cf368de
  misc_feature 1..2: note = core
  misc_feature 3..77: note = LE
  misc_feature 78..1103: note = CDS
  misc_feature 1104..1365: note = RE
  misc_feature 1076..1353: note = bridgeRNA
tgatggggtggacgccccccggcggcatcgatgtgccatagtggaggtgtttgaacaccactagagaggaggcgtccatgtcggaagttagcatcatcgggttggatatcgcaaagtccgttttccaggttcacggggccgatgcgtcgggccgtgcggtgcttcgcaagaagatcagcagggcaaagctcttgccgttctttgcctcgcagccctcctgccaggtggtgctggaagcgtgcggaggcgcgcatcactgggcgcgtgagctggcgaagctgggtcatgaggtccggttgatcgcgccagcttacgtaaagccgttcgtgaagcgccagaagaacgatgctgcggatgccgaagccatctgcgaggcagcgcagcgcccgagcatgcggttcgtgccagtaaagaccgaagctcagcaagcagccgcgctggtgttccgggcccgcgacctgctggtcaagcaacgcacacagatcagcaacgccgttcgcggtcacatgaccgagcatggctggatcgcgccgcaaggcctggcgcacatgaagaagctggctgcgctgcttgaagatccaagcgcagttcccgagagcgcacggccggtactggagataatgctcgatcagatggcggtgctgagcgagcgcattgccgaacttgatcgggagatcgcccggcgtgcccgcgaagacgataccgcgcggcggctgatgaccatcccgggcatcggaccgatcacggcaaccgcgatcaccgcacttgcacctccgcccggcacctttgccaagggccgctactttgccgcatgggtcgggcttacaccgcgccagcactctaccggcggcaagcaaaggctcggcgcgatctcgaagatgggcgagcgaacgctgcgtcggctactgatcatcggcagcagtgcggtggtgctccaggcaagcaggcgcggcgcacccgcgggatcgtggctggaacagatgatggcgcgcaagccgcgcatgctggtcacggtggcgctcgcgaacaagaccgcacgcatcgtctgggcagtgctgacgaagaacgaggattacagggctccggtctcggtcgcggcgtaagccgggccggaccagaggtcgccggaaggacgtaggcggacgaaggagggtatggcaaaacagtcggcgagacgggaccggaagaaccagggctttccaccgtgcttcatcagcacgctgagggtgatgtggttccggtccgcgaactcccatacgggcccgcagcacgaaaagctgcaccaggaggccggacagatggcagcatccgactacgtgccatacctctcaaaataccgcttgcatcctgcggggcgtccacaga

SEQ ID NO: 8267 - DNA, 1464 bp, unidentified
  source 1..1464: mol_type = unassigned DNA; note = element_cf39830
  misc_feature 1..2: note = core
  misc_feature 3..237: note = LE
  misc_feature 238..1275: note = CDS
  misc_feature 1276..1464: note = RE
  misc_feature 17..184: note = bridgeRNA
cttgtatgttgcgtttagaggcgtgaggatgatttcacgtttcggcggtaaggccgtgcgtccctaaggccaactgtggttgagcctgtcctgtagatcggccaccgcccctctgattgcacgccgtggagaatcgaaggccttttgagcctgcatgttcaaggtcggcgcaagcaggagtccgttgatggcggacaggagcggcagccgagaccatcctagccgtgaaggaggtctatgaacaagctggttttcacgccgcaggcaacagtgttctgcggtgtcgacgtgagcgctcgtactctggctgtggcccagatcgggtccgatggcagcttggcgcagcgggagttcgccaacagcgcggttgggcataaggcgcttttagcctggctggccagatgcaacaccagggtgcgcgtatcgctggaggccaccggcgtttactcgctggatctggcgctggcgcttgatcgagaggcgtggatcgagctggcggtgctgaaccctaaggtggtgaaccgttttgcgcagacgcttcgccgctcgaaaaccgattcggccgatgcggtggtcttagccgagtacggtcagcgcatgccgtttaccccttggcagcggcccctggccggtcatcttcgcttgcgcactgtgagccgttacatcgagtcgctggtggtggatcaggcggggttgaagaaccgtttgcgcactgcggaaagcaccgccaccacaccgcgcgcggtgctggttgacttgcggcaggctctggccgcgcttgaacggcgtgtggcgaagatgcgtcgcgaggtgctcgatctggtgcgagccgagccggcgctgtgggagcggttccggctgttgaccagcgtgccgggcatcgcccagatcagcgcgctgcagatcctgagcgaactggtgctgctggcgccggcgatgacggtgcgccagtgggtggcatcgagcggactggacccggcgcatcagcagtctggcaccagtctgaacaaaccgtcgcggatcagccgtgcgggcaatcgacacctgcgccgcgccctctatatgccagccttggcggcggtgcgttgcgatccgcacctgcgcgcgttttacctggcactgcgcagccggcacaaaaccggcttgcaggcgctgatggcggtggccaggaaactgctgcatgccatctacggaattttcaaaaccggcaggccatacgatggcaaactgttgtttccgaatatccagacagaggtagaatcagtcgccgggtgaaacggaagcaggctctgctgggaagcaaccatgccgagggataacccggtgggctcatcctgacgatgaaccaaaggggcgggcaggaaaagagattgctcgccccaaaatcatcagagggatagaccccgatgccttgaaaatccaaactccatcacgcaaaaaaatagttgacttcgaacagagaat

SEQ ID NO: 8268 - DNA, 1194 bp, unidentified
  source 1..1194: mol_type = unassigned DNA; note = element_cf40710
  misc_feature 1..4: note = core
  misc_feature 5..218: note = LE
  misc_feature 219..1172: note = CDS
  misc_feature 1173..1194: note = RE
  misc_feature 38..204: note = bridgeRNA
tcatcctatgtttgcaaaacaataaatttaaggaataataatggagaagtcagggtaaagaaaaaagctacaaattgtcattagtctcgcagacagaacggaatgtaagttcctttacccttttactacaaaagcttgaacagatcattaggttataaagcctgcatttaggatagataagctatcgtagtatttcttctcagtaaaaaaaatgttttatgtgtaaatttataggaattgacattagcaagcaaacatttgatgttagtttttcagagagtaaaatctggaagcatcatatttttgagaacaagctttcgggatttagaaaattattaaaactgataaaatcagaagattgggttgtaatggaagcttcaggaagctactatcttcccttggcagagtttctggacaagacaggaatcaatgtctgcgtggtgaatcctttggtgattaagcgattttcccaaaccaatctgtaccgtgcgaaaacagataagaaagatgcccagacgatcgcagagtatagcgaaaagtacgagttgaggaagtggaatcgtgcgagtgaaaatgccaataagctacgccaattgtacagcaggaaagagatgttgttaaagcaagtacatcaaagtaaaaggcagttggaagccttcacgtcgagtggttttttggataaatttttgaaaatggaaattaataattccattaaatatttagaaaataagatactaaaactggagaaagagatggatagactttcactggaggaatattcggaaacgatggaaaacctacagagtattccaggagtaggaaagcaaacggcgatgatgatgtgtctgattactgacaattttgagaaattcgaccattataaacaattgattgcctttgtaggattcagtccgagaatttatcaaagcggaacaagtgttcggggacgaggtcacatctgcaaaatgggcaaggcgcaagtaagaaaactgctttatttatgcagttggagtgccaaaagatggaatgtaaaatgcaaggaaatgtacgaaagattaaaagcgaaaggcaaaccggagcgtgtcataaaaatagccattgccaataagctgataaagcaaatatttgccattggcaaaagcaaagaaaaatataaggcagatttttgttaaataatttgcaatttaacacaga

SEQ ID NO: 8269 - DNA, 1440 bp, unidentified
  source 1..1440: mol_type = unassigned DNA; note = element_cf43523
  misc_feature 1..2: note = core
  misc_feature 3..228: note = LE
  misc_feature 229..1425: note = CDS
  misc_feature 1426..1440: note = RE
  misc_feature 10..224: note = bridgeRNA
gctctaccttccttcctgggttgaccccggccattcgtagggttgtggcacccaggggagccgggtgtggctgtcgtcgtgctgccgctcgtggcttgagatgcttggccgcccggctccccacgacgactcggccgccgattgggaagtgcgagaaggtcgctgcgtagagcaatgccggcgaggtcgtccgtggtacgcactgtaggaacgacctgatggagcatcatgagccggatatgggtgggaaccgactgcggcaagacccaccaccactgccttgtcctggacagcgaaggcaaggtcctgctgtcgcggcgggtggccaacgacgagccggagctgctgcaactgatcgccgacgtcctgggacccgcgggcgacactccggtgacctgggccctggacatgaccggaggcgagcccaacctgctcatcgcgttgctggccgcccacggccaggagctcgtctacatacccggcgtcgcggtcaaccgggccaccgacggctaccgaggcgcaggcaagacggacgcccgcgacgcccgagtgatcgccgaccaggccaggatgcgccgcgacctgctgcccatccgcctcgacgatgaagccgtcgtcgaactgcgcctgctcaccgaccaccgggccgacctggtcgccgagcggacccgcgccaccaaccgcctgcgatccctgctgaacagcatgttccccgccctggaacgggccctcgacctcggcaacaccgggccgctcaggctactgacgggctaccagacgccagcggcgatccgccgcgcgggcgcccgacgcctcgcaacgtggctgcgcaaccgcaaggtctactctccggacactctcgcggcgaaagccgtcgaggccgccgagcggcagcacaccgccgtcgccggggagaaggccatcgcgaagatggtccacaccctggcggaggaggtgatgaccctcaacgagaagatcgccgagaccgacaagctcatcgaggaccggtttcgcgagcacgaactcgctgaggtgatcacctccatgcccggcatcgggccgaccttgggggctgagttcctcgccgccgtcggcggcagcctggacgcattccccacggcggaccgcctcgcggccttcgccggcgtggccccggctccccgggactcgggcaaggtcagcggcaacctgcaccgcccgcagcgctaccaccggcgcatgcagcgcgtcttctacacctccgcactggtcagcatccgctgcgatcccaactcccgcgcgttctacgaccgcaagcgcgccgagggcaagcggcacgtccaggccgtgctggccctcgcgcgccgacgcgtcaacgtgctgtgggccctgatccgcgacgggcggtgctaccaggtcacaccgcccgtcaccacggcggcttgacatcaacattgggaa

SEQ ID NO: 8270 - DNA, 1390 bp, unidentified
  source 1..1390: mol_type = unassigned DNA; note = element_cf48e45
  misc_feature 1: note = core
  misc_feature 2..295: note = LE
  misc_feature 296..1375: note = CDS
  misc_feature 1376..1390: note = RE
  misc_feature 10..299: note = bridgeRNA
ctgtgagactttcttgtagctggtctgggactggctggcaggatgggtactggccgttccgccggccatggatgtgactcgagcgtacgttgaccatgaagtgtcttgccgccgacttgtccatccgtggcgcgggccggccggacctgtccggcccacctcggtagcttgatcagaagattgtccgccgccttgaggcgcgtgacccgtcacagtgctgttccgatgtgtttcctacccggactggtaccggccgacagcggcctgaccatctccatcactgaggaaaggtgccgtgaccgccatttctatcgtcgcgcattcctacccgtttgtcgtgggcgtcgacacccacgcccgcaatcacgtctacgcgatccttgcagccaggaccggcgagctgatcgatacccgagacttcccaacgacgtctgccggcatcaacagggccatcgcgtgggtggcccgccgcaccgacgcagacgctgacacgctgtgggtgatcgaaggcgccgcatcttacggagccgtcctggccggcgctgtcgccgccgagggttacccggtggccgaggctccgcgaatggacgcgaagaaacgccacggcgtcggcaaatccgatgccctcgatgcgcaccacattgccgcagccgcgttgccgctgccacaggcgaagctatgccgcccgaggctcaacgagggggtgcgccaggccttgcggatcctggtcacggcccgcgacgccatgagcgccgagcgcacccgttcggtcaactcgctcaccgcactgctgcgcaccaatgatctgggattggacgcccgcagggcactctcagcagctcagatcgctgaagcgtcgcggtggcgcgcccgagaggaggaactgtccctgaccatcgcccggaccgaggcaacgcggttggccaaacgtgtcctcgaactcgatgaccagctcaaagccaatgacaagcaagtgaccgagctggtacagatcagcgaggccgcacccctgctgcatgaaaagggctttgggtccgtcactgcagcgacctgcctcaccgcctggtcccatcagggacgggttcggaacgaggcggcctacgcctccctggccggcgtgaatcctatccccgcttcctcaggaaacaccgtccggcaccgcctgaaccgaggcggagacagaaacctgaaccgcgctctccacatggtcgctctcaccaagatgacccacgacgaggagacccggagatacgtggagaaacggcgaacagaaggacgcaccgaccgggaaatccgccgatgcatcaaacgctacctagcccgacgcgtccaccgcacgctcaacgccgcgagcccgtgcctgaagagcgcttgacagacatagaagagt

SEQ ID NO: 8271 - DNA, 1757 bp, unidentified
  source 1..1757: mol_type = unassigned DNA; note = element_cf4ae81
  misc_feature 1: note = core
  misc_feature 2..280: note = LE
  misc_feature 281..1522: note = CDS
  misc_feature 1523..1757: note = RE
  misc_feature 13..300: note = bridgeRNA
cctgttactatatatttgtcccatgttcgtgacagccagtcacaggcgagggacatctcattgcctaagctgtacaatggaagggcaatggtctggcaagattctccaagagctttgcgctcgttagaaagtcagtcagccagccttccattggcagcgttcgatttgtgcaggtggagaacctcaaatagtcacggggacactcgcgtcagcaaacagatggaatcggcaatggggaaaggtggttcatccattgcagttcacaacgggaggaatccatatgtttgcagttgggatcgacgtatcaaacggcaggagcacggtcgcggttctccaatccaagacgaaagtgactctgaagccgtttgaagttgcgcataccgcagagagcctgaaccgtctggccgggacgctgaacggtctgggagacggtgtgcgcgttgtcatggaacacacaggacgttattacgaatctgtagcgcagtttctgcacggagccggtttcttcgtctctgcgctcaatccgctgctcatcaaggagtacggagatggaaagctgcgcgggggcaagacggataagtccgacgctgtgaagatcgccagattcgctcttgacaactgggacgaattgcgtcaatatacccctatggacgcgattcgttatcagctcaagaccctgaaccgccagtatcagctggccagcaagaaccgcacggcctgcgccaacaacctcatcgcgctgctggagcagagctttccgggcattcgttcgctgtttgacagccctgtgcgcagcgacggcagccagaagtgggtggattttgtcgataccttctggcatctggactgtgttgccaggctcagtctgaatgccttcaacgagcgctacctcaaatggtgcagccggcacggctataacttcagcgaagcaaaggccgctcagatccacgcccacgcccgccagcgtattgcactggtccccaaatcagacaccgcaaagctcctggtcagagaagccgttgcacagctcaacgttgtttcccacactgtcgaagtctaccgtgacgagatgaaccggctggcctctcagttgccggaatacgagacggtcatggccatgttcggcgtcggcaagtctgtaggtccgcagctcatggctgagatcggcgaccttcgccggttcacccaccagaagtcgctggtggcgtttgcgggtactgatcccggaaagaaccagtccggtgacaaggacgcccgaagcaaccgcaccagcaaacgtggctcgccgtatctgcgcaagacgctgttcgtcattatgacgattctgattcagcgccagcctgcagatgacccggtttaccagttcctgaacaagaaacgggcagagggcaagccctactacgtttacatgacggctggcggtaccaagtttctgcgcatctactatggacgggttcgcgactgtctgaaggcgaaagggctttgggatcagcccacactggaatcgggcagctctgactgacagggcttgccacgcaagctcttgacctccgcgaagctcagacggcgcggtttgtcaaggatgccgcaggcacggcgcagccgcttgtccttgacgaaacgtgacggctgtgctacttctcttctttgaccggcgctttggcggtggtttgttttgtgtacgcatttttctgccctctatattcctgccttttttctctcaagtctcatttgggacttgactttttatttgcagg

SEQ ID NO: 8272 - DNA, 1154 bp, unidentified
  source 1..1154: mol_type = unassigned DNA; note = element_cf5de33
  misc_feature 1..3: note = core
  misc_feature 4..213: note = LE
  misc_feature 214..1131: note = CDS
  misc_feature 1132..1154: note = RE
  misc_feature 10..196: note = bridgeRNA
gcttgtgtctagatctaggaataagctctggggtgagaggggtggatggcaagctgtgagtccgcggtgcttgaagcacgtgtgggagccaagctgccatccacctttccactctggcccataagcccgaacagttggacgagcagccactcgaaatcacaagcgtgggcaaagccagagcactctcactcctgagtgtaagagggttttgccatgatttcctgggtcggcatcgatatctccaaatcaaacctcgttgtttgggttcaaccagacggtgaaggctttgagctttcaaacacttcagaaggctgtgctgagcttcttcagcgcttgagccagtacgaggtgggccgggttttgctggaggccacgggaggctacgagcgcaaggtcatggccgcactgctaggtgccagcttcaatgtcctcaggatcaatcctcgccgggccagggctttcgccgtggcaatgggcaaaagtgccaagaccgatctgatcgatgccgctgtgttggccgatttcgccgaggtcttgaagatggacggcgacaagatcatttcgcctgagcgtgaagcgttgcgcgagctggttcagcaacgcgagcacttcgtgcagcaacgggacgacaataagcgccggcttcagcaggctcagctacccactgttgtggcggcaatcaaaggccatattcactacctgcaaattcagatcaagcaactcgataaaaccatccaccagagcatgcacgagctggacgcagaaaaaaccgagcgcctcatctctgttaaaggaattggcacggtcgctactgccagtttgctggtctacctacccgaattgggcaagcttggccgtcgcgagatcgccgcactggcaggagttgcaccctgcaacgatgacagcggcaatcacagcgggaaacgccaaatccacggaggaagagcccggctgaggcgtgcgctttacatgtcctgctgggtagtgatccgctttcaagctgactttaaagcacgctatgacgctcttcgggcgcgaggcaagagcgcgaaggtcgcgctcatcgcctgcatgcgaatattactgatcagactgaatgccatgctgagagacggcacggagtggcggtgacgtatggcagggtgaagacagtt

SEQ ID NO: 8273 - DNA, 1446 bp, unidentified
  source 1..1446: mol_type = unassigned DNA; note = element_cf83aba
  misc_feature 1..2: note = core
  misc_feature 3..211: note = LE
  misc_feature 212..1195: note = CDS
  misc_feature 1196..1446: note = RE
  misc_feature 13..193: note = bridgeRNA
cttgtatgtaataaatatgtgatggttagctaccattgcatggagtggagagagcctggccctcgccttaaggcaatgaccttcattgagcagcaaaagccctccgcttcacctttcacgccagcattaacattgaacggttgccaagagcgatgactctgcatgtacaagggtaataggcgtgatggttctgtgaaaggagaaaaacgctatgtttcagttaggtattgatgtcagcaagaaaaccttggatttgtgtctgctgcgggaaggcgtgaaaggaagagtaaaaaaccgcaagcttaaaaacgatttcaatgctgtcggtactgtagtcagttggctccgcaaacaacactgtgaaccgggtgatgcccatatcatcatggaggccaccggcgtttaccatgagtcacttgcttacggtctgcacgatgccggagcaaaagtatcactggccaatcctcatcgcagcagggaatttgcccggggcatggatattctgacgaaaaatgacaaggtggatgcttatatgctggcctgctacggggcgcttaaagagcctgagccctgggaaccaccgccagagaatgtccgctatctcagtgcacttctgcgtcgccacgatgcgcttgttacagacagtagccgcgaaaaaaatagactggaaaaatgtcgggcaacagatactcccgctgctgttgctgaatccatcgaaaacgtgctgcgaaacctgagtgcagaactgcagcgtctggagactcttatacagggttatctcgatcagcatcctgaattaaaaaaggattttgacctactgacatcgataaaatccgtaggttttcagttaggtcttaatatgctggtaatcctgcggagtcatcgtttcgacacagcagagcaggccgccgcaaaagtcctccggcacctcggtcagagccgcttgtcaaaaatcgggccaccggaaatcagggcaaaactgtatctggcatcgttgtgcggcctgagatttaacccggcgatgaaggcgatgtatgaacggttatgccaacgaggcaaagccaaaatgtgtgctattggcgcactgatgcgaaaactggttcactggtgctatggagtcctgcacacacaacagccgtttgatactgaataccggtcttctgatgcgcatagcgtatgtaaggcggcatgctgaaagttacatatgcatccgccaaagcccgacgtaagctggccgggagcttttagagagcccgttaccccactcgacctgaagagccatgagggctgtcagcgattactatgctgatttaagcccttttaaccccgttggcgcggcgatagtcgcgatgtatcggggacttggtgctggaagctcgctgacagcgcctgggggggctgtacggctaaatctaaagcgatatttttcttgactcaacacggtag

SEQ ID NO: 8274 - DNA, 1539 bp, unidentified
  source 1..1539: mol_type = unassigned DNA; note = element_cf85676
  misc_feature 1..2: note = core
  misc_feature 3..240: note = LE
  misc_feature 241..1422: note = CDS
  misc_feature 1423..1539: note = RE
  misc_feature 6..218: note = bridgeRNA
cttgtattatagagtagtagttattagagcccctctccaagggctgtgctacactgtaagggatgctgtggattggttggcggctcctaccacaagatggttcacgaaaggttccaaccacagccccttacaattttgttaatcagttaaataccgccagacggtttatgtggaacaaggctacaaaagtaaggtgtactgtggatgcagcatcacatattttctctggaggtatttgttatggtagtttctgttggcattgatgtctcaaaaaacaagcatgattgcttcattgtaagctcagagggtgaagtcctggcggatgtttttactatccctaacaacatggacggtttttatgctctactggaaaaaattcgagcttgtactacaccgcaggacaaaataaaagtagggcttgaggcaaccgggcattacagctacaacattcttgggtttcttctggacaacggtctggccacctatgtcttgaatcccttacgcacgaatctctaccggaaaagtctcagcctgcgaaagaccaagaccgaccgtgtagatgctcgaaccattgctgctatgctgttatccgatgtgggcctcaaaccctacacgaatacagcatatcacaacgaggaactaaagtcactcaccagataccgttttgacaaggtgaaagaacgagcaaagctgaaaagctcaatttccagactggtttgcattctcttccctgaactggagaagctggtgtcctctctccatttggcgactgtctacgctctgctggaagagtttccaggttccaaacagattgccaaggcacacctgacaaggctcaaaacccttttgggaaacgcctccaaaggtcgctacggtcgggatatggctgttactatccggagcgctgctcagaattctgttgggtcctgtatgcctgccaaatccctggaattgcaacataccatccggcttatccgtgaattggatgctgagatcgctgaaatcgaggctgaaattgagacaatgatggacaagatacagtctcccattacaactatccctggtatgggctctcgtatggctgccatgattcttgctgaaatcggcgacttctctcggtttgagtcgccggacaaattattggcctacgccggaatgtcgccttctacttaccagtccgggcagctcaagaattgctatccccacatggagaagcgtggctctcgatacttacgctacgctctttacaacgcagccaagtatgtctgtcactgggacccaacctttgctgcttaccttgctaagaaaagagatgaaggcaaacactacaatgtcgcactttctcatgccaccaaaaagttagttcgtttgctgtttgccctggaaagatccagacagccttattgcagcttggcggcctaattccatcttgttagcctacgccggggtccctacggacctctgctttgctatacctttcttgaactatctcttttcaccaccaccattcatttttggggttgacttttaatagttaat

SEQ ID NO: 8275 - DNA, 1417 bp, unidentified
  source 1..1417: mol_type = unassigned DNA; note = element_cf8c9a5
  misc_feature 1: note = core
  misc_feature 2..66: note = LE
  misc_feature 67..1098: note = CDS
  misc_feature 1099..1417: note = RE
  misc_feature 1192..1411: note = bridgeRNA
taatgagatggtccgccgccgagtacgatctttcggctcggcagattccaacaggaggatcatctcatgcgtatcgtagcggtcggtatcgatctcggtaaaaccgtgtttcacctggtggcgatgggagagcgcaaccgcgtgctggtgcggcggaagttctcgcgtcaacagctgttggcttacacggccaacctcgagcccactttgatcggcaccgaagcctgtgccggcgcccattttctcgcgacagccctatgtgcgcagggacacgacgtgcgcctcatggcagcccagttcgtgaagccttaccgtaagtcgaacaagagtgactttctcgatgccgagacgatcgccgacgcggtgcagaaggagaacatgcgcttcgtgccagtcaagaccgacgagcaactcgatctgcaggctatgcaccgcgtgcgcactcgcctggtgcagcggcgcacggcactgatcaacgagatccgcgggttcctgctggagcgcggcatcatctttcccgcgaagccgattcacctgcgcaagcaacttccgggtgtactggaagacgcgacccagaacctgacgccgaggctgcgctggctgctctctgaacttgcggaggagtggaaggagttggaagctaggatcatcgctatcagcgacgccatcgagcggatcagcaccagcgatccactctgccagcgtctgcgccagatcccaggcttcgggccgctggtttcgacagcaaccgtggccgctatcggcaacgggtcgtcgttccgcaagggtcgcgacttcgcggcgtggctcggtgttgttccccgacagtactccacgggtggcaagacggcgctctacggcatgagcaaacgcggcaaccgttatctacgacagctgctgatccatggcgcgcgtgctgtcctgatccgggtgaagtacgacaccgcagggttggggcagtggatccacaagctggccgagcgtgcaccgcgcaacaaggtgatcgtcgcgatcgccaacaagctggcgcgtatcgcctgggcggtactcgcgaagggtgagccttaccgccatcagcccttggcggccgcagcgtagttcggccgtggaaaagacgctgcgcttggaaagcaaacaccgctttccactttcccaccgccgctgcggcggctggtgatcaaccagttctaccagggtctgcggaggaagaagaaggacgagaaaacagtcaaacggcgcgccggaaaacctgttgttgataacggtctcactgaccgagcgatttatcaggaccggcgcgcgcggatcatcatcgaggcccggagaatcgaatctccacattgaggccggatacatttgcgcagactgtcattccgtccatcactctacctcttgcagtccggcggcggaccataca

SEQ ID NO: 8276 - DNA, 1523 bp, unidentified
  source 1..1523: mol_type = unassigned DNA; note = element_cf8e1b3
  misc_feature 1..3: note = core
  misc_feature 4..246: note = LE
  misc_feature 247..1275: note = CDS
  misc_feature 1276..1523: note = RE
  misc_feature 3..220: note = bridgeRNA
cttatattatatttaacgcagttagctactgccaaagcccaagtggtatacttggaataagccactgtggattagttcatttcctccaatcgcttgacgatttccgaaagggtctaaccacagctttttgtttcaattggtaatgagtttgataacgcatagacgttttatctcgtctaaggtaacaaggcaaaaagttcgtggataaccaagtagacttgaaatactatatctggaggtactcccatgctttatgtgggcattgatgtcgctaaaaataaacacgatgttacagccttgaatgttccaggaaaaactgttcttaaaccactcactttttcaaataataaagctggttttgaactcttagatctgtcttttcgacagctcaaccaagactgtctcatcgctcttgaagatactggacattatgcctttaatctactgaacttcctgcatgaacaaggatataaagtttacacctacactcctttgctcatcaaggaatttgccaaatcattatcacttcgcaagactaaaacggataagaaagacgctcatggcatcgctcttaaacttctttctgaccccaatcgtgaacaatttcaacacgataatcggcaagtagaactaaaaatactggctagacatattcatcgtctcaagaaaaaacagtctgattggaaagtacaatacactcgttgtcttgatatcatctttcctgagttggataaaatcgttggaaagcattcagaatatacctaccaactcttgacatgctaccctaatcctcagaaaaggcttgaggcaggatttgataagctgatagaaattaagcgattgaccgcttctaaaattcaggatatcctctcagtcgcacctcgttctatcggaacaacatctcctgctcgtgaattcgaaatcatcgaaaacatcaaacattacaagaggctcattgacaaggcggaaaaatgtgtcaatgacttgatggctgagttcaactcggtcatcacgacggttactgggattgggaatcgtttaggggcggtcattttagccgagattcaaaatattcatgcctttgataatcctgctcaattacaagctttcgctggactggattcttctatttatcagtcaggtcagattgatttagctggaagaatggtcaaacggggttctcctcatctgcggtgggcactcatacaagctgccaaagcatgcgctcgcttttcacctgcttttaaggcctatcttaagactaagttagaataagaaaaacattacaatgtagccatcatccaccttgcaaaaaaacttatccgaaccctgttttatatcctaaaaaagagctgccatttgacgaacaaaaagtgatgtaatttctgaaatcaacacaggattacctttgaaaaaatggactttttcaagggctttttgccgtgctctaaaatcatcgccaaatcatcaaattgaaataagaaatagtttagataaaattattgacttttcttatagtttgt

SEQ ID NO: 8277 - DNA, 1388 bp, unidentified
  source 1..1388: mol_type = unassigned DNA; note = element_cf8e43a
  misc_feature 1: note = core
  misc_feature 2..69: note = LE
  misc_feature 70..1101: note = CDS
  misc_feature 1102..1388: note = RE
  misc_feature 1144..1383: note = bridgeRNA
caatggtatggaccccgccctccaagcgaggtgaaatctcgaacgctaactgcaacgaaggaggatatcatgcaggtcgttcgaatcggtctggatcttgcgaaatatgtgttcgaggttcatggcgtcgacagcctcggaaaagtcgccgtgcgaaagacgctgcgtcgcgatgcggtagcccgcttcttcgccaatctgccgcgatgtctggtcggcatggaagcctcgaacggagcgcattattgggcaagggtgctttccgatcttggccatgaggttcggctgatcagccctcagttcgtgacaccatacgtcaagtcgaacaagaacgaccggaacgatgcggaagcgatctgcgaagcggtcggccggccatcaatgcgttttgtgccgccgaagtcgactgatcagctggcggtccaggccgttcatcgaattcggcggcgtctggtcgccgaccgggtcagactcgtcaatcagattcgtggcctcctttccgagcatgggattgtcattgcgcgcgacatctcgcagctgcgacgcagccttgccgtcatcgtcgggaatggcgatgacggcctcagcggcatggtccgttcgctcatgcgagaattgcaggcagaaatggccgaaattgatgatcgcgttgcaacctatgaccggcggatacgggaaatcttccggagcagcgagcagtgccagcggcttggaaagatcgaaggcatcggccctgtgacggcaaccgccttgatcgctgccgtgggcgatagaacgtgcttcaagaacggccgccagttcgcggcgtggctcggcctggtgccgaaacaacgatccagtggagggcgggcccgcctgttcggtatcagcaaacgcggcgatcgctatctgcgcacattgatgatccatggcgctcgcgctgcgctcggcaaagcagccggcaagcaggatccccgaagcctctggcttggtaagctgcggcaaaggcggcatcccaatgtcgcggctgtcgcgctcgccaacaagaatgcgaggatcgtgtgggcgatgctctcgggcggcacattctacgagcacgcaccgtcggtgaaagcagcttgaagcgaagcgcaaacgaaggattaacagaaggaggtctcacctggcaattgcagcaaaatggcaggagatgatgaaacggtcattccgtcgcttcccgaacctggtgtgtggaccggcatggcttcggccaatgtctcggggccgatgaggtggaagcgcgcgaaaaatccatcggggctcgcggcgaagacgttgtccagccacataaagaagccggatatacgtcagcagttgtgaccgaggatcttgatccagccgacctgttgcaatcgggcggggtccatata

SEQ ID NO: 8278 - DNA, 1350 bp, unidentified
  source 1..1350: mol_type = unassigned DNA; note = element_cf9245c
  misc_feature 1..5: note = core
  misc_feature 6..237: note = LE
  misc_feature 238..1302: note = CDS
  misc_feature 1303..1350: note = RE
  misc_feature 22..221: note = bridgeRNA
cttttatttttactgagaatttagaaagtcatatattgttgttatacaagatgtattgactgttcgtgtgaggtcatggggggctaggtaaacaagatgttataccgtaaaaaaggaatggcccacacgattttattctcaggagtctgaacagtacttaaggccttaagcaagagcctggataaaacaaaagaatagacgaaggagaattaagtcgatacgattaaattctttattatggctatacaaaaacaatctgttgggatagatatctcaatgacaacattctcggcatgtctatgccagcggtcagaagacggggcgctaacattctcaaaagcggtaaacttcaccaatgaaactaaaggttataatcagtttctgcgttgggtaaaaagtgtgattactgttgggcctgaactcgtttttttgatggaagccacgggggtatattatgagaaactggcttaccatcttcataagataaacaagaccgtacacgtagttttgccaaacacatctaagcattactttgccagtttgaatatcaaaactaaaactgatttggttgatgcacgtgttttaagccggtttggagcagagcgggttcacaaaccctggctgccgccacccgctgctttattacagctaagaaatctgaccaggtattatgtacaattacaggaacagaaaaccgcccttggcaatattaagcacagtaaggacagttctcaggatgttcaaagctttattataaaaagcaataaaggtcttattacagagatcgacaagcagattgctaaatgcttatcagaaatcaaaagactagtagaacttgacaagcaactcaaagtaaagatcaaaaaattggcaacaataaaggggatcggtctgataaccatagttaccatcctggcagaaacgatgggctttgagcaattccatagtgctaaacaactggtcagttatgcaggttatgacgtagttcaaagggaatcaggaacatccataaaaggcaaaaccagaatatctaaaaaaggtaacaggtatataaggaacgcattgtatttccctgcaatggtagcttgcaggtataacacaacattaaaggaaacctatttaagaataatacaaaagaaatcatctaaaatggtcggacaggtcgcgatacaaagaaaattactcgtactgatatatgctatctggaagaatgatagcgagtttattgaaaactataaagcaggtagccccgaccataagaccgaggctacgcaagatagttcagctactgaacttctttgaattacaaaaatacttttttgtctatttatttggaattgataacagtac

SEQ ID NO: 8279 - DNA, 1178 bp, unidentified
  source 1..1178: mol_type = unassigned DNA; note = element_cf94f78
  misc_feature 1..2: note = core
  misc_feature 3..207: note = LE
  misc_feature 208..1155: note = CDS
  misc_feature 1156..1178: note = RE
  misc_feature 3..182: note = bridgeRNA
cttgtatggcaggacttgaagggaggaggagggacaaagcccgattctgactgttgacgcagtacagatccgtgggagatttcgcccctcctcctttcacccaagcgccgataaagaatgcatctggctaggaccgacgataggaacaagcctgcgcctctgggtgagcccttcaagtgctcaaaaccatatcccggaggaaattcaatggcaatgccggtttctgtcacaaagccgatcgtaggtgtggatgtcgccaagaacgaactggtgatctatcacgccgaacttgacctgcttgaagagattcccaacaacaaaacagccatcaagcaatggttgaaggccttgtcggggagcgttgctgtagccattgagtcgaccaatatctatcacctggagttcgccgatctggcctatgaggccggctgcgtgatttatatggtgggtggctatgaactcagccattaccgcaaaggggtgaatatccgcgccaaaaccgatgcgctggatgccaggctgctcgctcgctatctgaagaacgaaggtgatgatcttcacccttggaccccgccatcaccgctgtaccgccagctcttgagcctttttcgtcgtcgcgcagccttggttcaggcacgggtcggtctggtgcaaagctgggcgagtgaaccgctgctgaaatctgctttcgccgagcaagtgaagtccatgcaaaagcttgaagcgctggtcgaaaagacgattaacgatcgcctgaaagaagccggcttgctcggccagttgaagcgttgcctgaaagttgaaggcattgggtttctgaccggagctcgtttgctcacgacgtttcagcggggcgagttcagaagcgcggatgcgtttattgcctttctggggatggatttacgagtgtcgaagtcaggacaaaaagacggtcgccggagtttgactaaacgaggtgacccggaagcccgccggcttctgcacaacgcggccatgtcggccagccgaacgccagcctggaaaggcttttacgaagagcaaagagctcgaggcttcagcaccactcaggcgctggtgatactggcccgcaagcttgctcggatcgtattcgccctactgaaggggcagagcgaataccaaccaaaagccagttgagggcttcccctcaaccatagaat

SEQ ID NO: 8280 - DNA, 1438 bp, unidentified
  source 1..1438: mol_type = unassigned DNA; note = element_cf96d18
  misc_feature 1..2: note = core
  misc_feature 3..121: note = LE
  misc_feature 122..943: note = CDS
  misc_feature 944..1438: note = RE
  misc_feature 1186..1381: note = bridgeRNA
agatggggtattcggcttgcgcttcgtcttcaacggtgatgcaggaaggtgctgcgcttcgagctgatggtagaacgtggtctgttcaaacagccacaagcatcaggaaaggaagcgcagcgtgaaacactttatcggcctcgatgtcgcggtgaaacataccgccgtttgcattgttgatgaatccggcaggatttgccgcgaggtgaaggtcgtcagccatcccgacgatctcctcgccgtactgaaggatcctgccttgaatactgaacgggtcggtctcgaggcggggccattgtcgcaatggcttttcgaggagctggcgagcgtcgggttgccggctatctgcatcgagacgcgccatgtgaaagcattcctgaaggcgcagccgaacaagacggatcgcaatgacgcacgcggcatcgcgcaaatgatgaggttcaacctgtatcgcccggtgcatgtgaaaacgctcacgagccagaaggggcgggcactcctaacggcccgcaagctactgcaagggaaggcaatcgccatcgagaacgacatccgcggccttctgcgcaacttcggcctcaaggtcggtgttgtgggaaccgtgaagttcgaggagcgcactcgcgaactcgtcgaaggcatgcccgatctcgaagaaatcatggagccgctgctggccgcgcggcgggggctgcgtgccgaatttgctcgcctgcacaaaaaagtgctcatgatcgccaggaacgatacgacctgccggcgcttgatgaccgttcccggtgtcggcctcgtggtggcgctcgcctatgccgcaacaatcgacattccgcagcggttcagaaactccaaggcggtgggacccatcctggggctgacgccgaagctaaacgagccggggaaggcaagcgcgttggatgcatatccctatgcgaggacggcatgatgcggacgttgctctatgaggctgcacaaacgctgatcactcgcgtgacgaaatggtcgtggctcaaggcctgggcgatgacgtcgccaagcggcgcgggatgcgcaaagcaattgtcgcgctggcacgtcgcctggcggtcatcatgcatagcatgtggctggacggcgccgagttccgctggacaagggaaaccatagcgtcagccatttgatccaggaggccgaaagggagagagacagagagttccgccgccggcggacggacgtccttcgcaggacgatggatgaggcgagttcgctgagacactcgtactgattgcaacatgcgatcaagacgcttggtagattgtgccgcttcattctcctaaccccatattgggagggcgaaacgccgatcccggagagaagcaaggccctgcggaagacaatcaaactgccggagacactgaaagcttggtagcgcagcgcttgacctcaacacgccgaatagaga

SEQ ID NO: 8281 - DNA, 1421 bp, unidentified
  source 1..1421: mol_type = unassigned DNA; note = element_cf9716f
  misc_feature 1..2: note = core
  misc_feature 3..127: note = LE
  misc_feature 128..1147: note = CDS
  misc_feature 1148..1421: note = RE
  misc_feature 1187..1420: note = bridgeRNA
gaatgaaatgaacgcgtcccacttcgtgaccgagtgagcaaatcaaggtggatcctcactggccaacggcatcgatgtacccacgtggaaaacaggaagtttcccaaggcaaccggaggatccagtcgtgaatcgtacagcagtcggcgtggacatcgcgaaaaacgtgttccaggtgcattacatcgatcaggaaaccggcgagatcgtgaacaagccgatcaagcgggcaaagttccttgaacatttcgcgaaccgtgcgccgtgcctgatcaggatagaagcgtgtggtggtgcgcaccactgggcccggcaactgacgaagatgggccacgaggtgaagctgatgccgggggagtttgtgaaagcattcaatgtccgcaacaagagcgatgcggcggacgcccgggcgatctggctggcagtacagcagccaggcaagccggtagcggtaaaaactgagatgcagcaggcgatgcttgggctgcaccggatgaggcagcaactgctcaagttccgaacgatgcagaccaatagcctgcgaggactgctgacggaatacggcgaggtgatgagcaaggggcgaagcaagctggacaaggagataccagtggtgctcgaacggctcgctgagcgtctgcctgctgtgatcattgacacgtttcgcgagcagtggaacggactggcgaagctggacgaacaggtagcgcagattgagcgccgcatgcgcgagtggaagaaggaagacaaatcggtaaaggcaattggcgatattcccggcgtcggactgctgacggcaacggcggcagtcgcgatgatgggcgatccgaaagcgttcagttcggcgcgggagtttgccgcgtgggttgggatcgtaccgaggcagacgggttcgggcggcaaggtgaatctgcacgggatcagcaagaggggtgacacgtatctgcgcacgctactgatccacggtgcgcgtagcgtccttgagcacgcaaaggagccgggtgagtgggtcgagcagatgaagaagcggcggccaaagaatgtcgtggtcgtcgcactggccaacaagatggcgcgaacgatctgggccgtactggcccataaccggccataccggaaggactatgtcagcgtgaatccggcctgaatggctcacgcgatgtagaagatcaacgtttgacacggggtgaacgtcgaaaggttgcgcagcaaacgagtgtgatgacaagccaggtaggaccggggcccgccaagcctgaatcatttccagagcttcgagctcgtttgaggagtgaggcgcgggccagcggatttcatagggggccgtagcctattgggctgcaacaagcccggatatagagcagcagcccatcctgtctgtcacacaagcgagaactagcgcaaagggacgcgttcatata

SEQ ID NO: 8282 - DNA, 1580 bp, unidentified
  source 1..1580: mol_type = unassigned DNA; note = element_cf9a08d
  misc_feature 1..3: note = core
  misc_feature 4..248: note = LE
  misc_feature 249..1451: note = CDS
  misc_feature 1452..1580: note = RE
  misc_feature 8..224: note = bridgeRNA
tttcgtattatgaggtcagccagtttttactggttgaccatttttaatatggttctacgattacggtagccggggtagaacgtccctgcccgtggggcattgaccccgtacgctaaactgttcaccccctacttgtagaaacatgtttgaggctggttgggacgagatcccgtataacaagcgaagctatgatactacaagcaggattaggggttaccggcaaattatcttagaaaaggagcgatacaatgaatccagtcgttggtctggatgtatctaaaggggaaagccaagttcaggtatttttagacaagggtcagccatatggaaaaagctttagcatttcgcatactcgtgagggactagatacttttcttcactttctcaagaatgtagaaagtataactggtcaacaacctccggttgttctggagtcaactggacactaccagactccgattactcagtgtctagaagaacaagattacttgtatattcttataaacccactcatctcatatcaagcaaaaaaatcaagcttacgcaaggtaaaaacggatgcgattgacgcttatcatttatgtgagctgtattacaaggaggaactacaaccttataagaagagagggttacagctgttaaacctccataatctaacaagacagcatgactctctaactgatctttgtgtgcaagcaaaattacagttccatgccattttagaccaagtattccctgagtttagaactgtatttggaaacttgttttcgaaggtatctttgcacattttactggagttccctacctcggaagaggtcttaaaagctaaggaatctgaattgacgaaacgaatcgaagctatatgtatcagccgttccaacacttgggccgaagaaaaggcgaaaaaaataatggacgcagcaagtcgcaatccatttcaaaaagcagtgtacgaaagtcatttgatcagtcttgagatgtatattcgtatgattcttcaatatcaagagcatctgtccaatttggagcaacgaattgatgctctcgcatcagaaattgaagaatataagattatccaatctatccctggtatcggagaaaaaatcgcggcaacgattatctctgaaattggtgagatagagcggtttaatcaccctaaaaaacttgttgcctttgccggaatcgatcctagtgtgcattcttctggtaagtttactgcaaccattaatcgaatcacgagaagaggttccagcaggttgcgacatgccttatatatggctgtcctatgtggcatcaggagttcgcgcaataagaagctaaaagagttttatgacagaaaacgcgctgaaggaaagccgtttaaagtcaccatcattgcttgcgtaaacaaactgattcactggatttacatcctgttaaagcgtaaagagactttccttgatattgcttaataccaataagcaacaatagagaaaaagccttccatcacgacgttggatggttatttgccatgctcatttttagtataacaattaaacaaaacacgttttattgaaaaatgttgacatcctattagctgg

SEQ ID NO: 8283 - DNA, 1438 bp, unidentified
  source 1..1438: mol_type = unassigned DNA; note = element_cf9b509
  misc_feature 1: note = core
  misc_feature 2..451: note = LE
  misc_feature 452..1423: note = CDS
  misc_feature 1424..1438: note = RE
  misc_feature 10..233: note = bridgeRNA
ccgctactatcttcactcctcgacaatcgaggatttggccagctaggcccggcatgattctcgcccccagtcgcagtcatgatccggggggtgttgtcaccgggcctggtgggtggctggtgatcgctaataggggctcggccgcgatatcttgaggccgtccgtaacgtggatgccgagacttgccaccgatgttgcaggccaaaccgttcaacctgtaaaaccttcgatgcaagaaaaccaacaacatagctccgtcgacgtattcgtcggcgtcgatgtcggtaaaggccaccatcacgccgtcgccctcgatcggactggaaagcgcctgtagaacaaggcactgcccaacgatgaggtcaagctgcgcgccctcatcaccgaactcaagacgcacggccaactcctgttcgtcgtcgatcagcccgctaccatcggcgcgttgcccgtggcagtcgcccgtgatgaaggtgtcctggtcgcgtatctaccgggtctggctatgcgccgcatcgccgacctgcacgccggtgaagccaagaccgatgcccgcgatgccgccatcattgctgaagccgcgcgctcgatgccgcatacgctgcgctcacttcgattggctgacgaaccgctcgccgaactcaccatgctgtgcggcttggacgacgatctcgcggcacagatcacgcagaccagcaaccgcattcgtggcctgctcacccagatccatccggcgctagaacgggttctgggaccgcgcctcgaccatccggccgtgcttgatctgcttgagcgatacccttcacccgccgagctcgcctcagccagcgagagatcactcgccaaccgcctcaccaaactcgcacctcgcatgggcaaaagcttggctgccgaaatcgtccaggcgctcagcgaacaggcggtgatcgtgcccggtactcaggcagcaaccatcgtcatgccgcgtcttgcacagcagctcgcgtcctcgcgcaagcaacgcgaggaagttgaatgcatggttcacgcacaccctctttggccggtcctgaccagcgtgccgggagtcggcgtcaggactgccgccagactcctcactgaagtcgctcacaaagcgttcgcatcagccgcgcacctggctgcctacgccggcctcgccccggtcacccgacgctcgggctcatccattcgaggcgaacatccgtcccgacggggtaacaaggtgccgaagagagcgctcttcctctctgccttcgctgccctgcgcgacccaatctcacgggactattacgcgcgcaaggtccaacagggtaagcgccacaatcaggcgctcatcgctctcgcccgacgacgctgcgacgtgctgttcgccatgctgcgcgacggcaccctctaccaaccgaaacccgcctctactgcttgacgaatcacatagggg

SEQ ID NO: 8284 - DNA, 1160 bp, unidentified
  source 1..1160: mol_type = unassigned DNA; note = element_cf9dcc2
  misc_feature 1..2: note = core
  misc_feature 3..188: note = LE
  misc_feature 189..1148: note = CDS
  misc_feature 1149..1160: note = RE
  misc_feature 25..198: note = bridgeRNA
cttctgtatctccggtttgctatgttgcccccgtcagccgccttggccgaggttgctgacggggcggtgtatggcgtctgagccttgtgggtttgaccacgtttcctagcgagccagcaccgtctctcttcatcgtctcgaacagttgaatgtggccgcatcggaccacggagcagaaggaagagggtatgaacacgataacaccggaacggatcattggcatagatgtcagccgggactggctcgacattcattgtcttccgtgcggccatcggcagcgattgccaaatacgcacagagggcattcagacgttgtcgatttggcaatgtcgcgaggtgcattggtatgctttgaggccacaggtgggcaagaatggcggctgtgggccgctttggatgcagccgacgttacgacacgacaattgccacctgctcagataaaggccttcgctgccagccagggcacgcgggctaagacagaccggatcgatgcggagctcattgcgaggttcatggcattcaggcctgatgccgggcgctgtctgccgcatcaaaagctacgccttctcagagccttggtttcgaaacgcgggcaactcgtcgaaacacgcaaacgtcttttggcgcagatcaaggcgcatctgaaactggggtcggcggaaatattcgcagacacggacgccgagctaaagtctttgctggatcgtcagatcacggcgttggaggttcagatcgaaaccgccatcgccaccaatgaggatctgcatgaggcagctgaaatactgcgatccgttccggggatcgggcctgtcgccagttccatgctgatcgctgaaatgcccgaactgggccaactgccgggaggacaggcagcagctctggccggtctggcccctattgcacatgacagcggtgcgatgcgaggaaaacgcgcaattgcaggtggacgacggttgctgcggcacgtcatgttccaggctgccctcgtcgccagccatcacaacccggttctcaaaaccttcgcagaacgccttcgatccgctggaaaaccgcacaaagtcatcatcactgccgtcgcccgaaagctggttgcaatcgctaacgcactcgtcaaagcgcgtcagaaatggtcccctcaggtcacctgagaaatacagttg

SEQ ID NO: 8285 - DNA, 1520 bp, unidentified
  source 1..1520: mol_type = unassigned DNA; note = element_cf9fbf7
  misc_feature 1..4: note = core
  misc_feature 5..283: note = LE
  misc_feature 284..1492: note = CDS
  misc_feature 1493..1520: note = RE
gtcactagtgcaccctcttccgtgcgggcccctggatggggcttgtggtaggaactaggcggaagtcggggtgacggcttgggctggtcgccctttgtgggccttcatgacactgccgcccccggcttccccggaaccgtgaagcgatgacaaagggacgcgcgatcgagcgccggttagtgaccactctgctgtcggttcccttgcctccgtctggctcctgccctggactacacgcaggaaggcgacccggttgtcgcagcaggatgggccactgttcttcgtggggatcgactgggcgggggctgagcatgccgtgtgcgtgctcgaccacaccggcaagaagatcgccgcgttcaccatcgatcacaccgccgccggtttcggccggctggccgccaggctgggcagcctcggcccggccgagcagatcccggtggcgatcgagcgcccggacgggcgcctggtggacgcgctgctggaggccggtcacccggtgctgccggtcaaaccgaacgcgatcaagacctggcgcgaggccgaagtcctctccggcgccaaatccgaccccggcgacgcacacgtgatcgccgactacctgcgagtgcggatccaccggctgcgccccgccgcaccgttgtccagtcacaccaaggcactgcgcaccgttgtgcgtacccgtagtgatcttgtcgaggcccgtatagcggcgaccaaccagctcgccgcattgctggacgcgcactggccaggcgccaaggccatcttcgccaacatcgagtccgcgatcgccctggcgttcctgacccgctatcccaccgccgtctcggcggcctcgttgaccgagaagcagctggccgcgttctgcgccaaacaaggctattcgggcaggaaacccgccgccgtcctgctggcccggctgcgctctgccccggccggcacgctcgatcccgtggtgtccacaggagtccaggacgccgtgctcgcccaggtcggcatgcttaccgcgctcaataccgcgatcaaggccctggaccgctccattgccgagaagatggacacccaccccgacggcaaggtcttccgatcctttccccgtgcgggcaccatcaacgccgcccagatcctggccgaatggggcgattcccgcgccgcgttcgaccaccccgacgccatcgccgcactggccgggatcacgcccgtcaccaaagtctccggcaaacaacgcggcgtgtccttccgctgggcctgcaacaaacgcctgcgcctggccatcaccaccttcgccgacaacagccgccactccagcccctgggccgccgacatctacaaccgagcacgcgcctccggcaaggaccacccccacgccacccgcatcctggcccgagcctggatccgtgtcctctggcgctgctggcaaaaccacacgccctacgacccggccctgcacggcggcgcccaacaccggatgaaacagccgaccgcagcctgactttgatcttgaggttgacacaaggggt

SEQ ID NO: 8286 - DNA, 1492 bp, unidentified
  source 1..1492: mol_type = unassigned DNA; note = element_cfa8cf9
  misc_feature 1..2: note = core
  misc_feature 3..242: note = LE
  misc_feature 243..1472: note = CDS
  misc_feature 1473..1492: note = RE
  misc_feature 6..216: note = bridgeRNA
ctaatgggacctaccgggtcggtgatgggagagactcgggttggtagccgctggtaggtgagcactcagctgcgctggacgaggttgagtcctagcctcagaccgtgcccttgccagtggtcgggaggttgaccgctgatgggatgtcgtgccaggtgagcacttgaccattagcccgctggctgtcctcccgcgtgctgcccgatcgctgccggatcgctgccgacgcgggggaggacacggtgctgttcgttggggacgattgggctgaggaccatcacgacatcgagctcgtcgacgagaccggccggcggctggccacggcgcggctgggcgagggcgtagaagggatcaggcggttccacgcgctgaccgccgcgcacacgcctgaggacgccgagccagaccaggtcgtgatcgggatcgagaccgaccggggtccgtgggtccaggccctgctcgccgcgggctaccaggtgtacgcgatcaacccgatgcaggctgcccgctaccgcgagcggcactcgacctcgggggccaagagcgaccaaggtgacgcgcacgtgctggcggagctggtccgcttggaccgctcggcgcaccgtccggtcgccggtgacagcgacctggcggaggcggtcaagctcgtcgcccgcgcccaccagacgctgatctgggaccgccagcggcacgtactgcggctgcgggtggcgttacgggagttcttccccgccgcgctggacgcgttcgaggacctgaccgcccccgacacgctggagttgctgggtgccgcaccggacccggtccgcgcggcccggctgtcacgcgcacgcatccgtggcgcgctgacccgcgcgcggcggcgcaaccccgacgagcgagccggcatcgtccagtcgacgttgcgggccgagcacctcggtcagccacccgtcgtcgctggcgcgtacgcggtgatcgtgggctcgctgaccgccgtgatcagcaccctcaacacccagatcatcgagctggacgccgaggtggtcgcgcattttggccggcacccggacgctgaacgctaccgctcccagccagggctgggtgaggtgctgggcgcccgggtgctcgccgagttcggtgacgacccgcaccgctacgacgacgcccggtcccgtaagaactacgccgggaccagcccgatcactcgcgcgtccggcaagaaacgggtcgtgctggcccgctacgcccgcaaccggcggctcgccgacgcgctgcaccagcaggcgttcagcgcgctgcgcgcctcacccggtgcccgtggctactacgacagcctgcgcgcccgcggaatcggtcaccacgccgcgctgcgccagctcgccaaccgcctcgtcggcatcctccacggctgtctcaggaccggagccctctacaacgaggacaccgcctggccccaggccgtcaaccacgatcagcaggccgcagcttgacacctcaggtcatgggatgt

SEQ ID NO: 8287 - DNA, 1556 bp, unidentified
  source 1..1556: mol_type = unassigned DNA; note = element_cfaacf2
  misc_feature 1..2: note = core
  misc_feature 3..258: note = LE
  misc_feature 259..1434: note = CDS
  misc_feature 1435..1556: note = RE
  misc_feature 14..237: note = bridgeRNA
ctcgtataatatttatataataatttattaattattaacctattttaatttttatgtaatatactgttattagatactgtggattagtttttcctccctaccacttagatggtttcgtataggctctaaccacaggctctttattcatttgttaattagttagataccacatgatggttgatttagaacgaggttacaatcttaaagagttaccgtggtctaaaaacagtatcaaatcttttattcaaggaggcttgtatgattttagttgggattgatgtcgcaaaagataagcatgattgttatattatgacttctgaaggagaagtattattcaaatcatttaccattgctaatagtatggaaggttttaaccagctttatgagaagatattatctgttacagacaatttagataaagtaaaaataggacttgaagccacaggacactattcttacaatattttgggttatcttcttgataaaggtctgactccctttgttatcaatccgttacatacaaatctttacagaaaaagtcttagccttagaaagacgaaaacggataaagttgattcccgcaccattgcaagtatgttaatgtctgatgtgagcttaaagccctattcagatacattataccacaatgaggaactaaaatcactaactcgttatcgttttgataaagttcagcaaagagctagacttaaaacttctatttctaggcttgtaacaattcttttccctgaacttgaaaaattaataccaacattacatatgaaatctatatactcacttctttatgaatttccaagtgctaaagcaatatccaaagcacatttaacaaaactgacgaatttactttacgcgaattccagaggacattacggaaaagagaaagctgtttcaattcgtgaagcagcaattaactctattggctcatatatgcctgcaaaatctttagaacttaaacatacagttaaactacttaaagaattaacttcagagattgatgaaattgaacaagagattaaatctattattgataaacttaattctcctatccttacaattccaggaataggttactctcttggtgctcaaatcatagcagaaatcggagattttaaaaattttgactctcctgacaaaattttagctttcgcaggaatgtcgccctcaacttatcaatcaggtaaattgtattcttccaatgccaaaatggaaaaacgaggttcaaaatatttaaggtcaacattttttactgctgctgtatgtgtatgtcgtattgaaccaacctttgctttataccttgctaagaaaagagctgaaggcaaacattattatgtagctatttctcatgtagttaaaaaacttgtcaggcttatttttcacttggaaaaaacaggtgaacattatgccactttaacttaatttttcttgttttttaatactgtttaaaggttctaaccaaaccttatttttgtaatgcaattttttaaattaacaaattcatttaaaattttttatttttgacttgacatttaatagttagt

SEQ ID NO: 8288 - DNA, 1397 bp, unidentified
  source 1..1397: mol_type = unassigned DNA; note = element_cfc2006
  misc_feature 1..3: note = core
  misc_feature 4..89: note = LE
  misc_feature 90..1121: note = CDS
  misc_feature 1122..1397: note = RE
  misc_feature 1092..1384: note = bridgeRNA
agatggggtggttgccgccctccccagacggcatcacaatgtgccaatatagtggtgtttacagccacagagcggaaaggacggcaaccatgacgaaggatatgatgattggagtggatctggcaaagaatgttttccagctacatgctgcgacgatgacgggagaggtgctgttccggaaaaagctgtcgcggcatggattttacaaattcatggccaattaccctcctgcggtggtcgtcatggaagcctgtggcagcgcgcattattgggcccgcgagatgatccggcttggtcatgaagtgaaactgatcgcaccgcaatatgtgaagccgttcgtaaagcgccaaaagaacgacgcggcagacgccgaagctatagtgatcgcagcccagcggcccgagatgcgcttcgtcgagccgaagtcggcagagcaacaaggcagggccatcctgtttcgcgcgcgagaacggcttgtccatcagcggaccgaactggtcaatgcgcttagagcctgtctatatgaatacggctatgttgtgccgcaaggtgttcgccaaatcatacggattgaagccattctggatgagccacacagcaacttgcctgacctgatgcgcgaggaatgccgcgatctgctggaccagatcgccgccctgacgacacggatcgcggccagaacggccaagatcaagatgctgtcggcggaacgcggcgtggcgcggcggctgcaaacgatgcccggggtcggtccgctgacggcgctggccattgaagcttttgccccgccgatggagaatttccgctgtggacgcgacttcgccgcctggctcggtctcgttccgcgccagttttcatcgggcggtaaggaacgcctcggacgcatttccaaggcggggcaggcagatatccgtcggctcctgattatcggggcgatgtcgcgcctgaattggctgggccgtaaatcgatcccggaaggatcgtggttggcgcgaatggtggcgcgaaagccgaggatgctcgtggcgatcgctttggccaacaagatggcgcggaccatctgggccatgctaacaaagaatgaggattaccgggagccgacgcaggctgtgacggcataaacaacatgtcgcacaacctgctcggcaccgggtaaaggaggtgtgagaaggcgacgacccgaatgggcaaaatgatcgaaccgatctggatcaggaaaaccagcttagagtcgtgagcgtgaaagctcgggaatcagatttggacctgctccgcagatcaccataccggccagcggctttctggaaacgtcgcaagcaaaggcctcacagaagaccgcactcgatcacacgcacttcggagcagaaacttcttgcatcacgggcggcaaccacaga

SEQ ID NO: 8289 - DNA, 1159 bp, unidentified
  source 1..1159: mol_type = unassigned DNA; note = element_cfcaf0c
  misc_feature 1..2: note = core
  misc_feature 3..187: note = LE
  misc_feature 188..1147: note = CDS
  misc_feature 1148..1159: note = RE
  misc_feature 30..189: note = bridgeRNA
cttctgtatctgagtttcgctaaacttaccccgtcactgtccctggccagggacggtgacggggtggtgcgcgacgtctgacccttgtggcttgaccacgcttcttagcctgtcggcaccgcctctcttcatcgtctcggacagttgattgcggccgttcaggaccgcgcaccagaaggaagagagcatggacaatctatcacatggccgcgttatcggcatagacgtcagccgtgactggctggaccttcattgcctgcccgatgggctccaatgccgaatgccaaatggacctgaaggtcacgcggccgtctcggatcttgcccgcgatcgagatgccgtcgtttgctttgagtcaaccggcggacaggaatggcagctctgggaaacgctcgaggcagaaggcgtcatcgcccgacaggtgccgcctgctcaggtgaaggcattcgcacgaagccgtggcacgcgcgcaaaaaccgaccgaattgacgcggagcttattgcccgcttctttgcctttcggcccgatgccggtcgccgccttcccacagaaaagctgagatcactcagagctttgacctcaaagcgggcccagatcgtcgagatgcggaaacgtctactggcacagatccgcgcgcatcagaagcttggcacagccgagatgttcgacagcgtcgatagcgacctaaaggctcggctcgactgcctgatcaaagagttggaagacaggatcggggccaccctatccggcgacgtattgctggcagaaaccgctggtgttttgcgctccatccctgggatcggaccagtggccagcacagtgctgatcgccgaaatgcctgaacttggcaccataacaggcgaacaggctgcagctctcgtagggctcgccccagtggcgcaagacagtggaaccctgcgcgggaagcggaccattgcagggggtcgccgtgccctaaggcatgtgatgtttcaggctgctctggtcgccgcgcatcacaacccgtccatgaaggcgtttgcggatcgtttgcgaaaagcagggaaaccgcacaaggtcatcataaccgcggttgcccggaaactggtcaacctagctaacgccctgtgtaaaagccgccagaaatggaagccttccaccgcgtgagggatacagttg

SEQ ID NO: 8290 - DNA, 1757 bp, unidentified
  source 1..1757: mol_type = unassigned DNA; note = element_cfd9c5e
  misc_feature 1: note = core
  misc_feature 2..283: note = LE
  misc_feature 284..1525: note = CDS
  misc_feature 1526..1757: note = RE
  misc_feature 13..303: note = bridgeRNA
cctgttactatatatttgccccttgttcatggcagccagccatcggcatgggacatctcattgcctaagctgtagaataggaggggtaatggtctggcctgtcactccaaggacttgcatgtccgtgagaaagtcagtcagccagcctcctgttcgcagcattcgatttgtgcaggtagaatcatcggcgtccccgaagtgttcgcgtcatcaaacagatagaacaagcaatgggtaaagttggctgtgtccattacgaatctttctatcaggagtgttgaagatgaactcagtgggaatcgatgtttctaacggcagaagtatggttgcggttcttcgcccgcttggagaagtagtcagcgccccttttgaggttcgccatgattcagtgtccctgctctccctgtcccagtttctacagcagttggagggagaaagccgcgtggtcatggagcataccggacgatactatgaatccattgccaaatcgctccatgaggccggtttattcgtaagcgctgtaaatcctctcctcatcaaggagtacggcggcaattctctccgcaaggtcaagacggacaaggctgatgccgtgaagatcgccaaatacggccttgacaactgggcagaactgcgggattatacccccatggatgagacacgttacaacttgaaaacaatgcatcgccagtttcagctcgcatccaagaccaggactgctctgagtaataattttgttgcccttcaggagcaatccttccccggcatccgcaaatgttttgacagtccggttcgcagcgacggcacacagaagtgggtggacttcacttataccttctggcacgttgattgtgttcgcaaagtgagccttaaggccttcacggaacgctaccgcaagtggtgtaaaagacacggctacaacttcaatacggacaaggctgccgaagtctacgcgctggcaatgtccgctgttgtccttgtctccaagaatgagacaaccaaggtgcttgttcagcaggcagctgcacagcttaccagtatttctcgctctgtggaaacttaccgtgccgaaatgaatcggcttgcttccacgcttccggagtatccaatcgttatggctcagtatggcgtaggaacttccttcggcccccagctcatggctgagatcggtgacgttcgccggttcgctaggaagcagtccttggtggcttttgccggtgtagatcccgcgccgaacgattccggcgacaaaacttcacgcagcaacaaaaccacgaagagaggttccccttatctcagaaagacgttgttctgcttgatgagtacgatcttgcagaaatctcctgtagatgatccaatctaccagttcctggacaagaaacgttctgagggcaagccctactacgtctacatgacggccggcgcaaacaagttccttcgtcattactacgccaaggtgatgaactacctggacaccttggagaacgaagcgtcaggtaaagatcctcagcagccttcctgctgactgaggcggctttgccgccctttcctccccatttgcacaggtgacacaggctgtcaaggacgccgcaggcgcagcgaagctgtttatccttgactgactggggcagctgtgctatctaccgctaggccagcgtttactcggtggcctctttgtgctacctacctactcccttttctgttctgtaacctttttcggtcaagtccattttggggcttgactttttatttgcagg

SEQ ID NO: 8291 - DNA, 1364 bp, unidentified
  source 1..1364: mol_type = unassigned DNA; note = element_cfdc72b
  misc_feature 1..2: note = core
  misc_feature 3..75: note = LE
  misc_feature 76..1104: note = CDS
  misc_feature 1105..1364: note = RE
  misc_feature 1128..1361: note = bridgeRNA
ttaatgagatggtcagcccgatccctacccagcggactacgctgagtagggattttgcttttttgggaggccatcatgaatgtcgtgacgctgatcgggatcgatctgggcaaacacagtttccaccttcatgcgcaggatgcggcgggcagaatggtgtttcgcaagaaactcacgcgcagccagctgctggcccaactggcgaacgtccccgcctgcacggtggtgatggaagcctgcgccggcgcccactgggtcgcgcgccggcttgcggcgctcggtcacactgcgcggctgatctcgccgcagttcgtgaaaccctttgtgcagggcaacaagaacgacttcaacgacgcgcaggcgatctgcgaagcggccagtcggcccagcatgcgcttcgtgacgcctcgcaatgaagcccagcagacgctctcggccctgcatcgggtgcgtgaagggctcgtgcggcagcgtacggccgccaccaaccagatccacgccttcctgctggagttcggtatcagcctgcccaaggggccggcgatcatcaagcgcctgccggcggtactggccttgcaccccgatctacccgtgcgcctggtcgcggtgctcgagcgcctgcgggcgcacttcacgtatttggacgagcagatcaccgaagtggaacgggaactcgctcagcaattgaaggaggacgaatccagtcagcgcttgctggagatccccggcattgggccaatcaccgccagtgcgctgagcatcgaactgggcgatgcgcggcagttcggcagcagccgtcaatttgccgcctccctggggctcgtgcctcgccagtacagcacgggaggcaagccaacgctgctaggcatcagcaagcggggcgacaagaacctgagacgcctgctggtgcagtgtgcccgtgtgctcatgctgcgcatcgataaacgtgaggacagcctcgggttatgggtgcgcgatctgctcacccggcgccactcaaacgtggtggcctgcgcgctggcgaataaattggcgaggatcgcctgggccatcctcgccaaagggacgcattaccagtccgaccctgcggtgagcgccgcttgagcggatgaagatcgatttacccgaagtagcccatctggttttgcgacggtagaaagtgtgatgacctaaacggctcaacggcctggcaagaaacctgacatgcaaaacagcggacaacgctgagggctttttgaggtttgccaggcgcggctctcatcatggggcgggcagacacttgcctaccacgaccccggatagatttaagcaagcccactataggtcacgcaaatctgccttgcaaaaatcgggctgaccataga

SEQ ID NO: 8292 - DNA, 1495 bp, unidentified
  source 1..1495: mol_type = unassigned DNA; note = element_cfdf6ba
  misc_feature 1..2: note = core
  misc_feature 3..250: note = LE
  misc_feature 251..1474: note = CDS
  misc_feature 1475..1495: note = RE
  misc_feature 7..240: note = bridgeRNA
ctaatgagagtcagcgagtccggtcatacggcagactcgtcaccggtagcggcgggcaggtgagcactcttcccccctggacctgggagtcctgagaaaagatcgtgcccccgcccgtccgccgggagaacggaatcgctgatgggatgtcgtgcccgctccggcgtgagcactgcttcattagggcgctgatggttcttccgcacgctaccgaacgtggtcgagctcgaggacgatgggaggagtatcagtgcagttattcgtgggagatgactggtcggaagagcatcacgatgtcgagctgatggacgcggccggacggaggctgagcaaggcacgactgccggaaggggtggccgggatcgcgcggttgcacgcgatgatcggcgaccaactcagcgacaatgtcgacgagtccgaggtggcgattggaatcgagaccgaccgcggcccgtgggttgcggcgctggtggccgccggctacacagtattcgcggtaaatccgttgcaggcagctcggtttcgggagcgcagcggggtttcgggcgccaagagcgacgccgccgacgcccacatgctggccgacatggtgcgcaccgattcgcaccagttgcggccggttgccggcgacagtcccgaggccgaggcgatcaaggtcgtggcccgcgcgcacaagaccctgatctgggaacgcacccgccacacccagcggctgcggcacgcgctgcgcgagtacttccctgccgcgttggaggcgttcgacgacctcgacgccgtcgatgccctcgagctgctcgggaaggctccggacccggcctcggcggcgcgactgacacgcggtcagatcgctgcggcgctgcggaacgcccgccgccacgacatcgagaccaagaccgatcggatccaggctgctctgcgcggcgaacacctgggccgggcggcggtgatcactaccgcctacacggccaccacccgctccgccgtcgccgtgttgagcactctcaatcacgagatcaaggcgttgcaagggcaggtagatgcacattttggccggcacccggacgctgagatcatcctgtcccagcccgggatgggcactcagctcggcccccgggtactcggtgagttcggcgacgaccccgaacggtatgccaccgcgaaggcccgcaagaactatgccgccaccagtccgatcacccgcgcctccggcaaaaagaaggtcgtcgcggcccggttcgtccacaacgatcggctcgtcgatgcgctgaactcgcaggcgttctcggccctgcaggcttctcccggcgcccgcgcctactacgacaaacaacgcgaccgcggtctcgatcacggccctgccctgcggcagctcgccaaccggctcgtaggcatcctgcacggatgcctcaagacccgcacccgctacgacgaagcgacggcatgggcgcatcacgtcgagaaggctgccgcttgacatcccaagctcctgggatgt

SEQ ID NO: 8293 - DNA, 1362 bp, unidentified
  source 1..1362: mol_type = unassigned DNA; note = element_cfe00d9
  misc_feature 1..2: note = core
  misc_feature 3..39: note = LE
  misc_feature 40..1107: note = CDS
  misc_feature 1108..1362: note = RE
  misc_feature 1080..1350: note = bridgeRNA
tgatggggtggacgcccccggcggcatcgatgtgccaaagtggaggtgttgaacacaccacttgaggagccgtccaagtcggaagttataacaatcggccttgatatcgctaagaacgttttccacgcacacggctcagatgcgagcggtcgagcgctgttccgccgcaagatcagccgcacgacgttactggagtttttcgcacggcagccacggtgcctggtggcgttggaggcctgcgggggtgcgcaccactgggctcgcgaactcacgctgttgggtcacgaagtcaagctgatccctccggcctatgtgaagccattcgtgaagcggaacaagaatgatggggttgatgccgaggcaatctgcgaagctgcgcagcgtccgagcatgcggttcgtagcaatcaagagcgaggcccagcaggcatctgccctggtgttgagaacgcgcgatctgctggttcggcagcgcacccagttgatcaatgccatccgaggtcacctgaccgagtatggctgggtcgctcccaaaggaccgtcgcatgtagcggtgctgggcgacatgatcgagggcgcgatgggatcgtcactcccagaggcggccaagccgatgttccgaacgatgctcgatctgctggatcagttgaacactagatcggcgaactggacaaggagatcgcgcgtcgggcccgcgaggacacgatcgccagacggctcaagacgataccgggcgtgggcccgatcacggccaccgcgattgcggcccttgcccccgccggccgagaccttcgccaagggacgagactttgccgcatggctgggtctggcgcctcgtcagctctcgactgggggcaagcaaaagctgggatcgatcacgaagatgggcgagcgaacgttgcggcgcctcctcatcagcggttgcagtgcggtcgtcctgcaggcgagcaaacgtggtgcgtctgcaggctcatggcttgagcagatgatggcccgcaagccacgtatgctggtcaccgtcgcactggccaacaggacggcgcgcatcgtctgggcgctgctgttgaagcaagaggattacaaagctccggtcgcagctggggcgtaagccaaggcggaccagaggtcgtcggagacgtagtcggtcgaaggaaggcatggcacaacagtcggtgagacgggatcggaaaaccagggcttcccaatgtgccttgagcccgctgtgggtgatatggatccggtccgcgaactcccatacacgggcccgcagcctctggtgctgcatcagaggccggacagatggcagcatccgaccacgtgcaatccttcaaaaaccacttgcgtcttacggggcgtccacaga

SEQ ID NO: 8294 - DNA, 1592 bp, unidentified
  source 1..1592: mol_type = unassigned DNA; note = element_cfe61cc
  misc_feature 1: note = core
  misc_feature 2..127: note = LE
  misc_feature 128..1144: note = CDS
  misc_feature 1145..1592: note = RE
  misc_feature 1209..1561: note = bridgeRNA
gaacgaaagggacatccccatagcgtcccacccgcccgaggttatccctcaggcacagacggccgcccggtacgacgatggggttgcgaaatctcatcctccacccggctgacgcaaggagatgtccatgacgattctgtttctcggcatcgatctggccaagaacgtgtttgccctgcacggtgtcgacgagcgcggcaaacctgcgctggtgcgcccggccgtgcgtcgcgaccagttgctcgaagcggtggccaagttgccgccgtgcaccatcgacatgaaagcctgctcgggcgcgcaccactgggcgcgccgcttccaggagttcggccacacggtgcggctgatggcgcccaagttcgtcgtgcccgcccggatgagcgggcgccgcggcaagaacgacgcggccgacgcggccgcgatctgcgaggcgttgcagcgcccagcgatgcgcttcgtgccggtcaagtcaacgcaggcgcagtcgcgcctggcggtgcatacggcgcgccagggctgggtgtgcgcccgcacggcggtcatcaaccgcctgcgcggcgtgctcagcgagttcggcatcgtgctgccgctcaaagccgccacggtgcgcagccgcgccggcgagcagctcgacaccgtgcccggctgggtgcagaccgtgtgccgcgacctgctggccgaactgcagcgcctggacgagcgcgtggccgcgtacgacgagcacatccggctgatggcccaggccgacgaccgcgcccgcgctctcatggtcatgcccggcatcggcccgaccaccgccagcgcgctgctggccagcatcggctacggccacgacttcgccaacggccgccagctcgccgcctggatgggcttggcacccgaccagtacagctcgggcggcaagaaccggctcgggcgcatcaccaaggccggcgacgcctacctgcgcacgctgttcatcatgggagcgcgcgccgtgctggccgccgcagccaacaagcacgaccggctgagccgctgggccaccgcgctggccgagcgccgcggctattggaaggccgtggtcgccatcgccgccaagaacgtgcgcatggcctgggcgatgctcgccaagggcgaagagttcaagcccatggcctgaacacaagccgcgccgcccaagccaaccgccaacctcatcggagaaaggcgccctcgaatccgtttctgccaccgcgtgacgcctgcgttgatggatcaaggttggacctgcgcggggagtgctcgtttaactccaggcggcgccagtgatggcgaccgcggctaacgaatggcccttgcaggccgcgccgggccagtagcccggcccctcgtgtggtgcaggccggccaccggccgccctgcgtccgaactcggcccccgcgcgaatctttcatcagggcccgcggcatcgaacgctgcatcaaaggccggttgtagttgcgcagtccgcaccttggttcttttgccgtcaggtggcgcaatggcagcacaccgtcgaagtaccttgatgaatcggtgatcgattcatcaaggattcgttttgcttgaaagacggggatgcccttgta

SEQ ID NO: 8295 - DNA, 1381 bp, unidentified
  source 1..1381: mol_type = unassigned DNA; note = element_cfe70c4
  misc_feature 1..2: note = core
  misc_feature 3..126: note = LE
  misc_feature 127..1149: note = CDS
  misc_feature 1150..1381: note = RE
  misc_feature 1162..1350: note = bridgeRNA
acatggggtaatcgcgggagcgagctacctcgatcagcgatggtgcggagggtggctgttccccggtagatgaaggtgcgggctcacgacttgcagccgggcccatacatcggacggagaacagccatggatgaatatatcggactcgacgtctcgctgaaagacactgcggtatctattcgccgcggcggcaagcggatctggcgtggcaagtgtgcgtccgacccgcagctgctcgcggcattgatccgcaagcatgcgcctgctgcgaagcgggtggtgttcgaaaccggccgactctcggtctggttctttcatgcgctcaccgcagaagaggtgccggcgatttgcattgatgcgcgtcatgcgaaagctgcgctcgacatggcggcgaacaagacggacgccaacgatgcagacggtcttgctcatctggccgaggtcgggttctacaaggaagtgcgggtcaagagtttcgacagcatgcttgcccgcacactggtggcggcgcgaacccggttggtgcggatcggtaccgagctgtcgaaccagatcaggggcctgatgaagacgtttggcctcatcgttccggctgtcacgggcaccaggttcgagcataaagtgaaagagctgctcgcgggcaacgtcgaactggcccagatcattcggccactgctcgaggcatggcatgcagtacgacttcgcgctgcggagctcggacgcaagctgctcgccgacgcacgacgcagcgaggcttgtcagctactcatgacgattcccggggtgggcgtcgtgacggctacctccttcatcaccgctatcgaggatccgacgaacttcaaacattcacgatcggtgggtgcctgggtgggtttaaccacgcggcgctaccagtcgggcgaggtcgactatgacgggcatatctcccgtcgtggcgacagtcatctccgcgggctgctctatgaggccgcgaccgtacttctcacccgtagcaggtcagaatgcgatctgcgtaaatgggggctgcagctgcgcgagcgcctcggattcaaacgtgcagcggttgccgtcgcccgaaagctcgccgtcatcatgcacgcgatgctgagcacgggcgagccgtttagaggcgcgcacgttacagactgatctacccagctcgtcagcgtcgcaaggcgcacgagacgtcctgccgggacgtaggctggctcattccgcgccattcgttgcaccccttggctcctgcctgcggagtgcgtgatgaacattggaagagccgcccgcgaagccccatcatgcggcggcacatgccgaccgcgaagacgaccatgctcccggcaacagcatctcagaaattccttgcaaccgacgcgattagacg

SEQ ID NO: 8296 - DNA, 1475 bp, unidentified
  source 1..1475: mol_type = unassigned DNA; note = element_cfe7cb8
  misc_feature 1..2: note = core
  misc_feature 3..566: note = LE
  misc_feature 567..1448: note = CDS
  misc_feature 1449..1475: note = RE
ctcctcctcctacggggaatccacgcaaaacaagagaacgaataaaaacgagtattacaagagaaaaggaaataaacaagtaaggagagaaataagataagcccaaccacttcatggggataaaaaccccacttgaaaggctggctgtgaagcccctagaaaacaagaggggacaaaaccccgtgtaggaggttgtaaccaaatactctaggggccgaaacacttaacattatgcaagaaaaacaaggtattatgagagcaaaaaatatcttgagaaacgaataatattcaaccatggaattaaaggttatcaacaaggcctttgcaattcacaaagcaaaataacagcagcaaagggagaactggtagtaaatcaaggcaaatcaacagtatacatcaaggaagtaaaggaattcgagtacgacaacgagggaatagaagaactaatcaaattccttggcgaatacaaggaaggaataatagaggcgacgggagtatactacttccacctacacgaaaaactaacggaaaaaggatacaaggtaacagtaataaacccactacacttgtccgaaatactggggaaaaagaccgacaagctagacgcacaaagactactagtagcatacatgactggcgtaatcaagggatcatacataccaactggagaaataagagagctgagggaactaactagatatagggaaagcctagtagaaaaaataacacaagtgaagaacgagataaggaaaatattagaattagcaggatacaagatacaaccattagacaagaagggaagacaattactggagaaactagctaagggggaggaattaaacaaggaagagaaggacgagttgaaggagaggttggggagaaacttgaatgatgcggaaaaactagcgttgaaacaattagttgaactgttaaaaagcttggagaacatggttaaggaggttgaggacatgataatttccaagatccctcagcctgtggtcgagttgagcaagattccgggagttggtttgattagtgctgcaaccatttacgctgagttcggtgatgtttctcgtttttccagttctaaggctgctagggcttatgcgggttttgctcctaggactaagcagagtggtgagagcgagtctcacccgggtatgattatgggtaataagtatttgcgtagggttctctacttggttgctagggttgctaggggtcttgggccttttaacgagtattatgagaggcttgttgctaggggtaagagtgttaaacaagctacttgtgctcttgctggaaagcttgctagtatttgttatcacgttataaaggatggtgtttacaagggtgttgttaagaagagttttagggttcctaggggtaaggaagtcgatgttaaggacttcgacgtgggggatgcactggactcgttatccccgtaggtttgttagaggcatggcatgtaatgc

SEQ ID NO: 8297 - DNA, 1424 bp, unidentified
  source 1..1424: mol_type = unassigned DNA; note = element_cfe936f
  misc_feature 1..4: note = core
  misc_feature 5..207: note = LE
  misc_feature 208..1410: note = CDS
  misc_feature 1411..1424: note = RE
  misc_feature 1..194: note = bridgeRNA
ctccgtaagttgttgggcggcccgggagggccgggtgtggctcattgctgcttgccttcagtggcttccaaggagtggccgcccggctctccggggcgccctggctgctgattgagatgtgcgcgccgtgtgcggtcgctgattacggagatgacagcggggtgttcctcgggccgacggcatgctgtgcggaacgaggaggggcaagtgggcaagcgacctggctgcgtgtggtgcggcatcgacgcgggcaagggccatcactgggcagcggtggtcgacgagaccggtgccacgctgtggtcgaagaagatcgacaacgacgagtcggccatcctggccgccctcggcgagatcctcgacctggcggacgaagtccactgggcggtggacatctccggcacgtcctccgcactgctgctcgccctgctcgcggcccacggccagcaggccgtctacgtgcccggccgcaccgtcaaccgcatgtctggcgcctaccggggcgaggccaagaccgacgcccgcgacgcctacgtcatcgccgaagcaaccagacagcggcgggacttcgccaccatcgacgtgcccgcccagctggccgccgacctggccctgctgaccgctcaccgctcggacctggtggccgaccgggtacggatgatcaaccggctgcgtgacgtgctgaccggtgtcttccccgcactggaacgggccttcgactactccgcccacaaaggcgcgctggtcctgctgaccggctaccagactccggcggcgatccgtcgccgtggccgggcacggctgacggcctggctggccaaccgcagcgtgcggggcgccgacgatgtcgctgcgaccgcactcgaagccgcccgagcccagcagaccgcgctgcccggcgaggatgtcgccgcgcagatcgtcgccgacctggccacacagatcctggccctggacgaacggctcaagcggatcgacaaacggatccgcgacaccttccgcggccatccgcaggcagagatcatcgagtcgctgcccggcatgggcccgatactcggcgccgagttcgtcgtcgcggccggtgacctgacggcgtacgcggacgccggccacctcgcctcggcagccgggctggtccctgttccacgcgactccggccgccggaccggcaacctgcaccgtcccaagcgctacagccgccgcctgcgacgcgtcttctacctgtccgcgcagaccagcatcatccgcgaaggccccaaccgggacttctacctcaggaagcgcggcgagggctgcaaacacgtccaggccgtcatcgctctggcccgccgacgagccgacgtgctgtgggccctcctgcgcgacggacgactcttcacccccgccccaccggtcacgcaggcgccttgacttcgtcattgaga

SEQ ID NO: 8298 - DNA, 1371 bp, unidentified
  source 1..1371: mol_type = unassigned DNA; note = element_cfed46c
  misc_feature 1: note = core
  misc_feature 2..73: note = LE
  misc_feature 74..1111: note = CDS
  misc_feature 1112..1371: note = RE
  misc_feature 1129..1361: note = bridgeRNA
tatgggatggcccgcccttctcgcggcgatcgggtaagatcgtcgttggcacgacagagagaggagcggagcgatggatatcgtgattgtcggcatcgatcttggcaaaaactcctgcagcctcgcgggtttggacgccgcggggcgggttgttctgaggcgacggctgcgacgcgactcgctggaaaaatttgtcagcgggctcgggcgttgcattgttgcgatggaagcttgttgcggcgcccatcatctcgggcggattttcgaggcgcttggctacgaggtgcggctgatgtcgtcggaatatgtccgtccttacgtgaagtcgcagaagaacgacgatctcgacgccgaggcgatcgcagaagccgccacgcggcctacgatgcgtttcgtgccggtgaagaaccaggatcaatccgatattcaggcattgcaccgggcgcgcgaacgcctcgtgtcggaaagaacggcgctgatcaatcacctgcgggcgctcctcctcgagcgcggcgtcgtggttgcgcaaggccggcggaagctggaagctgcgctcgagacattcgccgatgaagagggtgacgtcggttctttgagcccgcgcatccggattctgatcgaagacatgcgggcggaatggcgttcactcgaccagaggatcgcgaagctcgacgccgagttcgttcagatggcgcgcgacgacgaggcagcgcaacgcttgatctcgattccggggatcggaacgatcaacgccacggcgctagtggcggcggtcggcaacgcaaaagcattcgaacgtggacgcgatatggcggcatggctggggctggttccacggcaaatgacgaccggcggaaagccgcgcctgcttggcatcagcaaacgcggcaatcgctatttgcgcaagaatctgatccatggcgcccgtgcggcattgccttacctcgtcgagcgtgagacgccgctggggcggtgggcgcgcggccttctggaacgagcgcacaagaacgtcgtcatcgtggccttggcgaacaagctggcccgaatcgcatgggcggtgttggcgcacggtcgtaaatacgacccccagttcgaaggaatgaccgcctgaaggaaaggaatagcccgagtggcgctcatcgcgggcgctcgggtcacataggtctgcgtgaggtgacagaagatggcctgacagtcgaacggtggcttgaaaacctgaacaattgaacggccgaaaaggccggcgtgattatgaagatcgagctgcgcggatctccatcttggccgggtcaaaagtccgagaccggatacgttgaagcagactgaccagagccagatgaaaaccacccttgcaggcgggcgggccatacg

SEQ ID NO: 8299 - DNA, 1404 bp, unidentified
  source 1..1404: mol_type = unassigned DNA; note = element_cfef1a2
  misc_feature 1..2: note = core
  misc_feature 3..82: note = LE
  misc_feature 83..1120: note = CDS
  misc_feature 1121..1404: note = RE
  misc_feature 1118..1391: note = bridgeRNA
tgttggtgtggacggccccccgacagcatcgatgtgccagaatgaggtcgtggaaagtgacctcagacaaaggagaccgtccgtggaccagattagccgaattgggatggatacctcgaagcacattttccagctccacggggtgaatgccgctgaagtgccggtcctacgcaagaagctgcggcgcaaggagatggtggcgttcttccagaagcttgcaccgacggtgatcgcgatcgaagcctgcggtgcgagccatcattgggcgcggctgctgcaatcgttcgggcattcggtgaaattgatcgcgccgcagcttgtcaagccgtacatcaagcgcggcaagaacgatgcggcagacgctgaagcgctttgcgaggcgatgagccggccgacgatgcgcttcgtgccggtaaagacggctgagcagcaagcggccttgatgctggtcggcgtccgtgaccggctgatccgcaatcgcacgcagttgagcaatgccatccgcggctatgccgccgagttcggcctgactgccgccaagggactggctcatctggttgtgctgctcgatcgtatccaagccgatgagagcctgcccgcccgggctcgcgagctgttcgcgatgcaggccacggaatatacccagctgcaggcgcaaatcgacgaggtcgatgccaagctcatggcctgccatcgggctgatgaatgcagccgacggcttgccaagatcccgagtgtcgggccgatcggcgcaatgctgctgcgaatgaagaccccggagcctgagctatttcgatcggggcggcagttcgcagcctggatcggcttgaccccgaaggatcattcgaccgcaggcaaagtcaggctcggggttatcacgcgagccggtgacgagggattgcgcagtgtgctggtggccggggcaaccgccgtgatccagcaggctcgacgcggcggaagggcgtcgccctggcttgccgagcttctcaagcgcaagtcgccaaagttggccgccgtagcactggctaacaaaacggcacgcatcgcgtggaagatgatgatgacaggggaaaactacgccgcaaaagctgcgcccgccgtgttggccggcgccgcctagagatcagccagacacggggagcacctcaactgcaaccgtgctgagccgatgtcagaacttgcaagatgatcagcagatggtgtgatcaatcgatccacgacacgggacactccgatagacccaatggccttctatttggccgctatgttgtttggaacccttgtcgcggaaaccatcttggccagcgttcacgtgcgagcgcgccagaaggccggacatatgggcgcaagcgatctgatcaaagcactgcaaaaacaccttgcgaggaaggggccgtccacata

SEQ ID NO: 8300 - DNA, 1442 bp, unidentified
  source 1..1442: mol_type = unassigned DNA; note = element_cfef84a
  misc_feature 1..2: note = core
  misc_feature 3..230: note = LE
  misc_feature 231..1427: note = CDS
  misc_feature 1428..1442: note = RE
  misc_feature 10..223: note = bridgeRNA
gctctaccttcttggtcgggttgatcgagccgttcgtagggttgggttgcccaggggtgctgggtgtggctttcaggcggctgccgtttcgtggcatacgacgcttcgccgcctggcaccccgcgacgactcggccgccgattaggaagtgcgaacaggtcgctgtgtagagcaatgccggcgaggtcgtccgtggcatgaatggcgcaagcacgaaggtcaggagcacgatgagccggatatgggcggggatcgacagcggcaagggccaccatcacggcctcgtcctgaacgcggagggcaagacgctcctgtcgcggcgggtcgtcaacgacgagcccgagctgctgaagctgatcggtgacgtcctggacctggccgatggcagtgagatcacgtgggctatcgacatgaccggcggggagcccgcactgctgctggcgctgctggtcaaccacggccaggaggtcctctacatgcccggccgcctggtcaaccgggcctccgacggctaccgcggcgagggaaagaccgacgcccgagacgcctacgtcatcgccgaccaggccaggatgcgccgcgacctgcgccccatccgccccggcgacgaagcaaccgtcgaactcaagttgctcacaggacgccgagccgacctggtcgaggaccgcacccgtgcggtcaaccgtctgcgcggcactttgctgagcatgttcccggccctggagcgagttctggacgtgaccaacaccggcccgctcaggctgctgacgggttaccagaccccggccgcgatccgccgggccggtgtcacacggctgacgacgtggctggccaaccgcaaggtccgcaacgcgagaaccctggccgaagccgccgtcgaggccgccgaacgccagcacacttccgtcgccggggagaagaccatcgccgagctggtccacaccctggccgaggaggtgatggccctcaacaagcggatcgccgaaatggacaagctcatcgagggccggtttcgcgaacacgaactcgccggcatcgtcctgagcatccctggcatcggcagcgtgctcggcgccgagttcctcgccgccgtcggtggcaccctggacggcttcgactccccggacgccctcgcggccttcgccgggctcgcccctagaccacgagactcgggcaaggtcagcggcaacctccaccggccgctcgtctaccaccgacggctccagcgcgtcctctacacctccgcgctgatcagcgtccgcaacgacccgaactcgcagaagttctacgaccgcaaacgcgccgagggaaagaagcacgtccaagccgtactcgccctcgcccgccgacgcgtcaacgtcctgtgggccctcatccgtgaccgccggtgctaccaagtcacacctccggctactaccgccgcttgacaaaagcattaggaa

SEQ ID NO: 8301 - DNA, 1351 bp, unidentified
  source 1..1351: mol_type = unassigned DNA; note = element_cff330d
  misc_feature 1..3: note = core
  misc_feature 4..84: note = LE
  misc_feature 85..1104: note = CDS
  misc_feature 1105..1351: note = RE
  misc_feature 1123..1338: note = bridgeRNA
ggatggtgtggatggctcctgcaccatcggcgtcataatgcgccatactgcagttgtcatgaactgcttgagaggaaccaccctatgaaagttacaacaatcggccttgatttggcgaagaatgtttttcagatccacggaatttatcaagatggagaagttgcgttcaaccgtgctttgagaagggcacaggttctgaagttcttcgaaagtttggaaccatgcctagtgggaatagaggcatgcggaacaagtcatcactgggcacgggagttgattaaactcggtcacgacgtcaagttgatcccgccagtctatgtaaaaccatatgtcaaaagaggcaaatcagatgcggttgatgccgaagccatctgcgaggcggtcactcggccaacaatgcgatttgttgaagtgaagacacctgaacagcaggcaatactggcggtacatcgaacccgtgacctcatcgtgcggcaacgaacacagacaatcaatatgctgcgggcgcaactggcagagtttggcattgttctacctcaagggatttatcatgcccttgggttcgccaagaattgtctaaatggagaacagacaaacctgcccagtgttgtcggtgatgtcatctttgagctgtgtgagcagctgctatttttacattcaaagatcaaccgctatattcgcgagatgaataaaattgcaaggcaggagaaacgtgttggcctgcttcggacaattccgggtgttggccccattaccgcttccgcaatcgttgcgacggttggatctggaaagcagttcaacaatgggcgggagtttgccgcctggctgggactgacaccgatcaacaaatcaagcggcggaaaagaacgtctgggtcacatctcgaagatgggggatcaatacattcgtcggttattggttctcggcatgacgtctcgaattcgctcgattagagcagagccggaaaaatttgatccatggtttgcagacatcctggcacgcaaaccagccagattggcagcagttgccatggccaataagaccgcacgaatgatttgggccgtgcttacccgcaatgaaccctacaaagtgagagccacataaacacagggatcaagaaatacaaaattgcaagaccaatgaaatgatggaaaaattgtcagccctaaaaccaagacaccccgtgctttgtccagaacgcttgctgttcgatgagcggaatgggacttggttggtggaaaccatcaaggccagcggccatgtgtgtcgcgtcaacaggccgaacacaagactgcatctgacaatcaatcaatcacaaaaaaggacttgcaaaaagggagccatccacaca

SEQ ID NO: 8302 - DNA, 1646 bp, unidentified
  source 1..1646: mol_type = unassigned DNA; note = element_cff8d6c
  misc_feature 1..5: note = core
  misc_feature 6..284: note = LE
  misc_feature 285..1553: note = CDS
  misc_feature 1554..1646: note = RE
taatccccatgccggtgcggcaaccggcacaaatagcgatgaaaacggagccgcaagatttccgttttctgctacaatgggcttgagggaggcaaactacaaagcacggtaggaggagttgcaagcagcaatcctgcaaggctgaatattaatcagtgcaagagtcgcctttcaagcacaaataagtggtcgtaagaggccgcacactaaggattgttttagcgattgcctaaatgtgtggcggctcagtccctgcctctctcaatcaagaagggagggtcgtcatgaaactcacgtatccggtttgctgtggcgtcgatgttcataaaacctttctcgtcgccaccatcatcaaaacggacgggcttgttccgaagtactacaagaagtgtttctctactttcagtcgtgatttgctcgctttcaggcaatggctccttgacaacgactgcaaggatgtctgcatggagagcacgggcaaatactgggttccggtttggaatatccttgaggatgccatccgtgtggttattgccaaccccaaatgggtgtctgccgtgaagggcaataaggatgataccaaggattccaggtggatcggagacttgttccgaatgggtcttgttcccggcagcttcgttcccagcaggaagatccgcgtgctccgcgagttcaccagataccgttacaagctcatctccatgcgttctagtgaaaggaatcgcttccagaatgctttcactgtgtgcaactcgacgctggatgccgtcttgtccgatatgtttggtaaatccgcagcggcgattcagaattacctcctggatacggatgtcgtaaacccggcttactgcgcgtccttgcttcaacgtgccgccaagaagaagtccgcagatgtcatggccgctgtcgagggcttcaagatgtccgccgagcagaaggagcgtgttcgcatcattcaggagcatttctccgatatcaacgccagagttgccagactcgacgctgaaatcaacaagttggtttccgaatacgagagccagatcgccctgctttgtaccattccgggtgttgaccgtaatctcgccattacgatcatctcggaaattggcacggatatgtccgagtttggttcctccaagcgtctgtgccgctgggcgggactgacgccgggcaacaacgagtctgccgggaaaaagaaatccgtgaaaatcacccgtgccggggtttatctgaagcctgcgctggtgcaggccgcacatgcggcggtcaagtccaccaagagcgtttacttcaaatccaagtacgagcatatatccaaacgcaggggcaagaagcgcgccatcatcgccatcgccagaatgatccttaccgccgtctttgccatgctcaagactggcgaggtatttcacccctgcgatttgcagaaatacgatatgcccgaacaactcaggcgcaggcaagtcgtttcttccgccaagaatgccgttaagcttctggtttcgctgggggtcttacaggaggattccgtttccctcgctgcgttggctggctagctccctcacaatttaacccgcccttatgggcttgtttgcattgcattctttctgacaaatccttgttttttgtcgtacttgatgttttcacac

SEQ ID NO: 8303 - DNA, 1515 bp, unidentified
  source 1..1515: mol_type = unassigned DNA; note = element_cffa4a4
  misc_feature 1..4: note = core
  misc_feature 5..244: note = LE
  misc_feature 245..1510: note = CDS
  misc_feature 1511..1515: note = RE
  misc_feature 31..214: note = bridgeRNA
gtcactagggcaccatccttccgacagggcctgctgagtaggttctgatcggaactcggcgagggccgggagacggcttgtgccggtcgcccttcgagggcctgcatgacaccgccgctcctggttcttgccggggctgccgaccggccacagggagatgcgccgtagagcgccggttagtgaccacccggcagtcagccccggccgtcgtcgagtcacgtcgctgccatgtgaaggagaaccgttgcccctcaacgtttctggaccgctgttgttcgtcggaatcgactgggccgcccagatccacgcggtatgcgtgctggacgtcgccggccggcagatcgctgtgttcaccgtcgaacacaccgacgatggcctggccgggctgaccgcccgcctggcccgcctgggcgatcccgagcagatcccggtggcgatcgaacgccccgacggccgcctggtcgacgtgctgctggcggccgggcatccggtcgtacctgtcaagcccaacgcgatcaaggcctggcgcgacggggaggtactgtccggggccaagtccgacgtcggcgacgcgcagatcatcgccgaatatctgcggctgcgtcaccaccggctgcacctggccaccccgtacagctcgcagaccagggcgctgcgcaccgtggtccgcacccgcgacgacctggtcgacatgcgcatcgccgcgaccaaccagctctcggcgctgctcgacgcgcactggcccggcgccaaggcgatcttcgccgacgtcgcgtcgcccatcgccctggagttcctgacccgctacccgaccgcccgccacgcggcgcgcctgggcgccaaacgcatcgccgcgttctgcgcccagcacggctactccgggcgacgctgcggcgagcagctgctggcccggctgcgcgccgcaccggccggcaccctcgacgacacgctgtgccaagccgtccgcgacgccgtcatcgccctcgtcgccgtcgtgaaggccatcgcgattgcgttgaaagacatcggccgcagcgtggtcacccacctcggtgagcacccggacggcgagatcttcacgtcgctgccaaggtcgggtcagatcaacgccgcccagatgctcgccgagtggggcgactgccggccagcctacgacagccccgacgcgatcgccgccctggccggcgccacccccggtcaccaaggaatccggcaagcaccgggccgtgcacttccgctgggcctgcaacaaacgcttccgcaaggcgatcaccacattcgccgacaacagccgccacgaaagcccttgggccgcaagggtttacgccgaagcacgcgcccgcggccacgaccacccccacgccgtacgcgtcctggcccgagcctggatccgggtaatctggcgctgctggatcgatcgaacaccatacgatcccggccgccacggcaacgccgcacgactgctcaagtccgggcaggcagaactgcttgccgcctgaggttgacatagggagt

SEQ ID NO: 8304 - DNA, 1626 bp, unidentified
  source 1..1626: mol_type = unassigned DNA; note = element_cffd0cb
  misc_feature 1..3: note = core
  misc_feature 4..277: note = LE
  misc_feature 278..1447: note = CDS
  misc_feature 1448..1626: note = RE
  misc_feature 13..256: note = bridgeRNA
cttatataatgtatttaggttgttaaaggtaacctataatcctttatcgattaaatattattcagttttactgtataatattgttattagatagagtgtactcgttccttccttgagatttaatctcgtacttgaaagagtgagtcctctaatcttttaactgtttacgaataagttagatgttgactctttcggggtacttcgtatataccataaggcagtaacgttattagattttgaggtgtctatctaaaatttatttcttgtgaggtatcaaatgttttatttaggtattgatattggtaaaaatacccatgttgcttctttaattgattctaagaaaaaagttctttttaaggctttttctttttcaaattccattgatggtgctgaaaatttaatctgcaaattagaacctttcaaaaatcaacttgaaattggtatggaagctactggtcattattggctaagtctatactcatatcttagtgaaaagaacttcactgttcgtgttatcaaccctatccaaactgacggttggcgacaaggtatagaaatcagaaaaagaaaaacagatattatcgactctcttttaatagctgatcttcttagatatggagatttcgttgaaacatcactttctaatgaagattatttatctttgagaaatctttccagatttagatcgtaccttgtttcttcaattggtgatcttaaaagaaaaaccattgctcttttagaccaggttttccctgaatatgcttcttccttcagtaatatttttgcaaaaacttcaaaagaaattctagcaaatttttcttctccttctgatttcgaagatattaattctgaagacttacagtcttttctagacaacgtcactatgaaaaaattcgctgctagaaaacttgaagagctttcaaaaaaagcttctaaatcttttggtgtaaatttctgcatggattcattcggtttacaaatcaaaatgctcataggacaaatttcttttattcaaaatcaggttttagacgtcgaaaaagaaattaagtccttacttgaaaaacttaattctccaattactacaatcccaggtattggtgctgttaacgcagctacaatattaggtgagattggagatattaaaagattttccaatccttcaaaacttgttgcttacgccggtcttgattccactgtttctcagtccggtaattttgaattcacctctaatcatatgactaaaagaggttctccttatttaaggcgtgctttgtttcaatctgctcttagagctgaattttgcgatcctgttttttctgattattatcaaaagaaaattacggaaggaaagcaccatctagttgctaccaatgctgttgccagaaagcttgttcataccatttttgctgttttaactaaaaatgaaccttaccaagtacaaagttagtttttgcctggttgcaaactaatttttgaaaaaattaatttaaaaggcaaatactttgctaaccctgtttttaaattcttgaactccagggtattttttcatgcttatttttattcagtttttaacaatatcaatcattatatttttttcattttacctcttgacttttaatagttagt

SEQ ID NO: 8305 - DNA, 1451 bp, unidentified
  source 1..1451: mol_type = unassigned DNA; note = element_d00c77e
  misc_feature 1..2: note = core
  misc_feature 3..223: note = LE
  misc_feature 224..1435: note = CDS
  misc_feature 1436..1451: note = RE
  misc_feature 1..212: note = bridgeRNA
ccttaccttggttggaggccttgagataggctcttggctgaccgtccaacatggcgggcagggctcaagtcccctgccactttgatggcctggggggtgttgccacccgccgtgttcgggttcagttgacctctgacaggaacatgcacttcggggctggttcgtaaggtgattgatggcggctgaatctgtgtgcggtgcgtgtcgatgatcggaggatctcatgccagagacagatatcagagtgttcgtcggggtcgatatggccaagatggaacacttcgctcatgccgtcactgttgagggcgacgagctattcgccaggtcggtgtccaacgatgagacagcgatcgagcagatgatcgatgacgctgccgaacatggccacaccgcagtcgtggtcgacatgactgcttctggtgctcagctgttgttgtcagttgctgcccggcgtcaggtgcctgttgcgtatgtgacagggctccagatgcgtcgtgctgctcagctctatgccgggtctgccaagacggaccctcgagacgcgtgggtgttggcggactatgcacggcgccataccgatcagcttgtttggctcgatgtgtctgacgagctgttgatacgactccgcgtgttgaacggacgagatgttgatcttgccggtgacgcgaccagggcacggaaccggactcgtgacgcgttggtcgctgtttctcctgcgttggagcgggttgttgggccgagactccaccaggccggtgttcgtgacgtcatcacaaagtggtcgacacccacgacgcttcgccaggcgggcaagacacggatccgcaacacgatcaagaaacgatcgccacgactcgcagacaaagtcacggacgagatctgggcagcgctcgatgcccagacggtgacgttgccagcagaggtcacgtggggagacgtcatctcggatctactgagtgacctcgaacgcatctcgggtcaacgcgacgaactcgaaactgtgatcgacgaggtgtttctgtcacaccctctcggaaaggttctggtaaccctgtgcgggttcgggcccagaaccggagcacgaacccttgcagagatcggtgacccaaacaggttcgcgacagggtcaagactcgcgtcatatgccgggctcgcaccgatcgactggcgatccgggacctcaactagcgggtcattccacagccgaggcggcaaccaccgtctcaagaacgcaatgttcctcgccgcgtttgtcgccacgagacacgaccctgacgccaaggcctactaccaacgcaagcgagatgaaggcaaaaagcacaacgccgctgtcatctgcgtcgccagacgtcgatgcgacctcatccttgcaatgttgaaaactgcaaccgactacgacgtcaaccgtcacacagaactacagaaagccgcttgacaacaagacaggaaca

SEQ ID NO: 8306 - DNA, 1567 bp, unidentified
  source 1..1567: mol_type = unassigned DNA; note = element_d00de73
  misc_feature 1: note = core
  misc_feature 2..284: note = LE
  misc_feature 285..1331: note = CDS
  misc_feature 1332..1567: note = RE
  misc_feature 72..295: note = bridgeRNA
cagggaggatgtgggtagtgcttctgatcctgcttctccgctccggccctgcttccgtggttctgggctggtgggggcgtagtgtccggagcactgggtcccggcctgacctccgaatcggccgacgccgctcgggctgtcctgctaacgatttgtcggccgggccccagcttttttaggcacccaccggcgctgccggtctgatctgcctggcctggctagaggccggggttcacaggtccgggcggccagcgggtgcgtgccatccctcacctcagaaagggatgacagtgaccattgtagagacgcgtgccatcacaggcggcgtggacacccacgccgacgcccacgtcgcggccgcgctggatcccatcggcggtctgctgggcgtccaggagttcccggccacggcggccggctatgcccagctgctggactggctgggcgcgttcgggacggtgtgcctggtcgggatcgagggaaccggcagctatggcgccggactggcccgccacgtcacaacggccggtgtccgggtagtggaggtggaccgcgccgaccgccaggaccggcgccgggcgggcaagtccgacccgctcgatgcggtgagcgcggcacgggccgcgcagtcgggccgggcccgcggcgcgccgaagggccgggatggcacggtggaggcgatccgggtgctgatggtcgccaagcgcagtgcccgcgccgagcggacccagaccatcaaccaggcccgggcgctgatcttgaccggcccggaggacctgcgggcccggttctcccggcatgacccggcggacctggtcgctgagctggcggcgctgcggccccgccccggcgacgtcgtcggctatgccacccgggtcgcggtgcgcgaactgggccggcgcgccgggttcctcgatggccagctcaagcgcctggacgagctgatcgtccccctcgtcaccgcccgcgcccccggcctgctcgccctctacggcgtcggcccggacaccgccgcgctgctcctggtcgccgccggggatcaccctgaacggctccgctccgaggccgcctgggcgcacctgtgcgccgtcgccccgatccccgcctcctccgggaaggtctcccggcaccggctcaaccccggcggtgaccggcaggccaaccacgccctgtggcggatcgtgatcacccggatgagctctcacccgccgacccgtgcctacgtcgcacggcgcaccgaagaaggcctgtccaagaaggagatcatccgctgcctgaagcgttacgccgcccgcgagatctaccctcaccttcgcgcggccgccggctaacgctcattctccggggacggcctggcccgctaatcggctgccgcgcaccgctggcctgctaacgattcgccggccgtccccgggctttccacttgacctgctgggcgtgacctcataagagcttgccctcatccgagcggcccttccctgtcttgtccgcaatcccagccactccagaatgccggaaatgaaacaaagaaaatgtcacacgagacccttgacaagcataggagcat

SEQ ID NO: 8307 - DNA, 1383 bp, unidentified
  source 1..1383: mol_type = unassigned DNA; note = element_d00e0f2
  misc_feature 1..2: note = core
  misc_feature 3..84: note = LE
  misc_feature 85..1110: note = CDS
  misc_feature 1111..1383: note = RE
  misc_feature 1087..1370: note = bridgeRNA
tgatggcgttgatgcccccacctacgggcatcgtaatgtgccacagtgatgtttcagaaagcatcactcaaagggagagcatccatgtcagaagttagtataatcggcatagaccttgcaaagcgcgtgtttcagcttcacgggacttgcgcaaacggagcagttatttttcgcaagaagttgacgcgtgttcagcttcttgcgtttatgagcaaacagcccgaatgcactgttgcgatggaggcctgtgcgacagcccattgctggggccgcgagattgagaaactcggccatacggtccggctgattgcaccaaactatgtgaagccgtttgtaaaaagacaaaagaacgatgttgctgacgctgaagccattgttgaggcggtctcacggccaacaatgcggtttgttgagttgaagtccgaggcccagcaggcgcgtgccatgctgtttcgtacacgacagatgttcatcggtcagcgcactcagacgatcaatgcactgcgaggccatcttgccgagcacggcgttgttgcaccaaagggagccatccacgtcaaacgcttggccgacgcagttgaggatgagaccataggcttgctcgaagacgtccgagaactcgcccaagtgtacctcgcccagatcgaaggtctcaatgttcaggttgcagcgctggatcagaggatgaagggtgctgccaaagaagctgaagcggcacggcgggcccagaccatgccaggcgtggggccaatcacagccttggcaattgagaccttcgcgcctggtctgaactgctttcgccgaggtcgggattttgcggcatggctgggcttggttcccaaacagaactcgacgggcggcaaacctcgccttggtaaaacttcgaagatggatcaacgcgacattcgccggttgttgatctcgggtgcaatggctgttcttcaagctgttgagcgatttggaacgccgcataacacttggctgatcgccatgctggaacgcaaacctcgtatgcttgttgctgttgcactggcgaataaaatggctcgcagtctgtgggccatggtaacgaaacaagaggactaccgaattccggtagcgatggcatgagcgtaatgcgacaggcatcaagaactggaacttgagtgtgtgaggagatcaatgaacagtaagggaaaatgatcggaaagatccggaccagataaagcagtctttgtgcaggagcctatgagctcgatttgttgatctgcctttggttcgcgcatcgccataccggcccgcggctgtatcaaccgctgcaacgagaggcctgatacatgaccgcatccgatcacacactcaaaccgttcagaaatctcttgcaccaacgggggcatccacaca

SEQ ID NO: 8308 - DNA, 1427 bp, unidentified
  source 1..1427: mol_type = unassigned DNA; note = element_d013fc6
  misc_feature 1: note = core
  misc_feature 2..69: note = LE
  misc_feature 70..1107: note = CDS
  misc_feature 1108..1427: note = RE
  misc_feature 1205..1421: note = bridgeRNA
taatgggatggtccgccgccgatccagatctcggacctgggatataaaaggcgcagggaggtggcatccatggaactgcatttgatcggcgttgacttgggtaagacggtatttcatttggtgggattgaacctgcgcggcgaagtggtggtgcgcaagcagttttcgcgtaaacagttgctgcgatttacagcgaacctgaaggtcgatcgcattggcatggaggcttgtggcggatcgcactttttggggcgcgctctgcgagagcaaggtcatgatgtacgcctcatgccagcccagtatgtaaaaccctatgtcaagacgaacaagagcgactttatcgatgcggaagcgatcgcggaggccgtgggacggcccaacatgcgctttgttccgatcaagaccgatgagcagttggatctacagtccctgcatcgagtccgtgagcgctgggtcatgcgacgcacggccatcgtaaaccagattcgcgggctgcttctggaaagaggaatcaccttgcgcaaaggcagacgccatttggatcatgcactgccggggatccttgaagatgccgagactaaattatccggcgcgctgcgctttttgcttgctcaactaaaactcgaactggatcagttggccgaacgcatggatcaggcagacgcggctatcgcacagggcgtgcggcagagtgaagcctgccggcggttaatggcaattccgggagtcggaccagtcaccgccaccgcgatgattgcgtctatcggcaacggatcagcattccgcaaaggccgggagttcgcggcttggctggggcttgttccgagagaacattcgactggcggcaaacagacgctccttagcataagcaggcgtgggaacgcttacctgcgaagattattcatccaaggtgcccgggccgtgttgcaacagaagatgaaacagtcatctgcactgagcgcttggctcatccagctaacggcccgcagccaccccaacgtcgtcgccgtggcccttgcgaacaagctctcgcgcatggcttgggcggtactggcgaggggagaagcttatcgaactcctgcagccatgggtgttgcggcagtctgactggcctgcaaatgacgcttggctgaggccaagcttggaaatcgctccgcgattcccacattcgcagcccagcggctacggattttatgttcttctacccggtttgcttgcgaacacaagatgacacaacggtccaacccggcgctttctaaacctgctgtgggaaaaagtcttcgaaggctgaccacttaaataggaagagagcgcagcgcattccatcctggccaggagcacagtgctccaagaaaggccgaatacatttgcgcagacctgcctgtcagcttcatttttcgcttgcgaagaaggcggcggaccataca

SEQ ID NO: 8309 - DNA, 1393 bp, unidentified
  source 1..1393: mol_type = unassigned DNA; note = element_d015127
  misc_feature 1: note = core
  misc_feature 2..92: note = LE
  misc_feature 93..1130: note = CDS
  misc_feature 1131..1393: note = RE
  misc_feature 1160..1385: note = bridgeRNA
taatggaatggacgcccccgtccgaagcggcattgccgtgtcaaagtggtgaggctgtcgaaacaccaccttcaccggaggagggcgtcaccatgaacgttactacgatcggcattgacctcgccaaggacatcttccaggtccacggcgtgaacgagcacggcaagccgatattgaggaagcaactgaaacggcaccagatagtcgcgttctttgcgaaccttccagggtgcctcatcggcatggaagcctgcgccagcgcccacttctgggcacgcaagctgcagacgctcggccatacggtgaggctcatggctccccagttcgttaaaccctatgtgaagacgaacaagaacgacgttgccgatgccgaagcgatctgcgaagcggtggcgcgacccaacatgcggtttgtgcccatcaagaacgtcgatcaacaggcggttcttgcattgcaccgagcccgccaagggttcgttcgggcgcgtaccgcgcaggccaatcagatccgcgggctgctgggggaattcggtttggtgatgccgcgggggatcaccagcattgcccagcacgtacctcagctcatcgaagacgccagcaatgaactgccggggtcattccgtctgttgatacagcgcttgacggaccacttgaaggaacttgaccggcaggtcgcagagatcgagacgcagatcaaggcgtggcatcacgcgagcgacgccagtcgccgactggcagagattcccggcatcggcccgattacggccagcgctctggttgcctcgatcggcgacggcaagtgcttcagcaatgcccggcaactggcggcgtggttaggtctggtacccagacagcattcgagcggaggcaagccgacgctgctgggtatcagcaagcacggcgatacctacctgcggacactgatggtgcacggcgcgcgggctgtcgttcgctattgcgccaacaaggacgatgcgttctcgggctggcttcatcgcttgctcacgcgccggcacaagaacgtcgccgtggtggcagtggcgaacaggaacgcccggattgcctgggcgctgctcacgcaaggcactgcgttccgatcggattacgcgccgtccgcggccgctgcgtaatccgatcgggtttggttaaggctctcccaggaggttgcttgggcaatcgtgacgtgatggcaagacaggttggaccgggatcggaatactctgccctcccacaggcgcttcgagcgcgaggtggtgattagagtccgatcagctgattccatcagggacagaggcgtctcgctagcctcctgaacagtccggatgtatggccgcaatctcaatctatctgccgatcgtgtacggctgccttgcaaaacgggggcgtccatgta

SEQ ID NO: 8310 - DNA, 1317 bp, unidentified
  source 1..1317: mol_type = unassigned DNA; note = element_d022462
  misc_feature 1: note = core
  misc_feature 2..72: note = LE
  misc_feature 73..1095: note = CDS
  misc_feature 1096..1317: note = RE
  misc_feature 1107..1316: note = bridgeRNA
atggacacctccccaaaacggcttcagtgagccatgctgaatacatcagcaaaaatatgacagaggtgtccaatggaacaagttatcggaattgatctggtaaagcgagtgtttcaattaaatattgtgtctccactcggaaaaacaattaaaaatacggtgattatgcgtgagaaactcactgaattcattgctcaacaacccccttcaaaaatcgtgatggaggcttgtggcagcgcaaattattggagccgccaatttaaacgctttggtcatgaggtgaagcaaatcagcccccaatatgtctccccgttcagaatgggcagcaagaatgataaaaacgatgctgtggctattgtggaagccgaccgtcgtccgggaatgcgttatgtcccggaaaaaacgcaggaacaaccggatattcagtgtttgcaccgggttcgccagcggctcatgaaaaacagaacggcactgattaatcaaatccggggactgggcttagaatatggcattgccataccggaaagtgcccacaaggttgagcaatgtttgcctgactatctggaaaacgcggaaaatgacctgacgccgttgagccgtgaattatttcaggaactcttgcgtgaactcaaagaacaacagcagcgcctgaacgtgctggataaacgcctcgaccagctgaatgcgcaacaagaagatatccgtcgtttgctaacactgccgggtatcggcccgttgggggcatcggctctgatggtcactttgggcgacagcacgtacttcaaaaatggctgccattttgccagttatctggggcgggtgccaagagagcatagcagtggtggtaaagtcaggttattgggtatcacaaaacgcggggatagctatttgcggggaatactgatccacggtgcccgttcagtggtgtatcgggtacaaaaactccccgacgaacaatgtaatggattacaacgctggttaaaaggcgtgatagcccgcagcgggagcaataaagcggcagtggcactggcgaataaaaatgcccgcattgcgtgggccttagttaaccaacaatcggtttatgaagcacggtgaataagcaataactatgcaatagaattccataagttgatgtactgacaggtagtaccgactctctgtgaaccgggtaaataagatagtctgtcaaaggccgttgaaataatgagggcagagagtgcggattttcatcagggttcattgagaagccgaatatatgtttgcgactacttttgtcagaaaatatgtcaccaacttgaattcagtcggtgtccatat

SEQ ID NO: 8311 - DNA, 1426 bp, unidentified
  source 1..1426: mol_type = unassigned DNA; note = element_d02b345
  misc_feature 1..2: note = core
  misc_feature 3..132: note = LE
  misc_feature 133..1164: note = CDS
  misc_feature 1165..1426: note = RE
  misc_feature 1188..1424: note = bridgeRNA
agatggcatggatgcctccccctacacaggaacggcagcggggagtttcagaagggagtcctcgcttgaaccggacggcatcaaggtgccaaagtggaaatttacccacgcgaaggacaaggaggactcatcatggagattacaacctatggactggatttggcaaagtcggtcatgcagttgcactgggtagatatggagactggtgaaatccaccgcaaacagttgaagcgccgtaggctcttggaattcttcgccaaccgccaacccggcgtcattgccatggaggcctgcggaagtgcgcactattgggcgcgcgagttgctaaagctcggccacgaggtgcgtgtgatagccgcgcagtttgtgcgccccttcgtgaaaaccaacaaaaacgacgcagccgatgctgcggccatctgggagaccgtacaacggccggacatgcgcttcgtggctgtcaaaactgaggaacagcaatcggtcctggcgctgcaccgcatgcggtcacaactgatcaaggtccggacgatgcaggtgaatcagatccgcggcttactttacgaattcggtgccgatttgccgcaaggtcgccaacgggggctgaaagaggttccagacgctttggccaatctggaaaactctatatcgcccatgatgctggacacgattcgccagcaattaaaacgccttgaagagatggacaaggatattgcagagatcgaaaagcgtttgacgctgtggaagaaagaccaggaggcagtgacgcgattgatggccatccccggcgtggggctgcttacggcaaccgccatcatcgccaccgtgggggatatgaagtccttccgttcaggacgggagtttgcggcgtttctggggctggttccccgccagagtgggacaggtggcaaggtccggctgctgggcatcagcaaacggggggacacctatctgcgatctctgttgacccatggggcacgggcggtagtgaacttccagatcaagaaccggaatccctggatcgacaagctcctcagccgacggccacacaatgtgacggtggtggcattggccaacaagatggcccgaaccatctgggcactgctagtgaaaaatacagaatatgtggcaagtcacacaatgaatgcggcttccatatcgtaactgttacagaattgttgaagttcaacaaaaggagttgcgcaggctgataaacgattgatggcaaagcaggtcagaccacggaagagagagcctggcagtcacttgtccttcgaggacgtgtcacagataaggacttttccggcggattccatcggggccagcaggcttatcatcctgcatcaaaggccggatataagacagcaacccgacctcaacatgccagacatcaaaatcatcttgcacacatggaggcatccatata

SEQ ID NO: 8312 - DNA, 1406 bp, unidentified
  source 1..1406: mol_type = unassigned DNA; note = element_d0367fd
  misc_feature 1: note = core
  misc_feature 2..314: note = LE
  misc_feature 315..1391: note = CDS
  misc_feature 1392..1406: note = RE
  misc_feature 10..308: note = bridgeRNA
ctgtgagtcttggtagtggctggtctgggactggctggcagagtaggtgttggcctctccatcccgtgatcgtgactcaacctggcggtgacccacccccttttggtggtgtcttcgggccgatttgtccgatcagatgggtggtgcggccggcaccgactcggcccacctcggtaacttgatcagaaggttgtccgccccttgccaggggcgtgactcatcacagtgttgttccgaagtgacctcttcccggaccggtaccggccgcaagcggccgcacaacctatcggtcaaacagggagcttcgaaccgccatgtccattgtcgcgcacttatacagtttcttcatcggcgttgatacacacgccagaaaccacgtctacacgatcatcaccaacaccggcattctcgttgaaacccgttcctttcccacgtcgcgggccgggatcaaacgagccatggcctgggccgggaggcgcactgacggtgacctcgactccctctgggtcgttgagggtgctgcctcttacggggcggtgctgaccgggcatatcgccgcggccgggtactcggtcgtcgaagccgggcgtatggatgccaaggccaggtttggtgtcggcaagagcgacgagctcgattcccgccgcatcgcggcatccgtgctgccactggacgtcgatcagctgcggtggccgcgccaaggcgcgggtgtacggcaggcactgcgtgtgctgctggcagcccgggacgcgatgaccacggaacggactcgtgcgatcaacgctctgaccgcgttggtgcgcactgtcgatctgggactcgatgcccgtcagtcgttgaccgatgcccaggtcgtcgagatcgcgaaatggcggacccgcaacgaagacgtcgacgtgttcaccgcccgggctgaagcgacccgtttggccaaacgcgccctggctttggacgacgatctgcaggacaaccatgacaggctcaccgagcttgttgaagccagccctgccgcggtcttattggctgagcccggggtcggtccgttcagtgctgctgtgtgcttcacagcctggtctcatcccggtcgggtgcgcgacgaggcggcgttcgctgccctggcaggggtgaacccgatccctgcttcatcgggcaacacgcaacgacatcggctgaacaggggtggggaccggcagttgaaccgggcgttgcacacggtgatcacgaaccggatgatccatgacgagcggaccaagaactatgttgcccgtcattgtggtgaggggccgacgaagaagtcgaagagggagatcaagcgcaagctcaaatggtatctcgcgcgtcgagttttcaagattctcaacgggctagaaacaattcccacgccggcttgacagacatagaaggat

SEQ ID NO: 8313 - DNA, 1655 bp, unidentified
  source 1..1655: mol_type = unassigned DNA; note = element_d0475b1
  misc_feature 1..3: note = core
  misc_feature 4..248: note = LE
  misc_feature 249..1424: note = CDS
  misc_feature 1425..1655: note = RE
  misc_feature 3..226: note = bridgeRNA
ctcgtataataaaatagtagtatttatagaccgctctccagcggaatgctacaatagtttcagggtgctgtggattggtgaggcgttactaccgcaaagacggtttttgggaggctccaaccacagcttctttgttgaaatgttaatcagttagataccgccagacggtttatttagaacgaggttacaagagcaaagaagtctgtggtcctgaacagcatcgaaataaatacgccggaggtatcaaaatggtttgtgttggaattgacgttgccaaggataagcacgactgctgtattctcgactcggacggaacgattcgtgccgactgcattaccatccccaataacatggatggcttcaagcagttgcttcagacgattcgagactgtaccaaaaggtcagacaaaataaaagtaggacttgaggctaccgggcattatagctacaacattcttggatttcttcttgacaatgacctggccgtctatgtcatgaatcctttgcataccaacctgtaccgaaaaagtctcagccttcgcaaaaccaaaaccgatcgtgtggatgcaagaacgattgcaactatgctattgtccgatgtagacctcaagtcctacacggatacagcataccacaacgaagagttaaagtcactaacaagataccgattcgataaggttcgtgaaagagccaagctgaagcagtcagtgtccagactggtcacgattctgtttccagaactggagaagctcgttccctctctccatattgcttcggtttatgcgctcctcagtgaatatcccggtgcaaaacagatttcagaaattcatctcaccaagctgacaaaccttcttgtgacagcatccaagggtcgttatggcaaagataaggctatccagattcgagatgctgccagaacttccattggttccgttatgcctgctaaatctctggagctgaagcataccattaaactcattcgggaactcacctccgagattgatgaaattgaagtttctattcagaaaatcatggatgaactgaatccaccgattctttctattcccggtgtcggtatccagtcagcagccatgattcttgctgaaatcggtgatttttccaactttgaatctcctgacaaagtccttgcttacgctggctgctctccatctacataccagtccggaaaacttacaaactgttacgctcacatggagaagcgtggttcgcgatatctgcgatatgccctttacaatgcgaccaagtacgtctgctattggaatcctgtctttgctgaataccttgccaagaaacgtgccgaaggaaagcattacaatgttgccttgtcccatgccacaaagaaacttgtacggctgatctatgctctacagaagtctggaaaagcatatcttacagctgcctgattttctccagagcctgagctaaccccaagaaccacttagctggcgcagcgaacccttgacaaaccgaagcattcaaatgctatcctgattttgcgagggctggctgggcttgctttgctgttctctccgtcgccctcgctgttccaagaccagcatttgaaggctgtttgtcatgggcagcgaatggttgacggattttttcattttggggcttgacttttaatagttagt

SEQ ID NO: 8314 - DNA, 1583 bp, unidentified
  source 1..1583: mol_type = unassigned DNA; note = element_d04bd58
  misc_feature 1..2: note = core
  misc_feature 3..279: note = LE
  misc_feature 280..1452: note = CDS
  misc_feature 1453..1583: note = RE
  misc_feature 51..260: note = bridgeRNA
acgtataatccaattattctcttttagaggtagttggattattttcctttctcccaatctttttgttggggtaattttattacttagttataattattaagcactgtggatttgtatctatattcttacagctttgactgttacgaggtgactcagaccacagcttttcgtcttcactggtaattagttagttaacgcatcgacgtttatatttacgtgaaaacacagtcggaattcttgtggaaaacaacagtgcaaatattatttttggaggtatctatggtgtattttgtcggaatcgacatttctaagtacaaacatgactgtttcattatcactgaatcaggcgatgttgtttgtaagccttttactatcaaaaatagttatgatggtttcaatgaccttcttactgttctagattctcttgatcaggctagacaaataagaataggatttgaatctactggtcattatgctttaaatctgaagttattccttgaaaaagcccactacagctttatggaatttaaccctgttcttcttgctaagtttaacagttctcagactttacggcgtaccaagactgatgcaatagattgtacttctattgcgcgttggttaatgacggttgattacaaaccccatccggtaggattttatcatacctattcgcttaagtcattaactcgcttgcgtgattcgcttgtcaaacagcgaagtttttatattgtaaagattactaatgtgttggatcatatctttcctgagttcaagcctttctttggtaatcgtctcagtaagacggctctgtatcttttggaaaactatactactgctaagaaaatgtctcgtatgaactcacaatcttatgatactctccgttgtatctctaggggtaagttctctatgcaaaaattcttaaaactgaaggagttagctaaaaacactgttggtgaagataacgaaatatttcttgctcaactaaatagtctcatggctttgtataaacaagtcgtctttgaggttgattccttggaagggcaaattatttctttgattgaagagataaatcctaaatctttgactattcctggtattggagctctatctgctgctgttatttatgctgaatatggtgatttatctaaatttggtacaccatcgcagatgctgtcttttgctgggttagaacctggatattaccaatctggaaattcggaacatggtggtcgtatggttaaaagaggttcttctcatcttcgttttactttgatgaatctttgtataccattgattaagtacaatatggtgtttgcagagtattatgcaaagaagcgtaatgaaggtaaacctcaccgtgtagcttgctcacaccttgttaagaaactcattcgtattattttcactcttgagaaaaataatcttaacttcgatcctttaaaactccgctgattgtgtagtggcactcagtaacaaccccttttaaagcctttcagaatccataaattggaaggtttatttgagttgcacatttttcagaagtatctttctttcgaaatatacttgacttctaatagttagtc

SEQ ID NO: 8315 - DNA, 1303 bp, unidentified
  source 1..1303: mol_type = unassigned DNA; note = element_d053035
  misc_feature 1: note = core
  misc_feature 2..226: note = LE
  misc_feature 227..1288: note = CDS
  misc_feature 1289..1303: note = RE
  misc_feature 4..222: note = bridgeRNA
cagtgatgatgtagatgagcgcctctcggcgaggtttgacccaccgactgactgacctcgggtcctcaacgggatctgtcggcctcgaccgggaggcgctcatgtgcacgtcaccggacgcggcctgtgacttcataggagcctggccagaggccccatcactgtcttgtccgtccgcccggctggtgcgtgccgccctgccccaggtcaagacgacaggacgacgatgacccccattacaccccaagacacggcgatcatcgaggtcgccggtggcgtcgacacccacaccgcagccgtcatcgacatggtcgggcgggtactgggcagtgagcagttccccgccaccgcggccggataccaggcgctgctcagctggatgcagggattcggacatctggtgagggtcggggttgagggcaccggtgcctacggcgccgggctgacccggctgcttcgcgagcggggggtgtgcgtggccgaggttgatcgccccgatcgtaaggctcgccggttccagggaaagtccgacccgatcgacgccatcgccgccgccaaggcggccctggccggggaacgcaccggcacacccaaacagcgtgacggccggatcgaggcgctgcgcaatctgcgggtggcgcgccggtcggcgatcgatcagcgcgccgctgtccagcgccagatcaaggcgttgccggtcaccgctcccgaggagttgcgcgcgcggctgcgtggcctgccggccgcgaagctggtcgccgcgtgcgccggcctgcgccccgacctctgcgacgccgccgcgccggctaccgcggcccagatcgccctgcgctcgctggcccgccggcatcagcagctgacggccgagatcgccggcttggacgaactgttgcagcccctggtggccgcgatcaatccccggcttgtcgccgccagcggggtggggaccgacgtcgccggtcagttgctggtcaccgccggtgaaaaccatgaccggctgcgctcggaggccgccttcgccatgctctgcggtgccgcccccatcccggcctcgtccggcaagaccacgcggcaccggctcaaccgcgggggtgaccggcaggccaacgccgccctctaccgggtggtcttgtgccgcctgcgctgggatccccgcacccgcgcttacatggaacgacgcaccaaagaaggtctgtccaagaaagagatcatccgctgtctcaaacgctacatcgcccgagagctctaccgaatcatcaccacaggcgatcacgagctcgccgcttgacatccataggagcat

SEQ ID NO: 8316 - DNA, 1557 bp, unidentified
  source 1..1557: mol_type = unassigned DNA; note = element_d05a988
  misc_feature 1: note = core
  misc_feature 2..227: note = LE
  misc_feature 228..1076: note = CDS
  misc_feature 1077..1557: note = RE
  misc_feature 17..242: note = bridgeRNA
ctacttatgtcttccaagacaacccgggtcggcgcaggctcgggtgaggtgcctggccggagcgctctcttcgcggctgcccaccgtgtggctaggtgtggctctttcatggcatgcggtctggccgggcgccgtggcgaggcgtggctcaagaagggtctgctcagctcgaagtagcgttgccctcctcgctgacaggtgatgcagctcggcgaggaaggtgcgtgatggaccaggtgatcatcggggttgacccgcacaagctgtcggtcacgatcgaggccagggacaggcgggaggttctgcgggtgacgggccgtttcgggaccggcaccgctggctaccggcagctgctgcgggcagcctgtcagtggccgcagcgtgtgtgggcggtggagggtgctaacgggatcggccgcccggtggcgcagcggttgctggccgacggggagcgggtgctggacgtgcccgccaagctggccgccagggcgcgggtgtttgacaccggccagggacgcaagaccgatgccacggacgcgcacgcgattgtcatggtcgcgctgcgggacaccggattacgcgagctgagctccgacccggagctgatggtgctgcggatgctgtgcgaccgccgcgatgagatctcccgcggccgggcgcaggccctcaaccggatgcaccggctgttcctggaattggtgcccggcggggcgccggtgaagaagtccaccgggcagtacaaggcgctgctggccagggtgcggccccgggacctggccggaaagacccgccggcggatggccgccgaggaactagccgacctggcacggtacgacgccaggctcaagacaatgaaggccgagctgaaggccgcggtccaggcccgcggatcgcacctgatgaacattcacgggatcggccccgccggcgccgccaggatcctggccgatgtgggagacatcgcccggttccccgaccgtaaccattttgcctcctggaccggtaccgcgccgatcgacgcctccagcggcgagcacacccgccaccgcctgtcccgcgccggaaccgcaggctgaaccacgtgctctacatggccggcatcgtccagctccgcaacgacaccgcgggccgggcctactaccgccgcaagctgcagcagtccaagaccccgatggaggcgatgcggtgcctgcgccggcgcttgtccgacgtggtctaccgccagctcgccgccgacgccgctgtccgcgcagtcgagcaggcaggcccgggagggcactcggggacgactctaaaatccagcgcggccgacctgaccccggacatcggctcttcggaccagccacttcccggacccgcaccctcgacgctacccccgcccgtgcccgccaagaacccccagtgcccggggacaggcgccataccgcgacgacgcgccggaggtgtcaacgtggagcgccccaccggacgaacgacgttgacaccgacaagcgtcggcgcacactcgaagagcctcccggacccgcccccttgacaaagttcttcatagaagggagc

SEQ ID NO: 8317 - DNA, 1371 bp, unidentified
  source 1..1371: mol_type = unassigned DNA; note = element_d06740a
  misc_feature 1: note = core
  misc_feature 2..292: note = LE
  misc_feature 293..1333: note = CDS
  misc_feature 1334..1371: note = RE
  misc_feature 103..264: note = bridgeRNA
ctctaagtttgcaaagtgaaagcgacgcagtcgctttattaaataaatctgatgaaaaatgattacaacaatagacagattcttacctttgttgtataaaggaagaataggtctgtcgaagaggtaaaccatgcgtctttctagtcaatagaagattatcgtctgcttcggacctcctcgacatagttgtaaagaccagatagaaagttatcggcttggagcctttttagagtattagtccagacaactattgacccattctttaaatattaactttatactttacaaagttatgaagaatttatttattggcatcgatttctcgaaagaaaaagtagacgttgcgataattgcagcgaagggattgcatgagacatcggaacgggtgtacaacacgttcaagtcgacaaccgcgggctacaggcagcttgtcaagtgggttgaagaaaacagccgcggagaagagcgggagtcatggctcttctgcggggagaacacgggagactacagcaaggggctgtgcaacttcctttatggcaagggctacgacatgtggcttgaaaacgccaagtgcatcaaggacgcctccggccttcgcaggcttaaatcggaccgcgcggacgccgccatgattgcggaatacgccatgcgcaactatgacaaggccgtgatgtacgagcctctcagcggccctctgatgcagctgcgcgagctgttcctgttcaggctgatgatggtgcgtcacaagtgcagcttcaaggtgcgccgaggcgagaagcggctcaccatggagaagtcgccggcgaagactgtcatctcccagatcggcaggcacatcgtgaacgagatggacaaggagattaagaaaatcgacaagaagattgccgacctgatcgcctccgatgagcagctgagccacgtgttcggaatcataacctccacgccaggcataggcacgcagaacgccgtgtgcctgatgatttacaccaacaacttcaagcggttcggcttcaatcccaggaagatagcctgctactacgggattgccccgtttgccaggaattccggctcaagcgtgcattgtgaccctcatgtgcattatatggccaaccgcatgataaaggctctacttacgcaggcggcgcttgccgcggtcaatttctgccctgagatagcaagctattacacacgcctcacaaccgccggcaaaaagccgcaggtggcattgaacaatgtcaaaaacaagttgatacgtataattaccgccttggtgagaaccgggtcttactacagcagtgattatcaattatcaaaagtttcacttatatcataaaaataatggcaaaattatttggattttaacatagaaag

SEQ ID NO: 8318 - DNA, 1477 bp, unidentified
  source 1..1477: mol_type = unassigned DNA; note = element_d06a361
  misc_feature 1..2: note = core
  misc_feature 3..170: note = LE
  misc_feature 171..1211: note = CDS
  misc_feature 1212..1477: note = RE
  misc_feature 1229..1472: note = bridgeRNA
agatggggcaacgggccccggtctgccttccaagcaagccgcgcttgctacagcgctattgggtggcgcgcttcgcgcggcttgcttggaaggcgggcggtcgtccctcacatggatggtgtgacggagtcgaggatgggcctcgctccaagcatcaaggagagacgaccatggagtattatgcaggaatcgacgtgtcattggaatgctcgactgtctgtgtggtggacgggagcggcaagattgttcgtgaagcgatagtcggaagcgagccggagccgctgatcggctggttcggttcgctcgggctcggactgaccagggtcgggctggaagcgggaccgctgtcgcaatggctttatgcggcgataaagcaggctggacttgcggttgagcttttagagacgcgccacgtgcacgatgcgttcagtgcaatgccagtcaaatcggaccgcaatgacgcacggggcattgcccaattgatgcggctcggctggttccggccggtgcactgcaagtcgatcggagcgcaggaagtgagggcggtgctaacagcgcggaagctggtccagaccaagcgtcaggatgtcgagaacagcctgcgcgggatcttgcgcggcttcggacttaaggtcggcaagacgacggatctgagctttgccggacgcatccaggagttggtgaagggccatccaaacttggagatgatcgcggaggcactgctctcggtgcgtgccgtcctgctgcgcgagttcaacgtttttgagaagcgcgtgcgcgcgatgtcgcgcttggatgcaaaagccaagctgttgatgtcgacacccgcggtgggtccaatcgtgtcgctaacctatgctgccgcggtcgacgacccggcgcggttcaaatcgtcgaagcgggcgggagcgcatttcgggttgacgcctaagaggtatcagtccggcgagaccgactactcagggcggatcagcaagatcggcgacgcctcggtgcgcgaggcgctctaccaggccgctcacgtcatgctgaccaagccagtcaaaggctgcccgcagcttaagagctgggcgatgcggatcgccaggcgagccggcatgagcaaggcgaaggtcgcgctggcacgcaagctcgcggtaatcatgcatcgcatgctcaaggacggcgtacctttcaatccggtcaccaaggcaaccaccgcaacagtctgacgaggagatcggaaactggttttcgggaaggtcaccacaccagccttcccgaagcgaagtcccttcgccgggacgatggatcaggtcaggccgccatccgggttgtcgacacatctcaaaatgtgatcacgcattccgtagattcgccgacctatcctcttatgaaccccatcaggcgacggccttgcgccgatcccgtacagaagcacgtccccggcgagcggataacgcaaaaaagggattgactcatcgaggcccgttacaga

SEQ ID NO: 8319 - DNA, 1383 bp, unidentified
  source 1..1383: mol_type = unassigned DNA; note = element_d06b5e5
  misc_feature 1..2: note = core
  misc_feature 3..84: note = LE
  misc_feature 85..1104: note = CDS
  misc_feature 1105..1383: note = RE
  misc_feature 1114..1370: note = bridgeRNA
tgatggggtggatggcccctgactgcggcgtcgaagcgcctaaggtggctgtgttgagaagcaacctgcgcaggagccatccacatgcagcctatcattgtcggccttgatctggccaagtccgtttttcaagttcacggcgtcgacgccgagggccaggtcgtggttcgccgaaaacttcggcgacgcgaagtcatccccttcttcgagaaactggatccctgcctgatcgggatggaggcgtgcgcgacggcgcacttctggacccgcgagctttccaagctgggccatgacgtgcgcatgatgccgcccagctatgtgaaggcctatctccgtcggcagaagaatgacgcagccgacgccgaagcgatatgcgaagcggtgcagcggccgaacatgcgctttgtgccgctcaagagcgccgagcgccaatcggttctgaccctgcacaaagctcgggagctgctggtccgtcagagaacaatgctgatcaacgccattcgcggtcactgcgccgagttcggtctgatcgcgcctctcggcgcacgcaaggtcgatgagttgattgaggacgttcgatcggcggacgaagccattgtgcccgacatcgccaggacggcgttgctggcgttggcagatcagcttgccctcctcgccgatgagatcggccggatggatcggcggttgctggcttggcatcgccaggatgaactaagtcagcgtctggcgacgataccgggcgtcggcgtcatcggcgccacagcgctgtcagcctctatccccaacccgacgatgttccgctcgggccgcgagttcgccgccttcctggggctggttccacgtcagaactcctccggcggcaaggaccgcctgggtcgcatctccaagatgggcgacggctatctgcgcaagttgctggtcgtcggcgccacctcggttgtgcgacgagcgaagaccgacgccctggccgcagcgccatgggtccgctcgttgctcgaacgacggccggcgcgcgttgcaaccgtcgccatggccaacaaaaccgcccgcatcgcctgggccgtcatggcgcgcggcgaggtctatcggccgatagccgcatgacctgacatggactgagatcagccgctcgacgagcgagccggcgctgaagctgtgaggggcaagagagcttgatgatgatctgaccgtggccgcggaccaggacaacccgaggtaactgactgagcgtcgtgctcgttaacttgtatgggacctgatcagcggactccatcagggccagcggccatcatccgccgcacaaacaggccgaacagatgtccgcaccccgcagattaccctcgaagctcaattatctcttgcggaccaggggccatccacaga

SEQ ID NO: 8320 - DNA, 1357 bp, unidentified
  source 1..1357: mol_type = unassigned DNA; note = element_d06f506
  misc_feature 1..4: note = core
  misc_feature 5..77: note = LE
  misc_feature 78..1097: note = CDS
  misc_feature 1098..1357: note = RE
  misc_feature 1085..1345: note = bridgeRNA
atgatggggtggatggccccctcacggcatcgatgtgccaaagttggatcgttgagaccaacacacgggagccatccatgaggaagattagcacggtcggcgtcgatctggcgaaaggggttttccaggtgcatgccgtcgatgagcaaggaacggtggtggtgcggcgggcgctgcggcgatcgaaggttctgtcgtggttcaagcagctgccgccgtgcctggtgggcatggaagcatgcgcgacggcgcattattgggggcgcgagctgcgccagctggggcacgatgtgcggctgatcccgccggcctacgccaaggcctacgtgcggcggaacaagaacgatccggcggacgccgcggcgatctgcgaggcggtgggtcgtccctcgatgcgcttcgtcgcgatcaagagcgagcagcagcaggcgatggcgggcattcaccgggtccgtgaccttttgatgaagcagcacaccatgctgatcaatcagctgcgcggcctgatggcggagttcggcatcgtgacggccaagggcgtgccgcacgtcgccgagcttctcgtcatcctggccgatcccgacgatcagcgcattcccccgccgctgcacgacggtctgagcgcgaccaccgagatcctgcgcgccatcgatcgcaagctcgaggcgatcgatcgccagatcgtggcggcgggacgcgaggatgcgacctatcgccatctgatcacggcgccgggttacggaccgatcgtcgcgagcgcgatggcggcgatggtcgtcgatccccgcgcgttccgccgcgccgatgacttcgccgcctcgctcggcctggtgccgcgccaggacggcaccggcggcaaggtcaagctcggtccgatcagcaagcgcggcaacggctatctgcgccgcctgctggtcagcggcgcaatggccgtgctcaggggcaagcgggccaagcacgatccgtggctggccaggttgctcgccagcaagccgcgcaaggtcgcggcggtcgctttagccaacaagatggcgcgcatcggatgggccttgatgatgcgccaggaggacttccggcagccgccggcgacggcctaaccggcccaagccggcagccccggaagcttgcgagggtgagcacgcgtgatggcaatgtcggtcaacccgataaacgagggcaacctgtcgttcgtcataggggcaatgcgaccccgccgcaatgatcaggcctcgttcaacggttcccatcagggcctgcggccacaaggcgccgcgccaacaggccggacacatgaccgcaaggtgcccgtcatatcccgcacgcgaaaaaacccttgcgagtcgggggccatccacac

SEQ ID NO: 8321 - DNA, 1616 bp, unidentified
  source 1..1616: mol_type = unassigned DNA; note = element_d077086
  misc_feature 1..2: note = core
  misc_feature 3..312: note = LE
  misc_feature 313..1476: note = CDS
  misc_feature 1477..1616: note = RE
  misc_feature 14..293: note = bridgeRNA
ctcctacaataataaataaggttaaaggcacggtagccagccgtgtctttttccatttcaatgctgaagctgttagaatgagaaagaatggtctgacttgtttcaccttggactaacacgtccgtacaggagtcagtcagccgctttctcattcgcagcattcgatttgcgcaggttgtaccgtcggtgttccgatgagttcgtgtcactcaggagattgaacaagcattgagtaaaaagcggtagccatatcaaaatctcaggaggtactttatgaactcagtcggaattgatatttaaaaaggaaaaagtatggtagcggctctgcgccctatgggtgaggtagcgctggctccaaaggaatatccacacacagctatcggccttgagcagatggcgcatgacatcatttctctcggagaaaataccaaagtaattacggaagcaaccggtcgctaccacgagcctgtttccgcagcactacacgaatatgggattttcgtttgtgttttaaaccccattttaatccaccaaagcggtggaggttctgtccgaaaggttaaatcggacaagaaagatgcaatcaaaattgcaaaatacggtcttgataattggactgatttgcaaaaatatgcatctgttgatattttaaggcaacagcttaagctatacagccgccaatacaatctgtatatgaaaaatgttgttgctcttaaaaacaatttacttgctcttacagacaaggtttttccgggagtcaatgaactgtttgaatctcccgagaagactaacggtcatcagaaatgggtggattttatctatgctttttggcattgtgactgcatttgtcgggtaagcgagaatgccttttctcagcgttatcagaaatggtgcaaaagaaatcactaccatttcagctcacggaaatcatctgatatttatactgcaagctgcggtcattttacaaccttaccgagaaataataatacaaagtttttggtaacaaccgcagctaagcagctgacatctatcaaagaaaacatcgcattgcttagagcagaaattttttctctggctaaacagcttcccgaatacgatgtcgttatgggaatgttcggcgttggcgaaattacaggtgctcagttaatggctgaaatcggcgatgtacggcgttttccaaatcgcagttcgttagtcgcttttgccggtgttgacccttctgtcaaccaatcaggcaagtacaacgcccatagcaactcaaccacaaagagaggttcttctcaccttcgcaagacactttttcaaattgtcagtacatatgtcaagtgctctcccgttgatgagcctgtttatcagtttatttgtaaaaagcgttcggaaggcaagccgtattatgtttatatgacagccgccgaaaacaagtttttacgcatatattacgctcgtgtaaaagagtgtcttaatgcacagaattaactgacggtcaatctaacaattcacttaggctggatttttttaaaactgccgaaatccagcttgctttgctatacacttttttctgttgctaaaaaaatttaagattttttcattttaggacttgacttttatttgcagga

SEQ ID NO: 8322 - DNA, 1361 bp, unidentified
  source 1..1361: mol_type = unassigned DNA; note = element_d07f18c
  misc_feature 1..2: note = core
  misc_feature 3..80: note = LE
  misc_feature 81..1118: note = CDS
  misc_feature 1119..1361: note = RE
  misc_feature 1124..1346: note = bridgeRNA
agataattggactccctcactccctaaagagtgaggtaatataaaagttaccacaccaatatattataaagagtcctgatatgtatcgtaccaaagtaggcgttgatttagcaaaagaagttattcaagtttgtatttatagaaacaaaaaggtgcagtcaaatattgaaatgacaccgaacgaatttctttgttggctaatgaatgcaaaaccggtaacgataatatttgaagcgtgtggtacatcgaattactggaaacaaaaagcaactgaagcaggtcatgatgcacgattgatttctgctaaattggttgcagtcgtaagacaaaatcaaaagacggataaaaatgatgctctggctattgtccaagcggcattgctaccagatgtaacgtttattggtggaaaaacggttgaacagcaacaactacaatccattaaacggttaaaggaattagccgtgaaacatcaaggtgccagtcaaaagcaattagtgtctttattattagaattgaacattcgaatttctaatcgcagaggcggaattatctgcgcgatagaaggcgtattagaagatgctaccaatggtctgtcagcagaatgtcgtgccgctatttatacggcgaaagagcacttgaagagtttgattgatgccgttcaccgttatgatgattgtttagagaaatcagttgttgctcatgctgattgcaagaaactactgaagcttgaaggtgttggcaccatgaatgcgattaacctgtaccttgcattgggttgcgcagagttaggtgttttcagtaaaggaaaagatgcttcagcgtgtattggtttaacgcctattcagcattcttccggtggagttgttaaattaggctcaataggaaaacactgtaaaaatagcatgttgagaagtcagttgatttgcggggcaatggcagcggtgcatcaagcggtcatacgagaagccaaaactaaaaaagatgtttggcttaaggggcttgttgagcgacgaggcaaaaagtgtgctgcggtagcacttgctaacaaaacagtaagaactgctttcgcgatgttaacccagggcacagaatataaagctgagttattggtagcttaaaaagaattgactagaaagtaagtttaaaagcgttcaaacaacaaaaatgcaaaacgaagataaaaatcagctagtttagtcagtagccaacagagagcttagcgctcgcttaacagatttgacaactagttcgcgtaaatatcaaagagccagagatcgcttctcaatgtagagctcgtacataagtacgcatttatttctttgtgttattatttttgttgttgacaagggggagtccacata

SEQ ID NO: 8323 - DNA, 1388 bp, unidentified
  source 1..1388: mol_type = unassigned DNA; note = element_d090a52
  misc_feature 1..2: note = core
  misc_feature 3..133: note = LE
  misc_feature 134..1156: note = CDS
  misc_feature 1157..1388: note = RE
  misc_feature 1166..1358: note = bridgeRNA
acatggggtaatcgcgggaagcgagtcgccccgaagcaaccgtgacattggaagctggtggctgttccccgataagatgaaaatacgggctcacgacctaacgccgggcccaagcatctgatggagaacagccatggaagagtatatcgggctcgacgtgtcgatgaaagagacagccgtttctgtgcggcgtggtggaaagcgcatttggcgcggaaagtgcctgtcagatccgaagattattgcagacctgatacgcaagcgtgccccatcagcgggtcggatcgtcttcgaaactggaccgcttgcggtgtggttctatcatgcgctgagcgcagaagggctgccggcgatatgtatcgacgcgcgtcacgccaaagcggcactcgacatggcggcgaacaagaccgacgcaaatgacgcggatggcctggcgcacttggcggaggtcggcttcttccgggaagtgcgcgtaaaggggttcgatagcatgttggctcgcacgctggtggccgcccgcacccggcttgtccatattgcaacagagctttcaaaccagatccggggattaatgaagacattcggtctgctcgtacctgcgggcaaagggagtaagttcgaggagaatgtccgaagcctcctcctcgatcaaagagagctcgccgctatcattctaccggttttggaagcctggcgtagcatccgcatcagagcagccgagctcgggaggcagcttgttaccggcgcacgcgagagcgaagcgtgccaaatcctcatgtccgtcccaggcgttggggcgatcactgcaacatcgtttgcgacggcgatcgaagatccaaacaatttcaagaaatccagctccgtgggtgcatggctcgggctaacgacccgtcgctaccagtccggtgaggtagactatggtggccacatctcccggcgcggcgaccatcacttgcgcggtcttctatacgaagcggcgacagttatcctcacccgttcctcagccgaaagcgaccttcgaacgtggggccttaagctcagagaaagggtcgggttcaagcgcgcagccgttgccgtggcgcgaaagcttgcggtcctaatgcatgcaatgctgaagtccggagagatgttcaaccgatcggctgttaccgcatagaataagcatagcgttcggtccgaacgcatcgatacgtccctgccgggacgtgggcagagtcattccgtcagatgaggtgcacagctgaatgccagcacagtgcgtcatccacattggaaggctcgatccgcgaagccccatcatgtggcggtccgtgccgaccacgaagacgaccctgcacccggcatacgatcagtaagaaaggacttgcgctaatgcccgcgattagacg

SEQ ID NO: 8324 - DNA, 1401 bp, unidentified
  source 1..1401: mol_type = unassigned DNA; note = element_d09434b
  misc_feature 1..2: note = core
  misc_feature 3..76: note = LE
  misc_feature 77..1117: note = CDS
  misc_feature 1118..1401: note = RE
  misc_feature 1122..1388: note = bridgeRNA
tgatggggtggacggcccccgacggcatcgtttgtgccagaatgaggttgtcgaatctcaaacgagggagccgtccgtgaacgagattatccgcattggcatggatacgtcgaaacatttttttcagcttcacggggtggacgccgccgagcggccggttttgcgcaaaaggctgcggcgcaaggaggtcgtagcgttctttgcgggactttcgccgatggttgtcgggatcgaggcttgcggcgcggcgcatcattgggcgcgcacgctttctgaacttggtcacgaggtgcagcttttgccgccgcagctggtgaagccctatgtcaaacgcggcaagaacgacgcggccgacgccgaggcgctgtgcgaagcgatgagccggccgacgatgcgttttgcgccggtcaagagcaaggaggagcaagcggcgctgatgctgatcggcgtgcgcgatcggctgatccgcaatcgcacgcagcttgcgaacgccattcgcggctacgcggcggagtttggattgatcgccgccaagggtctcgacaagatcgagccgctgctcgcgcggcttgaagcggacgagagtttgccggccttggcgcgcgatttgttcatgacgcaggcggaagaatacgcgcagcttaaggcaaagatcagggatgtcgacgccaagctttccgcctggcgccggcaagacgcgcgcagccgccggctcgtgcgcattccgggactggggccgatcggcgcggcgttgctgtcgatgaagacgctcgacccgagtttgtttcgttcgggacgccagttcgcggcctggatcggcttgacgccgaaggatcattcgaccgccggcaaggtcaaactcggggggatcacccgcgccggcgacgaggccttgcgcagcgcattggtgagcggcgcgaccgccgtcatccggcaggcgcgacacggcagaggaaaaccctcgccctggctcgcggcgctgatcgcgcgcaagccgccaaaactcgccgccgtggcgctcgccaacaagatcgcccgcatcgcgtggaaactcatgaagacgggagaaagttacgacgccagacgggcgtcgggcgccgcggcgcaggccgcataacctcaaagtttcgcgaaaccagggcgcgttcccgcgcctttgtctcgcggaaggccggaacttgcaagaaaacgacagatggcgcgatcaatcgatccaagacgcgagacattccgtggaatccagcggcggtctcatgccgcgactctgtgtggagctcgcgtcgcggaacccatcttggccagcggtcattcgcgaccgcgcaaacaggccggacatatggacgcaaacgatccgatcaaaactctgtccccaacccttgcgaggcgggggccgtccacata

SEQ ID NO: 8325 - DNA, 1550 bp, unidentified
  source 1..1550: mol_type = unassigned DNA; note = element_d094603
  misc_feature 1..2: note = core
  misc_feature 3..269: note = LE
  misc_feature 270..1430: note = CDS
  misc_feature 1431..1550: note = RE
  misc_feature 3..250: note = bridgeRNA
cttgtatgataaatacggaagcgaaaatcatactttcctttctttttcgttgaccagcgactaagatacattcagatgctgtggactacttattaatttctgtagttcaactactttaaggagtgtatagccgttacatcatctaaattgttcattagctggatgtgacagcgacggttaagaccatagctgagcactgatttcaatcaagtctacgatgatgatcgtatacggatgtcgcagcatcaacacgaggaaggagagattccatgatttacgtcggcattgacattgccaatctcaaccatttcgcttccatcatctcgtctgacggcgaagtgctcgtagaaccgttcaaattctcaaacgacagtggcggcttccgtttgctgctgtccaaactggatcagtttgaatcagacagcctcgtcattggtcttgaatcaacggctcactacggcaataaccttgtcgaattcctcgtttccagacattttcatgtttgtgtcattaatccgatccaaacgtctgctatgcgaaaaaacaacattcgcaagacaaaaacagatcgcgttgacacgcttctgattgccaagccccttatggtgcagctttatcggttctatgataagcaggatattgatctcatgcacctcaagaacctcggtcgtttccgtcaggtacttatgaagcagcgtacctctgcaaagatcaagctgacttcttttctggatcaggctttccctgaacttcagtatttcttcaacggaattcaccataaatcggtctattcgcttttgaaagaggcgccgtcgccggaaaagattgcttccatgcacatgactcatttggctcatcttcttgaaacaacctctcatggccgctttaagaaagataaagctcaaactttaagaattcttgcgcagaaatctgtcggttccagcgacagctccatttctattcagatcacccagaccattgagcaggtcgagttactggatagccagattcacgatgtcgaagcccaaatcacgactatcgtcaagtcgttaggctccgtcatcctcaccattcccggcatcagctgcattgaagccgggatgatccttggcgaaatcggcgatattcatcgcttttcttcaccttctaaactgctggcttttgcgggactggatccttctgtttaccagtccggcaatttcaatgccagccatacccgaatgtccaaacgcggttcctctgtccttcgctacgctctcgtctatgccgctcacaacatcgtccgtaacaacgacgtgttccgcagtttctatgatgccaagcgttctcagggtaagaatcactacaatgccttggggcattgcgcaggaaaactggttcgcgtcatcttcaaaatgctgacagataacgttgccttctgtctttcctgatcctcgttaatgtttcttttcaaaaagccctctctaaagggtttgtttaagttacccttttgactgcttcttggcttttttatttattcgctatttggggcttgacttttcatagctggt

SEQ ID NO: 8326 - DNA, 1503 bp, unidentified
  source 1..1503: mol_type = unassigned DNA; note = element_d095380
  misc_feature 1: note = core
  misc_feature 2..296: note = LE
  misc_feature 297..1373: note = CDS
  misc_feature 1374..1503: note = RE
cgtataataaaaccatcccgaaatgggtggttttattaattctcctttctcgaaaatcttaatattggttatatatgcaggagtagctacctgcttgtataataaaagacaggcactgcggatttgttcctatttttttacatctaatactgttctgaggtgaatcaaaccgcagcggtttgtctttaaatgttgattagttagttaacgcttagacgtttgaattttcgtgaataattggacaagcttgttgtgcagacagtagtgcttaaattttgacaaaggaggaaacaaagatgctttattacatcggaatcaacatttcaaaattcaaacatgatattgcagaaatcaacagtgatggagaggttataacgccctcatggacgttttataacacagatgagggtttctcctcgctgaaagaatttcttgccggaataagcgtaaaaataagaattgggtttgaatctaccggtcattacggtcagaacctgaaactatttcttgaagccaatcattacacattcatggagttcaatccgcttgtcctgaagaaatttgttgcgagcaaaacccttagaagaactaaaacagactctttggatgcgttcagcatagcacagtatctgatgacggtagaatacaaaccctatcccaattcattctaccacatcaaggctccaaagtcattaacaagattcagaaataatttaataaaacaaagaagccgtcagctcgtcgagcttactaacattcttgatcttgtttttcctgaattcaagccgtttttcaaaaacatactcgttactacagcattatacatacttttcaactatcagattccggaaaaaatcgcaaacatgaattcaaagtcctttgagattctgagagcaaagtccaaaggccggtttacaactgcaaaattcaataagctcaaacagctcgataaaaatacggttggtcattcaacggattatcttgtaatgcaaatggaaatgaccattgaaatttacaaccagatggacgctaaaattgatctgtgggaatctgaaatcaagactattctttctgatttacatattccgatcgtgtccatcccaggcatagaacccggatattatcactccggtacctccgagcgtggcggcagaatggtcaagcatggctcaccttatctgcggtacgcactcatgaactgtgctctgacacttgttcagcataacattgtttttgctgaatactactcaaagaaacttgccgaaggcaagactcaccgtgtatctttgtccaatgctgctaaaaagtttgttcgcatgattaacactatgcaaattaaaaacatcacttttgattacgatttagcacactaactgtcaacaatcaaatattcactaattgtcgaaaaatttaacatttttcggcttaccattttgcccccttcacccttctgaaaaatttttaaaattttttagaaaggtattgacttttcatagttagtca

SEQ ID NO: 8327 - DNA, 1358 bp, unidentified
  source 1..1358: mol_type = unassigned DNA; note = element_d09e1bf
  misc_feature 1..2: note = core
  misc_feature 3..76: note = LE
  misc_feature 77..1105: note = CDS
  misc_feature 1106..1358: note = RE
  misc_feature 1110..1348: note = bridgeRNA
ttatggatggcccgcccctcaccgggctgccctgctaggctggcagggtagcggagatgaggaacgaagcgagacgatgccgatcacggtgttggggatcgacctgggcaagaacagctgcagcctcgtcgggctggacgcgaccgggcgtgttgtgctgcggcggcgcatgcggcgtgagagcgtgatcgccttcggtgcacagttgccgtcctgcgttgtggcgatggaggcgtgttgcggtgcccatcacatgggtcgaaccctggcagcccaggggcacaccgttcggctgatgtcgcccgagtacgtgcgcccctacgtcaaggctcagaagaacgacgaccgtgatgccgaggcgattgccgaagcggcgacgcgtccgaccatgcgcttcgtggccctcaagtcggaagcgcaactcgacatgcagaccctgcaccgggtccgcgatcagctcgtcggcgagcggacagccctgatgaaccagatccgcgccatcctgctggagcgtggccatgtcgtgccgcagggtcgtgccagattggccgcccgcctcgcaagcctgctcgacgacgaggcagccacggatctcacaccccgtatgcggaccctcgtgacggacgtgcgcgagcgctggcagttcctcgatcagcgcatcgctgcccttgatgccgagttcagcgagcaggcccgctcggatgagagtgcacgtcggctgacaaccatccccggtatcggcgcgctcaacgcgaccgccctggtggccgccatcggcgacgtgacgaccttcgcgcgcggacgtgatctggcagcttggctcggccttgtgccgcggcaggtcacgaccggcggacggcctaaactcgtcggcatcaccaagcgcggcagcaagtacctgcgcaagatgctgatccagggtgcacgggccgcgatgccgacgctccggcagagtgagacccgcctcgggcagtggctgcgcgggcttctggcgcgggcgcacgccaacacagccgtggtcgcgctggcagccaagatggccaggactgtctgggcgctcctacgccatgagcgcgtttacgaggcggccgtcatcgccgcctgaacccaagcttggtcggcgaagccttcgccggccttccgatgtctgcgtgtggtgcgaggaagatggcctgacagtcgatcggtgttctggaagcctttggctggcaaatggcgctcgacgccgacccctttatgaggcccaggacgcgcggatctccatcttggccaacggctcgccggaaggccggatacgtttgtgcagactgcccagaccagcggaaccagagccacttgcggacggggcgggccatacg

SEQ ID NO: 8328 - DNA, 1578 bp, unidentified
  source 1..1578: mol_type = unassigned DNA; note = element_d09f01d
  misc_feature 1..3: note = core
  misc_feature 4..274: note = LE
  misc_feature 275..1471: note = CDS
  misc_feature 1472..1578: note = RE
  misc_feature 8..251: note = bridgeRNA
cttgtatatttagattactcaattaatcagctattccgttttaattagctgttattttacctataattgagttaggcgctgtggactagtactacttccaccagattcctttggaatactgttgtagaaaggctctagccacagctctttgtcaaattgttaataagtttgttagcgcatggcatctgtctgtgacgcttgattgatcacaaggttacataggcaaagagtaagtggagcacagcgtaaatttaatctgtcaggagtggttcttatgttgtacgttggaatagacgttgccaagcacaaacatgacttagcggtcattgatactgaaggaacgatttttgtccgtcatcttcagattgaaaataatcgtgaaggctttacgaagcttcaaatgacgcttgctaatttgaagaaatctaccggtgaagacattcaaatcgccttagaagataccggtcattattgctttaatatcttacgcttccttcggacgcaaggctaccccacctacagctataatccgtacttaattaaagaatatgccaaaaatcaaagcttgcgtaaaaccaaaaccgataaaaaagacgccatgacgatcgctcgaaaactacgaacagatcttgataaacaatcatttagtgctaacccttcaatgattgagttgaagtatttaactcgacatacagccagattgaaagaggattgtacgcgaaaaaaagtaagctacacacgcattctagatattctctttccggaactcgccccttctttgggttcttcttctgcgaaacaccaatcctatgtgtacgcaatcttgaaagaatatccttctgctaaaaaggtaggaaatgcacatttaacgaagctgacgaatcttatttcagcgcactcaaagggccgctttggaaaagaacacgcggtcaagctcaaagcactcgcgcaagcctctattggccaagagtcccctgcattagaatttgaactccttcaaaccattgataccattcagtatcttacaactatgcgagacaaagcagagaaggaagttgctcgattaatgagtgaaatcgattcgcctattttaacaattcctggcattggctataagttagggagtgtccttctcgccgaaattcgagatattaagaattttcgttcgccgaatcagctgcttgcttatgcaggtgcagaaccttccgtctccacttctggaatgaatcaaacggaaactggacgaatggtcaaacgtggctcttcgcaattacgctgggcactgcatgagtccgccaggctcatgtctatttggtcgccgtctatgcgtgtctatttccagaaaaaactagcagaaggaaaacactacaatgtcgctattagtcatgttgttcgaaaactggtgcggatcatttaccaactactgaaagataataaaccctatgaggagcagaaaatgatcgttaactgatcttttcaaaaattccctttgcctagggtttctttgtcatgccttcaaatcacatcaaactatgttattcaaccttttcattttttgcttgacttaatatagtttgt

SEQ ID NO: 8329 - DNA, 1439 bp, unidentified
  source 1..1439: mol_type = unassigned DNA; note = element_d09fb57
  misc_feature 1..2: note = core
  misc_feature 3..233: note = LE
  misc_feature 234..1424: note = CDS
  misc_feature 1425..1439: note = RE
  misc_feature 11..196: note = bridgeRNA
gtcctacctttcaagcgggtcggatctgatcattcgtaggatcggggaagcccaggggttccgggtatggctgtgagcttgtcgccgcttgatggctcaaagaacttggccgcccggagccccgcgacgactcgaccgctaattgggatacgcgacttgatcgcttcgtaggacaacgccggcgaggtcgtctgctgggaccaatgtgagacgacgagctggcggaggtggccatgccccagatatgggccggagcggacatcggtaaggagcatcaccactgcgtggtgatcgatgcccagggcaagcgactcctgtcacgccgggtcctgaacgacgagacggtcctgctggagctcattggcgatgtactcgccctctccgaggacgtcctgtgggcggtggacatcaaccacggcggcgcggccctgctgatcgggttgctcctgagccacggccagccgatgacctacctcaccggcctggcggtccaccaggcatctgccggctaccgcggccagggcaagaccgacgccaaggacgccttcgtcatcgccgaccaggcccggatgcgcaacgatctcggtctgctgcggcccggcgacgagatcgccgtcgacctgcgcaccctgaccgggcgtcgaaccgacctcgtctgcgaccgcacccggcagatcaaccgactccgcgctcaactcctggacttcttcccggcgttggaacggactcttgcgctgacgaacaggggcccggtcctgctgctaaccggctaccagactccggccgcgttccgtcgcagcggcgcgaagcgcgtcgagacatggctgaggaaccgcaaggtcaagaatgccgcagccatcgccgcctcagccatcgaagctgccgttggccagcagacatctctgccgggcgagaagctagccgccgccatggtggcccgtctcgcgaagggggtcattgccctcgacgaggagatcgccgagctcgacgcgctcattgaggcacggttccgcgaacatccgcacgccgaggtgatccgcagcctgccccggatgggcgccctgctcggcgccgagttcatcgccgcgaccggcggcgacatggacgcgttcagcacaccagaccgcctggccggcttcgccggcctggcccccgtgccacgagattccgggcgcgtcagcggcaatatgcggcgcccccgccgctaccaccgtgggctgctgcgggccttctacctctcctccatggccagcctcaggacatgcgccgcgtcgcggacgtactaccaacgcaagcgcgacgaggggaagggtcacaagcaagcagtgctctctctcgcacgccgccgggccaacgttctctgggccatgctccgcgacggagcgtgctaccaacccgcaccatcagtcacgctggcggcttgacatctctattgggaa

SEQ ID NO: 8330 - DNA, 1390 bp, unidentified
  source 1..1390: mol_type = unassigned DNA; note = element_d0a0390
  misc_feature 1: note = core
  misc_feature 2..267: note = LE
  misc_feature 268..1101: note = CDS
  misc_feature 1102..1390: note = RE
  misc_feature 1169..1384: note = bridgeRNA
taatggaatggtccgccgccgttgatagatataacggtgggcaaggaggcgtttccatgaacctgcacacgatcggcatcgatttgggcaagacagtgtttcatctggttggtttgagccaggccggagaggttgaggtgcggaagaggttttcccgtgcccagcttctgcgcttcaccgcgaacgtacaggttgatctgatcgggatggaagcctgtgccggctctcacttcctgggcagagcccctacgcgtgcaaggacacgaagtgcgcctgatgtctgcgcagtatgtgaagccgtttgtgaagaccaacaaaaacgacttcatcgatgcggaggccatcgccgaggcggtgagccggccgacgatgcgctttgttccgatcaagaccgacgaacaactggacatgcagtctctgcaccgggtgcgcgagcgttggatcatgcggcgcaccgcggtcgtcaaccagatccggggactattgctggaaagagggatcacgatacggacgggcaggtgccatctggatcgagtgttgccgaacctcttggaggataatgcgacaccgatatcgggagcactccgcttcctgctggcggagctgaagcaagagctggagcaactggccgctcatatcgagcaggccgaaacgctgattcaccgagctgcgcaggagagtgaagtttgccaacgcctggacgcgatccctggaatcggtccgctcacggcaaccgcactggtcgctgcgattggaaacggcggagcattccgtaaggggcggccgttcgcagcctgggttgggctggtgccccgcgagtattctaccggcggcaagcagacgcttcgcggcatcagcaagcgaggcaacagctatctacgaaaactgttcgtccaaggtgcacgcgcagtgctgcagttcagagacaagcaatgccctggcctgaagcactggctggcggagctggcatcgcgcagccattacaacgtcgtcggtgtagcgctggccaacaagctggcacgcatggcatggaccgtactcgccagcggcaacgtctatcggcctcccgacctcgccggtctgcagatgacggctgtctagcgacagccttggaaatcgccagcgattcccacatctgcaacccgcgactgcgaagttcaaaatcctgccaggtctgctggcgaactatgagatggcacaacggtcgaacccggcgccccctatacccgaaaccggaaaaagtcctttgagactgcccagttagtggggaacgaagcgcagcgcattccatcctggcccggagttcctactccaacaaaggccgaatacatttgcgcagaccaaaccgtcactctcatttttcccttgcagcaacgcggcggaccataca

SEQ ID NO: 8331 - DNA, 1286 bp, unidentified
  source 1..1286: mol_type = unassigned DNA; note = element_d0b214b
  misc_feature 1..2: note = core
  misc_feature 3..235: note = LE
  misc_feature 236..1279: note = CDS
  misc_feature 1280..1286: note = RE
  misc_feature 8..197: note = bridgeRNA
ggcgtatgaaatcccccggtgggttccccgcatgggagacagttcccggaaccggccggaggtgactccgaatccgcaagtcgcggccacgaaggccgctgacctctgacctgaccgtccctccggccgggaccgggccggcggaagtgacttgacagaaggctggatctcaacccaacgcctgcttgtcctccgccagccaccatcgtaggtcggccgatggaaggaggccagcgtggaggtggggatcggggtcgatccttcgaagagctcgctcgccgtggcggcggtggatccgctgggcagggtgctgggcacggccgagttctccaacgacccgaggggacatcgggccctgctcagatgggcccgtgaacgtggtccgggccgcgtgatcgggatcgagtgctcgctcagctttggagcgaggctgtcgaggcttctgcttaagtccggagaggatgtccgagaggtaccgaccacgctgacgcaccgaccacggcgccggcgagcctcccagggcaagtcggacatggtcgactcggtggcgatcgcccggatcgtggcgagcggtgaggtcttgccttcggcccaccggctggaggtgctcaccgacctcagggccctggtcgagtaccgcgaccagctcgttcgggcccggacccaggtggcgaaccggactcatgccgatctgatgaacgtcctgcccggctacgaacgccgggtgcccaaccttcgggccaaggcgcaccggaccacggcgaggtccctgctgagaggggatcggtcggtgcgagcggagctcgtccgaaagcgcctgggtgagctttcccgtctcgaaggggagatagccgccatggatcggcgcatccgcgcgacggtccagaagaccgggacgagtcttacctccatccccggggtcggtccgttcatcgccgccaagatcctgggcgaggtgggcgacccctccagagttcggtccaagcccgccttcgccgtgttgtccggcacggctccgctctccgcctcctcggggcaggtccaacgacaccggctgaaccgcggcgggaaccgtcagctgaactgggccctgcactacatcgccttggtgcagtgccggatctcacccgacgctcaggcctacatggatcgggcagcgggaagcgggcaagtcccacaaagaggccatgcgctgcctgaagcggcacctttcgaacgtggtctaccgtcacctcgtcgccgacgcgaggagggcggagctggcggcttgacaacatagaaggtct

SEQ ID NO: 8332 - DNA, 1436 bp, unidentified
  source 1..1436: mol_type = unassigned DNA; note = element_d0b9dc0
  misc_feature 1: note = core
  misc_feature 2..99: note = LE
  misc_feature 100..1137: note = CDS
  misc_feature 1138..1436: note = RE
  misc_feature 1201..1434: note = bridgeRNA
taatggaatggtccaccccgccccatatcggcttcaaatgagccatgatgaagtgagttgtgtgaacaatgtcattcatcaaaagaaacggagcgaaccatgaacgagcatagcaaaaaaggccaggtatgtactctcggagttgatttgagcaaaaccagctttcaattgcacggcgtagataaccatgggaaggtggttttcagaaaaaagctcagccgtagcaagctgttaccctgcatcgctaatcttccaccttgtgtcattggcattgaagcctgtggcggtgcgcattattggtgccgtcaatttacggccttggggcattcggttcgtattattgcccctcaatttgttaaaccctatgtcaaatcaaacaagaatgatgccgcagatgcagaggcaatttgtgaagcgatccagcgcccgagtatgcgctttgtgcctacgaaaagtattgagcaacaggacatccagagcattcaccgtgtgcgtagccaagcggttgcccgaagaacggcgcaagccaatcagatcagggggctactgatagaatacggcattatcattcccaaggggatttcttatgttcgaaaacacatcccccttattctcgaagagagagacaatggattaagtgatgtatttcgggccttgctcagcacgctctacgatgagatggttcatttagatgatcggattgaggcacttgagttacaactggcaaccatcgccaaaaaccatgacgattgccaacgtttgctcaccattccgggcgtcggcctgttgagcgccaccgcactgatcgcggcgattagtgatgtgaccgtgttcaaaaacggccgtgagctggccgcttggcttgggctggtgcctagacaacattccaccggaggaaaacccaccttgctcggcatcagtaagcgaggggatacctatctaagaaccttgatgatccatggtggcaggacggttgtcagggtggccgacaaacatgatgatcgccgtaatcgttgggtgaaggagcttgataaccgccgtggtaagaatatttcagccgttgcggtcgccaataaaaatgcgcgtattgcttgggcggtcttgagtaaaaaggaatcttatcaggcagcagcctgatcccgaccgagttggtcatgagatgcaaagaaaagttaaacagaaaagcggttaacaaggtagatcagcaacgagttgcgtggataaagtacaagtgatggcataaaaggtaagacctgcgttcctaaaacctgctagggtctagggctcatagaggccgatcatctgatgaggtaggagcgagcgaattccatcagggccagaggttacaaaaacctcagttaaaggccggatatatggaagcaatatctttctgtcataccagtaactttatcttgcatcgcgggatggaccatata

SEQ ID NO: 8333 - DNA, 1577 bp, unidentified
  source 1..1577: mol_type = unassigned DNA; note = element_d0cba15
  misc_feature 1..2: note = core
  misc_feature 3..273: note = LE
  misc_feature 274..1464: note = CDS
  misc_feature 1465..1577: note = RE
  misc_feature 10..253: note = bridgeRNA
gtataatatatttaggctaatgaaggcagcctatgagcctttagtagctgaaagattatacatgatggtgtataatcaggatattagatagaggatgtcgtattctccttgagacatggaactcgtactcgaaagactgacacctctgtctgataaaccgattacggataagttggatgttgaccggttcgccggtacttcgaatatagaacaaggcggtaacgtttatcaaataagagggactatctaaaatattttgttatggtgaactgaatgctgtacttaggaattgatattgggaaaaatacacatgtcgcctcattaatcgacgataatgccaagctgttgtttaaagcgttttcctttggcaatacgactgaaggcggcgaaagcctgatttcaaagttagcttctcatgtaccatcgatttcggaagttgagattggcatggaggcaacgggtcattattggttgtcgctgtactcttttcttgtagggaaagggtatgtcattcatgttgtcaatcccattcaaaccgatggatggcgaaaaggaacggaaatcagaaaacgcaaaaccgatataattgattccgtccttattgccgagctcattcggtatggtgattttcttgaaacctctttggcagatgaaaacacgatgtctttaagaaacttgacccgcttcaggcactacctggtctcttcaattggtgacttaaagcgtaaagccatttgtgttctggatcaggtgttccctgaatatcagtccgttttctccaatgtctttgggcaaacctcgaaagaactattgctacaattgcaatcgccagatgattttcaaagcatatccgccgaaaaacttgaagatatcctaaaaagcattaccttgaagaaatttgcaaaaaacaaaatcagcaccatatctgaacttgcggcaaattcttttggactttccttttgcagggatagcttttctttgcagcttaagctattgcttgaacaaatcaaattcattgaagcgcaggtagcggatgtggaagcggaaatacggcagctcctcgaaaaaatcaattctccaattactacaatccccgggattgggcccatcaacggtgcgaccattcttggtgaaatcggggatatctcccgcttttcaacccctgccaaactggtagcttacgctggaatcgacgcatccgtcaatcagtctggaatgtatcagagcacaaacaacaaaatgagcaaacggggttctccatacctgcgaaaggctctttttcaagcagctttagttgcatccaactgtgaccctacattcaaagccttctaccagaaaaagcgtatagaagggaaacatcatttgacagctatcggcgctgtcgcacgtaagctgtgctatacaatccacgccatcttaaaaagcaactgcccctatcaagtgcagactgtttcatcagactgattaattcattaattcctttttgacttggcttcggtcaggtctttttctcgtgtatttttatgcatcatctcccgctatgtttttttgttttttctattgactttttatagttg

SEQ ID NO: 8334 - DNA, 1382 bp, unidentified
  source 1..1382: mol_type = unassigned DNA; note = element_d0d787b
  misc_feature 1..2: note = core
  misc_feature 3..87: note = LE
  misc_feature 88..1116: note = CDS
  misc_feature 1117..1382: note = RE
  misc_feature 1147..1368: note = bridgeRNA
gatgggttggatggctcccgctcacggcatcgaggtgccaagatgtgattgctgtcaggcgatcacgagcagataggagccacccacatggagattaccaccatcggcctcgatttggccaagagcattttccaggttcatgcagttgatgctgcgggcaccgtggtcgtctgcaaggcattgcgtcgatcgcaggtggtgccgttcttcacgaagttgccgccgtgcctggtcggcatcgaagcgtgcggcacctctcatcattgggcacgcgccctggcaaaactcgggcacgaggttcggttgatgccgcctgcgtacgtgaagccgtatgtgaagcgcggcaagacggacgcgaatgacgcggaggcgatctgcgaggcagtgacgcgcccaacgatgcggttcgtgcccgtgaagtcgccggaacagcaggcggcgctggcgctgcaccggacgcgcgacctgctggtcaagcagcgtactcagctcgtgaacatgatccgcggcctgctcgcagagtttggcatcgagatcgtacgtgggctgcatcacgcgatcgaactggcagcccggatcgcgaagggcgatgcgcccgaggttcctgatctcgccgtgcgcgtgatcactggcttggccgggcagatcggcgacgtgcaggtccggcttgcggcgttggaaaaggagttgctcgcttggcaccggtccaacgaactgtcgcagcgcctcggtacaatcccgggtgtcggcttgatctccgcgactgcgcttggcgcatcggtgaccgacccaggccggttccgctcgggtcggcagtttgccgcctcgcttggcctgacaccacttcagaactcgagtggcggcaaggagcggatgggtcggatctcgcgcatgggcgatcgatacctgcggcgcctgctggtcattggcatgacctcactggtgcgccgcgcccgggccaaacccgactcggtcgatccgcgcatcgctaccatgctggcgcgcaaacctgcgcgggtcgtaaccgttgccgccgccaatcgtacggcgagaatcgcctgggcaatcatggcgcggggcggcacgtatcgtgcgccgatcggcatggcagcatgacggattagcagctcgacaccgagcggcttcaggaggttgtgagagcgaagagaagtgatggcgtaccggtcagaccgggagccgggacaccccgccgaatgtccaaggcatcatagcctgcaaagcagagtgggacccagctcgcggataccatcagggccagcagtcacaaaacggctgcatgaacaggccggacacaagactgcacccgaccaatgcgccagatcgtcaaatcggcacttgcaacgcgggagccatccacacag

SEQ ID NO: 8335 - DNA, 1481 bp, unidentified
  source 1..1481: mol_type = unassigned DNA; note = element_d0da593
  misc_feature 1: note = core
  misc_feature 2..109: note = LE
  misc_feature 110..1126: note = CDS
  misc_feature 1127..1481: note = RE
  misc_feature 1178..1402: note = bridgeRNA
gaatgaaagggacttccccgtcccgaactgggcgccttgcggcaaccggcaactgagtgccacgatgggaagcgctgtttctcatcaacgcatccggaaggggaagaccatggtgattctgagcgttggcattgatcttgccaagtctgtttttgcggtgcacggggtcaacgaggctggcaaagccgaactactgcgtccggccgtgccgcgcgacaagctgcatgagctgatcgcggcgctgccgccttgcgtgattggcatggaagcctgctcgggcgcgcaccactgggcccggctgtttcaggcgtcgggccacaccgtgcgtctgatcgcgccgaagttcgtcacgccctaccgcatgagcggcaagcggggcaagaacgatgcggccgatgctgcggcgatctgcgaagctgtgcggcgcccgcacatgcgctttgtgccgatcaagaccctggaacagcagtctctgctgatggtgcaccgggcccggcaaggctttgtcgagcagcgcacagccacactcaaccgcattcgcggctgcttgagcgagttcggcatcgtgctgccgctcaaggccgccaccgtgcgccggcgtgcctgcgactgtctggaggacctgccgggttacgccaacatcgtcattggcgatctcctcagcgaggtcacccgactggacgagcgcatcacgcagtacgaccaacacatcaaggccatggccaaggaggacgtgcgggccaagcgcctgatgcaactcagcggtgtaggcgagaccacggcaacctgcatgttggccatgatcggcaacgggcacgacttcgattgcggtcggcagttcgccgcctggctgggtttggcgccgggccaatacagctcgggaggcaagacccggctggggcgcatcaccaaagcggcggacagcgacttgcgcatgctgctgatcctgggggctagagccatgctggcggcggccaagaacaagaccgatgccaccagccgatgggctgtggccctggaggcacgacgcggctactggaaggcggtggtggccattgcggcgaagaacgcacgcatggcctgggcggtgttgcgtcagggcgaaggcttcgcgctgccgtcttgagcgccgggccagacaacgtgtcacgatgacatcaacttcaggagaattgctttcgaccgccgcgtgacggcaggcgttgatgacaacaggtttggacctgcgcggggcgtgaccgatgaactcaagggcggccagattgccgactaacgaatgggtcccccgcgtgcggttctcatcagggtccgtggcaaatgacatgccacacgaatgaccgtttgtagtttggccagtccgcaccttgttgttcctcttcgtcccctatgcccggctggttggctttgaatcaagatggaaagatggcccgctgcgcgggccacacctcaacttttgcttgacgtatggggaagcccttgta

SEQ ID NO: 8336 - DNA, 1163 bp, unidentified
  source 1..1163: mol_type = unassigned DNA; note = element_d0db0cd
  misc_feature 1..2: note = core
  misc_feature 3..215: note = LE
  misc_feature 216..1151: note = CDS
  misc_feature 1152..1163: note = RE
  misc_feature 13..217: note = bridgeRNA
cttgtcttatccagaacgtggctcttgtgcgatacaggagccgtcgtccggcacggcatttatgccgggcgacggcgagggtcggatcgtttcccgctcggtcgtgatggaccgtggaggagtaaggtcgccctcgtcttttctaatgacctgaacggatacttgggcgccgtttagcggttggcccgtatgacaagacaaggtggaaaagacatatgaacaataccattggcatcgacgtttccaaagacacacttgatgttcatcgtttgggcgacggtcagcacaagcagttcttgaacagcaagaccggacatgcgcatttgattaagtggattgaatcgcagcctgatccgctggtcatctttgaagcgaccggggcgtatcataggttattggagcgagagcttggcaaccgaccggtcccattcgtcaaagtgaacccaaagcaggcgcgcagatttgcccaagccagcggaaagctggcaaagacagatcgtgttgattgcgagatgttggccaaaatgggggctgccttgcagttgacgccaaaacccctcaccgcagaaagtctgtatgatctcagagatttattgtgcgcacggcgggctctcataaaagatcgcacagctgctaaggctcgcaacgcaacggtgacgcatgcgcttttgaaggggcaacttgccaagcgcctacgccatgttgagtgtgatattgaaaaaattgataccgcgatgttggcgcttgccaaccaagatcggcaaatgcgtgaacgattggacattttgtccagcattcctggcattgggatgacaacggcactcatgatcctggtggatatgccagaaatcggcggactggacggcaaacaagtcgcaagccttgctggcctcgcaccgatgtcacaaagctcaggtaaatggcaggggaaggcacgcattcaaggtggtcgcccaaatctgcgacacgcgatcttcatgcctgcgctggtcgcgatccgccacaacgcggatatgagggccaaatacgatcaactcatcgccgtcgggaaggaaaagaaagttgccatcacggcggtcatgcgcaagctgcttgtcctcgcaaatgccttactgcgcgatcatcgaaaatgggtcgaaaagactgcttgaccaagacggata

SEQ ID NO: 8337 - DNA, 1455 bp, unidentified
  source 1..1455: mol_type = unassigned DNA; note = element_d0e04d7
  misc_feature 1: note = core
  misc_feature 2..226: note = LE
  misc_feature 227..1441: note = CDS
  misc_feature 1442..1455: note = RE
  misc_feature 12..241: note = bridgeRNA
ctaccagagacttcccgcaggatcggcgtctggccagactcggtccaggcgtccgacgggatgctctccatgcggctgcccgcccgctgccgggtgtggctcactttcggtctgcagcccgtcggacaccgttgacgaggcgtggctccagaggggactgccctgctcgtagtagcactgcccacctcgccgtccctatcggcacgagcacaggcgggagcagcacatggagcacgtcatcatcggggtcgattcccacaagctgtcggccacgatcgaggtcgtcgaccagcacgaggagctcctcgggtccggccggttcaccaccgaccaggccggctactccgcgatgcggaagtacgcgaagatctggccggaccgggtctgggccgtcgagggcgccaacggagtggggcgtccgctcgcccagcgcctcctcgaagccggcgaggatgtggtcgacgtcccggccaagctcgccgctcgggtcaggctcttcgacaccggccacaaccgtaagaccgacgcacgcgacgcgcactcgattgcggtcgtggcggtccgcaccagcaacctgcgtgtcctgaaggtcgacggcgaacttgaggcgttgcggatgctcgccgaccggcgagaagcgctcacccgacgccgcgttcagaccgtggatcgactccaggcgctgctcgccgagttgctccccgggcaggccaagaaggacatcactcccttgcaggcaaaggcaatgctggccggcgtccgccctcgagacgtcgcaggaaagacccgacgccgcatcgccgcggaggaactcgctgagctggtcgccgtcgactcgaagatcaagaaggccaccgccgagctcaagaccatggtcctggcccgcgactcacggctgatggacctccgtggcgtcggacccgtggtggccgcccggatcctcgccgacgtcggggacgtgactcgcttcgctgaccgcaaccggttcgcctcctggaccggcaccgccccactggacgcctcctccggcgagcagaaccgacaccgcctctcacgtgccgggaaccggcggatgaaccacatgatccacatcgccgccgtcacccaactgcgcctcgccaccgagggaagggcctactaccgacgcaagcgcgctgacggcaagaagccgatggaggcgatgcgctgcctgaagcggcggatctctgatgccatctaccgacagctggtcgccgacgcccagcgcgcggcactcacagcctcgaccagcgcgggcccgggagggcacagcggggcgactctcacatccagcgcggtcgacctgcccccgcacatcgacacttcggatcagccacttcccggacccgcgaaaccgacgctacaacccgctaagggagccgggaagaccaccgccgagaggtccctcagcagagcgggttgacaacagaggggagc

SEQ ID NO: 8338 - DNA, 1245 bp, unidentified
  source 1..1245: mol_type = unassigned DNA; note = element_d0e9219
  misc_feature 1..2: note = core
  misc_feature 3..79: note = LE
  misc_feature 80..1087: note = CDS
  misc_feature 1088..1245: note = RE
agatgtaatgaaaacaaaaaaggcgtgcctccaagagtagagtacgtgctcgaagcacaagccctgaaggaggcacgagatgatccacgttggagtagatcttcaccagagattttgttgcatgacggcgctggaagcaagagggaagattttacaggcggggccggtgacgaacgagaagctggctttgcggcggtattttcggcagtttcgggggcaggaagtggaggtggcggtggaggcgtgcggcttctggccggcgtttcgcgaggtggtagagccggaggtgaagcggttggtgctggtgcatccgcagcgggtgaaggcgattgcctcggccaaactgaagaacgaaccgggtggattcggcgacgctggcgcatttgctgcgctgcgatttgttgccggagtcgtggaaggcggaccggagacgcaggcgcgggggcagcaagtgcggttgcgggcgacgctggtgcggcagcggacgcggctgaagaaccaggtgcacgcggtgctgcatcagaaggggctgcattcgccggtgacggatttattcggcaaagggggacggcggtggctggccgggttgcagctgccggcggcggcgcgggaagcggtgaacgtgtgcttgcggctgctggatggctacagcgaagaagtgcaaaaacaaaatctgcaattaagtgaaagagcaaaacaagacaagtgggccgagtggctgatgacgataccggggatcggggagtgttcggcgatgatgctgctggccgagatcggcgacatcggacgatttcgcgacccagaagcgttgtgcagttatgccggactggtgccgcgggtgcgggaatcggcgggcaaggcggcgcgtggcgggatcacgcggcagggatcgccctggatgatggtggaagcggcgcaggtggcgacgcgcagttcgccgggggctcggcgttcctacgaacggttgcggcgcaaaaagcacaagcacgtggcgcgagtggcgctggcgcgtaagttgcggatcgcggtctacgccctgttgcacgacggcgtagtgtttgaagaagcaaagtttgcggcggtgtaaggggaatccgtcagctcgaagtcatccatgctcttcgagggcgacgctcagagggagcggcggagtccggacataccttatgtgcctcgagcacgaatagaagcctgtccgcatcgccgcagaaaatacctgtggacaggtacgcctgttttcataga

SEQ ID NO: 8339 - DNA, 1428 bp, unidentified
  source 1..1428: mol_type = unassigned DNA; note = element_d0ec7f6
  misc_feature 1: note = core
  misc_feature 2..239: note = LE
  misc_feature 240..1415: note = CDS
  misc_feature 1416..1428: note = RE
  misc_feature 14..253: note = bridgeRNA
ctactagttccattgaccttaggtcgggccttggccgaggctcggtttaggtgtccggggtggtcgctctcatacgcggctgtcctggcgggctggtggcctgtgactctcatttggcgtgcgctgccccggacaccgatccggggcgggagaggctgaagaagggaatgctctgccattagtagcggtgccctcccggctccatccatcagttcggatcgagcaacaaggaggtcatcatggcaacacagcggcgggttgtgatcgggatggacccgcacaagcggtcggtcactgtcgaggtgatggaggccgacgagacgatcgtggggcatggccggttcggcacggatgtggccgggttcgcccagctggtcgggttcgccgcccaatggccacagcgggtgtgggcggtcgagggctgtgaggggatcgggcggcacgtggcccaacgcctgatcgccgccggtgagcaggttgtcgatgtgccggcgaagctgtcggcgcggatgcggatgttcgccaccggtcagggccgcaagaccgatgacaccgatgcccactccatcgccctggtcggcgtccggatcgccggcctccaggcggtcgtcgccgatgaccagttggagatgctgcggctgttggtcgaccggcgccgccggatcgggcaagagcacgtcaccaagatctgtcagctccaccaactgctattggagcttgtcgcaggcggtgcgaagaaggacctgtccgccgcccaagcccgcaagatcctcgccggcatccgaccaaaagacgatgtcgggaagctccgcaagcgggtcgctctcgaactggtcgtcgatctcgagcggatctatcagcgcaagaagcaagccaacaaagagctcgtcaccctgctcaagaccaccggcaccgggctgctggacctgcacggcatcggccccaccggagcggcccggctcctggtcgaggtcggtgacatcacccggttccccaaccgtggccacttcgcgtcctggaccggcaccgcccccatcgacgtgtcctccggcgacaagcaacaccaccggctctcccgcggcgggaaccgacagatcaacatggtgctgcacatgatggccgtcgtgcagctccgcaaccccaccgagggccgggcctactacgaccggaaagtcgccgacgggaagagccccaacgaagccatgcgctgcctcaaacgacgcctctccgacatcgtgtacagagcactcctcgacgactacgtcacagccaaagcgacaggcccgggaggacaccggggagcgacactgaaatccagcgcggccggctcacatccccacaccagcacttcggataagtcacttcccggacccatcaccacaaagcctacgaccgacctgcccaaggcgtcttgacacagaagggagc

SEQ ID NO: 8340 - DNA, 1515 bp, unidentified
  source 1..1515: mol_type = unassigned DNA; note = element_d10683f
  misc_feature 1..3: note = core
  misc_feature 4..248: note = LE
  misc_feature 249..1490: note = CDS
  misc_feature 1491..1515: note = RE
ggtcactcctgtacctcttctcttgcaggcgcgaagagtgcgtctgtggtagggatgggacgggagccggggtgacggcctcgtgcggttgcccttcgagggccttcatgacactgccgcccccggttccttcgggactgcgtgaccgacgacagagggatgctgccggcagcgccggtgagtgaccactcggctgcggtctcgacccgtccaattcctacctcgggtatcagaacgggaaggggacggtgttgtctttggtcgaggcattgttcttcgtcgggatcgattgggcggcaaaggttcacgcagtgtgtgtgctgaacgcggcgggacggaaggtggccgcgttcagcatcgagcacacggcggcgggattcgccaagctggccgcacggctggccgggctcgccgaggatccgcaggcggtgccgatcgcgatcgaacgcccggacgggcggctgatcgacgccctgctcgaggccggtcacccggtggtgccggtcaagccgaacgcgatcaaggcctggcgcgatggcgaggtgctctccggcgccaagtccgaccccggcgatgccgaggtgatcgccgagtacctgcggctgcgggcgcacaagctgcgcccggcggtgccctacagcgacgacaccaaggcgctgcgcaccctgacccgcacccgcggcgagatggtcgaggcgcgggtggccgcgaccaaccagctcgcggcgctgttggacgcgtgctggccgggggcgaaggaggtcttcgccgacgtcgccagcccgatcgcgctggccttcctgacccgctacccgacccctgcggccgcggccagcctcggtgtgaagcggatggccgcgttctgcgccaagcacggctactgcgggcgccgcagccctgaggccctgctggaccggctgcgcagcgcgcccgctggcatcatcagcccggcacagaccgaagccctgcgcgacgccgtcatcgcccacgtcggcgtgctcgccgcgttgaacaccgcgctcaaggatcttgaccggtcggtggccgcgcacctggccgatcaccccgacggcacgatcttcgcctcgttcccccgcgccggcaccatcaacgccgcccagatcctcgccgaatggggcgacgcccgcgacgcctacaccgggcccgaagccgtcgccgcgctcgccgggctggtgccggtcaccaagaagtccggcaaacactccgcggtgcacttccggtgggcctgcaacaagcgcctgcgcgtcgcgatcaccaccttcgccgacaactcgcgtcacgaaaacccctgggccgcggacatttaccgtcgcgcccgcgcctcgggcaaggaccatccacacgcggtccgcatcctcgcccgcgcctgggtccgagtgatctggcgctgctggcagaccggcataccctacgatcccgccctgcacaacggcgcccaacccgcgctcagcgccgccgcagcagcctgatttcagctctgaggttgacacagag

SEQ ID NO: 8341 - DNA, 1588 bp, unidentified
  source 1..1588: mol_type = unassigned DNA; note = element_d110a81
  misc_feature 1..2: note = core
  misc_feature 3..245: note = LE
  misc_feature 246..1424: note = CDS
  misc_feature 1425..1588: note = RE
  misc_feature 3..224: note = bridgeRNA
ctcgtattatatagacatagccattctttaccttttctacaggtctggctataatatttaagatactgtggattggtgaattcctcctaccacccgatggtttaagttaggctccaaccacagtctctttgtttatttgttgatcagttagataccgcatgacggtttatttagaacgaggttacgatcgcaaagagtacctgtggtcctaaacagtatcaattacattgcaaaggagaatttgtatgatctacgttggaattgatgttgccaaggataagcatgactgctttatctctaactcacatggcgaagtgttatttaatgccttttccatccctaacaaccgcgaaggttttaatgcactttaccagaaaatccaatccgtaactaatgatctgtccaaagtaaaagtaggactcgaagccaccggacactacagttacaatcttctgggttttctctttagtaaaggtttgccgacctacgttatcaatccgttacatactaatctttacaggaaaagtctcagcctcagaaagacgaaaacggataaagttgatgcccgtaccattgcttccatgatcatgtctgacgtgaacttaaagtcctactcagacacatcatatcacaatgaagaattaaagtcacttacccgttaccgttttgagaaggtaaaggaacgggcaaaactcaaaacttccgtctcacgccttgtctgcatcctattcccggaattggagaagctcgtgcctgctctccatatggcttccgtctacgcgctcctgtcagagttcccttctgctgcggcagttgcttctgcacatctcacaaggctctcaaaccttctttccgaaagttctaaagggcattatggaaaagataccgctgtcatttttcgggaagcagcaaggagttccatcggctcacatatgcctgctaagtccctggagctgaagcacaccataaggctcatccgggaactggatgcagagatcgatgaaatcgaaaatgagatcaaacggatcatggatgaagagatccattcacccatcctgactatcccgggtatcagttaccgcatgggtgccatgatcattgctgagatcggcgatttcagccgctttgactcccctgacaggatactcgcctatgccgggatgtcaccgtctacctatcaatcggggcagctcgataactgttatgcccacatggaaaaacgtggctccagataccttcggtatgccctttataatgccaccaaatacgtctgtaaatgggatgaatcctttggtgcatacttagccaagaaacgggcagagggaaagcattacaacgttgctttatcccatgccacgaagaaacttgtacggctgatctatgcaatggagaaatcaggacagccctacaataaagctgcttaattctttccgtaaatatctccttttagagtgtcagctatgacactctatgtgtcatgcagttttcaaggtactaagaatccttttttgattcttttatgcctgaaatgccgtctggcaatccattcaaaaattttcacttttagacttgacttttaatagttagt

SEQ ID NO: 8342 - DNA, 1988 bp, unidentified
  source 1..1988: mol_type = unassigned DNA; note = element_d111e70
  misc_feature 1..3: note = core
  misc_feature 4..187: note = LE
  misc_feature 188..1288: note = CDS
  misc_feature 1289..1988: note = RE
  misc_feature 13..200: note = bridgeRNA
ttccttaccttgttgctcgggcggtttcggtgcagtcgtagtgtgtcgatcgttcgaggacggcgggtatggctctcgcgttttcgccgctgtgacggcttgtgaagaatggccgcccgccgtccacccgatggttcgaccgctaattgagagaagcgaacagatcgctgcgtaaggaaacgtcggcgtgaccatcaccgccacgagggaagtgaagggagcggccatgccgcagatttgggccggaatcgacgcggggaaggggcaccaccactgcgtcgtcatcgactccgacggcgccaagctccactccgcccgcgtcgccaacgatgagacggcgctgctcgatctgatcgccgccgtcaccgaactggctgccggcgacgagtgcctgtgggcgatcgatctcagtagcgggggcgcgtcgctgctgctcgggctcctcgcggctcacggtctgcccgtcgtctacatcccggggcatgcagtgcaccacgccgcgaaggcgtatcgcggtgacggcaagaccgacgcgaaggacgcggcgatcatcgccgaccaggcccggatgcgccgcgacctacaagtactgacggtcgaggatgagatccgcatcgagctgcgggcgctgacggggcaccgcaaggatctcgtgtgcgaccgcacccgagcgatcaaccctctgcgggcgcacctgctcgaatatttccccgcgctcgagcgcgccttcaactactccgccagccgcgcctcactcatcctcctcaccggctacgcgacaccggatgctatccggcggatgggggagtcccgccttgcccgatggcttcgctcgcagggctgccgaactgcggtcgcgaccgcctccgacgcggtcgctgcggcgaagagccagcagaccgttctcccgggccaggcgatcgaatccgagctcgcgcgtagcctcgcgcacgacgtcatcgcgctcgaggcgcgcatcgcggagatcgatcagctcatcgccacccatgtcgagacgagtcgtgccgccgagctcctgcagtccatgcccggcttcgggcccctgctcgcggccgagttcctcgcgtcaaccggccccgacctcagcgcctacgtcagcgctgatcggctcgccggtgtcgcgggcctcgcgccagcaccacgcgactcgggaaggatcagcagcaatcatcatcgacctcgccgctacgaccggcgcctgttgcgcgcctgctatctcgcagcgatggtcagcgtccagcagaagaccgaatcgagagcgttctaggaccgtaagcgcgctgaagggaagtcgcacaagcaagccatcctcgcgctcgctcgccgtcgtctcgacgtcatttgggccatgtttcgggacgaccgcagctacacgcctcctgctccctttgagtgtgactttgagggaactgcaagtacgtgtgcgaccccaaaggaacctcaaacggtggactcggctaggaccgtcttcgctgttgcctgactgatacgaggtgggccgttggcctgtcagccttcgggcagctcccaaccattcgctcggcaggagctggcgaacgccgcgctggccgtctggaacgcctcgtcgtcgccaccctcaagggtcgtctccatggcggtcaccgcttccgtcaactccttcgggtcctccgcgctcagagactcagacatcgtacgcagcagctgctcacggcgaccctcttgctgtcctgcgctgccttcgctgacccaggaggagtggtagttgcacgcatccgtcgctgatgtggtgagcccgcccgagcaggccgagagagcaatcagcatcgccgcaaccggcgcgagtgccagtccccggacgaagacgcctcggcggacgagagatcgactcgtggagacctcttcgcgcatgcattgacgctactgctaccgcggccggacggagccggccgaaggagcctgcggcactgttgacaacctgattgaga

SEQ ID NO: 8343 - DNA, 1364 bp, unidentified
  source 1..1364: mol_type = unassigned DNA; note = element_d117bff
  misc_feature 1: note = core
  misc_feature 2..76: note = LE
  misc_feature 77..1108: note = CDS
  misc_feature 1109..1364: note = RE
  misc_feature 1136..1354: note = bridgeRNA
tactgagatggtccgccgcttgaacttcaccgtagtgaagaggatcttgtgggcaggttcaaggaggattatcgagatgcagattcgttcggtagggattgaccttggcaagacgacctttcacctggtggcgctcggcgataacggcaaggtgctgctgaagaagaagtttacccagaggcagctgattactttcacagcgaacctgcagaccacgctgatcggcctggaggcatgtgccggagcgcactttcttggtcgtgctctgcgtgaacagggccatgacgtgaagctcattccggctcagttcgtgaggccatttgtgaagtccaacaagaacgacttccttgatgcagaagctatcgcggaggctgtcgatcgacagaacatgcgtttcgtgtcgatcaagacagatgaccagctcgatctgcaggcgctgcatcgtgtgcgcgaccgcttgatcacacgacgaacgtccgtgatcaaccagttgcgtgccttcctgctggagcgcggcctggtgttcgcgaagagcccggccaagctgcgcgagcgtatgcctgagatccttgaaaacgccgaagaagatctcactccgcggatgcgtaacctgctcgctctgctttggaacgagtggaaggatcttgagcagcaggtggtcgatctgaaccatgaagtggagctgatcgcttccagtgatgcggcatgcctacggctcaggcagatccctggcatcggccctttggtcgcaacagcgatcgtggcttcgatcggcaacggtgctgcgttccacaagcggcgagagttcgccgcctggattggactggtgccgaggcagtactcgaccggcggcaaggcaaagctctacggcatcagtaagcgaggcaatcgctacttacgcaagatcctcatccatggagcacgtgccatggtcttacgctgcaagcgagaccgagttcccatgggggcatggatgacggctcttgaagccagagccccacgcaacgtgctcatcgtcgcggcagccaacaagctggcacggatcgcatgggcggtgctgtcgagcggccaagactatcgggcagttcaagagccagttgctgcgtaggcaagcgtaacgatcaacatcaagttctcccaccgaggtctgcaccggacaagtaaggatgaaagaacagtcaaaacggcgcacctgaagcctgtttgctcaaatggcccttacacggcagaggggtttcgaaggacaggtacgcggcgtatctcatcatggccaggagacacctctccacacaacaggccggatacattgacgcagactttcttcatccaccaacttttcccttgcagtcagacgggaccataca

SEQ ID NO: 8344 - DNA, 1542 bp, unidentified
  source 1..1542: mol_type = unassigned DNA; note = element_d12d443
  misc_feature 1: note = core
  misc_feature 2..247: note = LE
  misc_feature 248..1426: note = CDS
  misc_feature 1427..1542: note = RE
  misc_feature 6..224: note = bridgeRNA
tcgtattaataggtcagccagagatttttctggttggcctatttttgtaggcattatacgatggtggtagccgggagaacgagggtggcttagggacgtagatcccgttaaaaaaacagttctctcactaccgtccaatgaccatgtttgagctggtagaggctttagacctcgcatcacaagcgaagctatggggttggagaccatgtgggaatgccggtaaatcgaatcaaggaggttattatgcatgcagccagtagtaggaatagacgtggcaaaaggggttagcgtgatccaagactttatcggtcgtgaagaaccctacggaaggatcgagaaacttcagcatgggaaggaaggttttgaacagctaggggaactgttaggaatgctcaaacataaatgtgacgacgagcctgttgttgtccttgaggcaaccggacattaccatcgaagtctggtagggtatcttaaacgctgtggatggacttattgcatcgtcaatcctctgcaagcgaaacgatcaaaaggcacgcaacttcgcaaggtgaaaacagatgcagcagatgcatggcatttagcggagatgtattaccgaggggacgtaaaagcgcatcgtgagtgggaagaaagctataccgagcttcaacacctaacgaggcaacatgagttcgtaaccgcgatgtacgtacaggccaagttaaacagcagagctttgcttgagcaggtgtttccagagttcatcggtttatttcataatctgtatgcgaccacgtcattaaaagtactagagcgatgtttggagaacaagatcggggatgtgggggatcttatccgtgaatgtgtaggtaaatcccactccaatggatggattgaggagaaaacaaaacggttgaaggaactcatgcagggctggaaagcacaagagaggagtcaatcccagagcatagcgttgactagcatggtctcactgctgttggaattcgataaacagttaaatcatttggagaagcagatggaagaacgggctggggagctgcctgaagtggaattggtcaaaagtatcccgggtgtagggaacaagctggcggcagccatcgtggcagagcttggtgaagtaagccaattcaaggatgcgaagcaacttgtagcctacgcaggcttagacccggggatctacagctcaggaaagttcacggctacaagcaaccggattacaaaacgaggctcaaagagactacggcgagccctatatcttgctgtacagtgcggaattcgcaggtgtgccaaccgcaggataagtgaatattacgacaagaaaagaaaagagggcaagccctacaaggtggtcgtgatcgcctgcgccaacaagcttctccatcacatttatgccatcctaagtaaaagcgagccctacaaggcctaaaaaccatattttcccataaccttcacgccaatgaaggttatttttgctgtttagaaaagtatatcagtattctatgatttaaccaagctgtaatgcttgacaagtattagctggtt

SEQ ID NO: 8345 - DNA, 1648 bp, unidentified
  source 1..1648: mol_type = unassigned DNA; note = element_d12da00
  misc_feature 1..2: note = core
  misc_feature 3..67: note = LE
  misc_feature 68..1234: note = CDS
  misc_feature 1235..1648: note = RE
  misc_feature 1283..1498: note = bridgeRNA
agaagctatgggacgggcggcgagggagtgacaccatcgtcgttgcataaaccgatggagatgtcccatgacgacccaaatcgatgaccagagccgttccctcgtcgcccttgagcaagataccaccgtgatcgcggctgtcgaactgagccagtcgagttggctcgtcggcgcgatggttcccgggcttgagcgccagccgcagaagaagctcgagccggacccgtcggcgctcgtcaaactgctggagcgctggcgggacgagggtgtgagagtaggacggacgatgcggcggatcgtgctcgccttcgaagccggtcgcgacgggttctggctggcgcgctggctccagaagcgcggcatcgagacccatgtcatccattcgaccagcgtcgcggtctcgcgcgagcacaggcgggccaagactgaccggctcgatctcgcgatgctcatgcgggtgtttctcggctggctccggggcgagcgcaagcactgcagcatggtggcgattccgacgctcgagcaagaggacgccaagcggccgagccgcgagcgcgagagcctgaccggcgagaagaccaggatcgtcaaccgcatgaagagtgctcttgcccggctcggcatccgcggcttcaagccggagctgcgcaaggcgccgcagaagctggcggcgctcagcacgccggagggcgtggcgctgccgcccaacacgcgggccgagatcgcgcgcgacatggcacgcttggtcgtggtgcgcgggcagatcgaggtggtcgagcggacccgcctggagcgcctgcaacaggcggcggccgatggcccgaatgcgatggtgctgctcttggcccgtgtcatcggcgtcggcgtcgagaccgcggacatgctggttcaggaggtgctctcccggaaacttcgagaccggcgggctgtggcgcgctatgccggcctcacgggcgcacccgacgagagcggctccaagcggcgtgagaagggactggccaaggcgggcaatgcccgagtgcgccgcggcctgatgcaacttgcctggcggttcctgaggttccagagggacagcgcgctcacgcaatggtaccgggcgcggaccgacggtgccaagggcgcgcgcaagacaactatgatcgtggcgctcgcccggaaactgctcatcgcgctgtggcgcatggtcgagaccggcgaaatcccggccggcgtcgcgttgcggcaggcggcctgagcggcttggtcgtcgaggagcggaaacacttagttcggcgcccggtcgcgctttcccgacaggccgtcgatgacaatccgaggtggcggtgacccgaacagaaacctggcttcgatgccgtctggagaatgggcccgccgcttcggagcctcgccgtcgaagcgaatggctgcttcatggtccggatccaacgcggatccaaccgaatacaaggtcgcggcgcgatgctttgcgcctaatggcgggctcccctcgggtcgttcccgtagtgcctgaccctatccacagtccgacgccgcctgactcgcggcggtcgatcggcgtcggactgtggatagggtgctgctaccgagtggttgaaggaaaaggaggtcggaagcggcatcaagagcttgacagaaaaatcctcataca

SEQ ID NO: 8346 - DNA, 1580 bp, unidentified
  source 1..1580: mol_type = unassigned DNA; note = element_d133af2
  misc_feature 1..4: note = core
  misc_feature 5..257: note = LE
  misc_feature 258..1460: note = CDS
  misc_feature 1461..1580: note = RE
  misc_feature 14..277: note = bridgeRNA
ttttagtaccataaaagtgtagttgttagagagtaattaactctgacacctgcacttattttatttataataaggggagtcattggtcttacgtgggcttttttggatctttgcatccgtgaataaaaccgttaaccaaccccttgttataagcattcgattaagcaggtagggattcgctcccgtgtaaccaactaaactggatggtaataagtgcggctggaacaatgacgaataacagttataggaggttcgagatgataagcgtaggaattgatgtatcgaaagggaaaagcaccgtctgcgtacttaagccatgcggagaaatagtgtgcagcccttttgaaatgcagcatgtgcaagaggatttggaaggctttcacaatctgcttcaaaaattagatggggagatacgtattgtgatggaagctacgggcatttatcatttgcctgtattaacgttccttcacgaaaaagagtatttcatatctgtcattaatccgtttgcaatgaagaagtatgcgaaggataacagcatccgaggagcaaagaccgacaaacttgattcaataatgattgcgaattacggaattgagaaatggttcaagctgcaaaagtatgaaggtgatgaagaaacctatgcggagcttaaacttctgggacgcagataccggtactatatggagcttcatgtgaaagctttgcaggagttgacgcatatcctggattatgtgatgccgggtattaagaagatgtttaacagttggaatgaagcaaatggcagggacaagcttagcgactttgtggagaaattttggcactttgatttcatcacatccatgagtcttgaaacatttgctaaggagtatcttgtttgggcaaaagaaaagaaataccaccgaagcagatccaaggctgaggcagtctatgaattagcttcaagtggtattcccacactatcttccagtaccccatccaccaaaatgttagtacaggaagctgtatcagtattgagaactgtggatagttctctgtctctgattttaacacgaatgcaagaacttgtgaagtccctgcctgaatatgaggcggtcagggaaatgggcggagttggcgaagtccttgcggttaagctgattgcagagattggggatgtgagaagactacacagcgcaaaggcactcatagcatgggcaggaattgacccaccagcatatgaatcagggcagtttatcggttcaaaacgcaagataacgaaacgaggttcttcaacactcagaaaggtgggatatgaggtgatgagagttcttaagagccatcctgctccaaaagatgatgctgtatacaactatatcttaaaaaaggaaagcgaaggtaaaagtaagaaacatgcaaaaattgctggcttgaataaatttctgcggatttattatgcaagagtaactgctgtttatcaatagattgcgaaaacatgagtttgtgcaggctggagcacaatgccagcctttttagcatgcaaaaaatagacggatgaaataatttaataatctgctgaaaagtccttgacttttgttagcagg

SEQ ID NO: 8347 - DNA, 1435 bp, unidentified
  source 1..1435: mol_type = unassigned DNA; note = element_d13698d
  misc_feature 1..2: note = core
  misc_feature 3..344: note = LE
  misc_feature 345..1184: note = CDS
  misc_feature 1185..1435: note = RE
  misc_feature 1253..1374: note = bridgeRNA
taatcgatggactcgcccccgccgaggcatcacagtgccacggtggcgttcgaagaagccaacggcagcgagggcgagaccatgaaaaagcatagctccaagcaagcttctctgtcttccactgatgtggaatcttgcaccaccattgcgatcgacctggccaaacaggtctttcaattggcaggtgaggatgctactggcagggttatctacgaagatcgcattaaatcgcggcaagctttccacgatttcctgatcagattgccctccacagtggccgtcttgatggagtgcggccctggtgcacaagcctgggcaaggctgttgcagacccaaggtaaccagtgcgtattcttcctgcgcagcgcgttgccgaacaccgcagcggtgcaaagaacgaccgcaacgacacccatgccattttgcgtgccggccgagatagcagcatcgcggcgatacccatcaagagcaccgcagcattggccatccaggccctgcaccgtgttcggcgcggcagcatcaagcggcatacagccttgggtaatcagatgcgtggcttgctgcttgagcacggcgtatccatgccgcagggcgatgcagcgatcatcaagcatgtgccgcggtgcctggaggatgcttctttgcctttgccagacttgttgcgcgagctgctcgatgagctgttggctgactggctgtccctgggtgagcgcatcgcccggttgagtaagcggctggaagcgacagctcgcgaggacaaggttgcgcagagactgatcaccattcgtggcgtcggtcccatcaccgccaccgcgatcgtcgcgaagcagacagaacccagccgtttcgccagtggccgaatgtattcagccttcttcggcatcgtgcccgaccagcacagcagcggaaacaaggtcagattgggcaggatgagcaaacgaggtgatggctacatacgcagcctgatgattcagggcgcgcatgctgtcttgagtcagctaaagcctgattccgatcagccagacgatcgccgcctcttacgctggctgtctcgccttggacgcaaggaggcggcgatcagactggctaatcggaatctgcgcatcatctgggcgctgttgcagagcgatcaggtttatcaacgcaaaccgaacagcaagccggaggcggctatgagcctctgaccaaccgagtaatgccaccggggcgctgagcgctccaacccctgctagtgaacatcgacccttggtaagaccgtcgcagattgatgcctccgctcctacaggcctgttagtggcctcaatgtaaacggcactctgcgagctcaccacgatggtggccagaagcaaaaagcttcctcgaataggcctgatacatagatgcaaccgggttcctatgttcaaaagcagctagacagtgtgggcgagtccataca

SEQ ID NO: 8348 - DNA, 1306 bp, unidentified
  source 1..1306: mol_type = unassigned DNA; note = element_d13b637
  misc_feature 1: note = core
  misc_feature 2..67: note = LE
  misc_feature 68..979: note = CDS
  misc_feature 980..1306: note = RE
  misc_feature 1101..1292: note = bridgeRNA
taatgggatggaccacctccttcctctgcgattaactgtacgaaatgtgcccagcaggagaatcaccatgaatatcgtatatctgggtatcgatctggctaaaaatgtttttcagctttgtgggctaaaccaggccggtaagccagtttattcaaaacgcactggtcgaaaaggattactccagacggtggcaaatattccggcctgcctgactggtgtcgaagcgtccacgggggcattttactggcagcgtgagtttgaaaaactgggacataaagtaaaagttatcagtcctcagtatgtaaaaccctttggccgcggtcaaaaaaatgacggtaatgatgcacaggtcatagccgtggctctgatgcagccaacaatgcagttcgtgccgccaaaaagcccggaacagcaggatattcaggctttgcaccgggcaagacagcggattgtcaatcatcgtactgcgacggtctgtcaattcagaggacttctgcttgaccgtggaataacaatcggggcagcagtctcaggagttcgtcgtgccgttccgctgatccctgaagatgctgaaaatggtctcagtgccagaatgcgcaggacgattgcagaactttatgatctctttaacgatcttgctcatcgtataaacttttttgataaagaaatcgatgctgttttcaagcaatcagaagcctgccaacgcattgccaaagttaaaggcatcggtcctaaaacggcgacggctgtcgttgccgcgactggcaaaggaactgaatttaaaaatggtcgtcattttgccgcatggctgggtctggttccccgacagcactcgagtggcgacaggcaggtactgatgaatatgacgaaaaaaggcgacaagcatttgcggactcttttattcatggtgcccgcgctgtcgtcagggttgccacgaatagcaatgatggccgtctgcatcagtggattaatcagttgaaggaacggcgctggtttaataaagcgacagtggcggtagctaacaagaacgcgagaataatctggtcgatgctgagaaatgacacagaatatcaggcggccggaagttaatcccatacaagaaaagttgcagtgtactgaaaaatggcgacaggttgcaccagcacaatcggaacctgatttttatactggcctcagaggccgtccagttgttgaggcgattgtgtgcggattacccatttgggcacaggttttcctgatgccggatagatttaagcaacaacctaaaatcagattcagtgcttgcaaaacggagatagttcataga

SEQ ID NO: 8349 - DNA, 1444 bp, unidentified
  source 1..1444: mol_type = unassigned DNA; note = element_d13b747
  misc_feature 1..5: note = core
  misc_feature 6..233: note = LE
  misc_feature 234..1427: note = CDS
  misc_feature 1428..1444: note = RE
  misc_feature 1..237: note = bridgeRNA
cccccgttatctttttggtggctcctgatcaaggggctctggtcgccaggcccggcatgacttatgcccccagtcgtacccatgatccggggggtggtgtcaccgggtttggtggcatcgagggaccgctgatagggacacggccgcccgtagggtaggtctctccataacgtggctgctggccgtcgatgctcgatcggtgaccggccgcgacgatacgaaagataccgtgcatggacaacggttacggggtgttcctcggcctggacgttggcaagagcgagcaccacgcggtcgggttggacccggctgggaagcggctgcacgatgcgccgctgcccaacagcgagcccaagctgcgggcgatgttcgccaagctcgcggtgcacggcccggtgctggtcgtggtggaccagccggccacgattggtgcgctgccggtcgcggtggcccgtgcttgcggtcacgaggtggcgtatctgcccgggctggcgatgcggcggatcgctgacctgtatccgggcaacgccaagaccgacgcccgcgacgcctacatcatcgccgacgccgcccgcaccttgccgcacgcgctgcgccgggtcgacgtcggtgatgaggccctggccgagctggacgtgctgatcggctacgacgacgacctcaccgccgaagcgacccggctgagtaaccgcatccgtgggctgctcactggcctgcaccccgcactcgaacgcgtcctcggccccaaagtcacccacctcgcggtgctggagatcctgtcccgctgcggcggcccgatcggcatccgcaaggccgggcgccgcaaactcacgtcgatcgcgaccaagcacgcgccccgcatgggcgccaaactcgtcgaaaacctcctcgccgccctggatgaacagaccgtggtcgtccccggcaccgccgcggcggacaccgtgctgccccggcttgctgagagcctcaaaaccgttctggcgcaacgaaaaaccgtcgccaccgaggtcgaggagatactcgatgcgcaccctcttgcccgggtcctgacctcgatgcccggcatcggcgtcaggaccgccgcccgcatcctgctcgagatcggcgacggctccgcgttcgccagctccggccacctcgccgcctacgccggcatcgcacccgtcacccaccgctccgggtcctcgatcagaggcgagcatcccgccagaacaggcaaccgcaagctcaaacgcgcgttcttcctcgccgccttcgcagcactgtccgaccccaccagccgcgcctactacgaccggaaacgggccgaagggaagaaacacaacgccgccctcatctgcctcgcccgacgccgctgcgacgtcctgttcgccatgctccgcaacaagaccttctaccaacatccggcaccccacacggcttgacaaattccatagggaca

SEQ ID NO: 8350 - DNA, 1594 bp, unidentified
  source 1..1594: mol_type = unassigned DNA; note = element_d148bb5
  misc_feature 1..2: note = core
  misc_feature 3..281: note = LE
  misc_feature 282..1463: note = CDS
  misc_feature 1464..1594: note = RE
  misc_feature 10..260: note = bridgeRNA
gtataatatatttaggttgataagggagcctatctcccaaaattaactgtttaattatgcgtcaaaatgatgtataatggttttattagatagaggatgtcgtttcctccttgaggggcatactgctacctcgtgcttgaaagactgacacctctttctgataaacagattacgtataagttggatgttgacagcttagctgtacttcgcatatagaacaaggcggtaacgtttatcagcaaagaggaactatctaaaatctctttttgtaggtgaaacatatgttgtatttagggattgatgttgcaaaacataatcatgttgcttctttgcttgatggaaacgctaaacctttattcaaagctttttcattcgctaattctactgatggcgctgatagccttctgcaaaaattgtattctcatattcaatgctctgatgaggtcgagataggtatggaagctacaggtcattattggctgtcaatttattcttttctcattaataacggttttgttgttcatgttgtaaaccccatacagacagacggctggagaaagggtactgagatacgcaaacgtaagaatgatattatagattctattttgattgctgatctcatccgttacggtgacttcgttgaaacgtctttatctgatgaagatactatgtcgcttcgtaatttgtcccgtttccgccactaccttgtatcatcgataggtgatttgaaacgcaaggttatttgtgtattggatcaggtttttcccgaatatccatctgtcttctctgatatctttggggaaacctctaaggaacttctttcgcattttcaaaccgcagatgattttgaaaacatcacagccgaacaactggaagatgctcttaaaaatgttgtttttaaggggtttgctaaaaacaaactcactcatatttcaaagcttgcagctcattcattcggtttggatttctgccgtgacagctttgcattgcagttaaagcttctcatagaacagataaaattcatagaagctcaggtcgatgatgttgaaaccgagatacatactatacttgacaggattaactcacccattacaaccataccgggtataggggctgtaacaggtgctgctattcttggcgaaataggtgatatatcaaggttctccaacgcctcaaagctggtcgcatatgccggtatagatgcgtctgtaagccaatccggtgagtatcagtcaacgaacaacaaaatgagtaagcgtggttcgccataccttagaaaagccttatttaatgctgctcttgttgcagctttccatgaccctgtattttctgctttttatcaaaagaagcgaagtgaaggtaagcatcatcttacttctataggtgcggtagccagaaagctttgtaacactatatttgccgtgctaaagaacaacaccccatatgaagtgcaacagaaatagctgctacatatgcacatcctccttctaacctgcgtttttgcacaggtctttttgtggtgtatttttattcataaagcttgaataaaaaattttaatgtttttttattttacctattgactttttatagttg

SEQ ID NO: 8351 - DNA, 1370 bp, unidentified
  source 1..1370: mol_type = unassigned DNA; note = element_d14a7b6
  misc_feature 1: note = core
  misc_feature 2..228: note = LE
  misc_feature 229..1356: note = CDS
  misc_feature 1357..1370: note = RE
  misc_feature 13..240: note = bridgeRNA
ctactagagacttccctgcaggatcggtgtctggccagactcggtccaggtgtccggcgggaggctctccacgcggctgcccaccttgccttttcgggtgtggctctctaccggtctgcagttcgtcgggcaccgtggcgaggcgtggctcgaaagggactgcccagctcgtagtagcactgcccacctcgccgtcccttatcggtacgaggcatgcaggagaacgctatgacgaaggtgattatcggggtcgacccccacaagctctcggccaccatcgaggtcgtcgacggccgcgagaggctgctcggctccggccggttcagcaccgaccagggcggctacaccgcgatgcggacctatgcgaaggcctggcctgagcgggtctgggcgattgagggcagcaacggtgcaggccgtccgttggcccagcggctcctcgaggccggcgagcatgtcgtcgccgtgcgcaccacgaccctgcgggtgctgcgccccgacggggagcttgaagcgctgcggatgctgtgcgaccgccgcgaggagctgacccggctgcgggtccagaccgtgaaccggctccaccggctgctggcagagctggtccccggccacgcgaagaaggacctgaccgccttgcaggccaaggcgatcctggccaccgtgcgtccgcgcgacatcgccgggaagacccgccgcaggatcgccgccgaggagctcgccgacctggtcgcggtcgaagcgaagatgaagaaggccaccgccgagcttaaggtcctggtcaaggcccgcggctcccgactgatggacctgcccggcgtcggaccggtcgtcgccgcgcgcacgttggccgacgtcggcgacatcgcccggttcgccgaccggaaccgcttcgcgtcctggactgggaccgcacccctggacgcctcctcgggcgagcagaaccggcaccgtctctcccgagccgggaaccggcggatgaaccacatgctccacatcgtcgcgatcagccagatccgcctcgacaccgaaggccgggcctactaccggcgcaagcgcgccgccggcaagaccacactcgaggcgctgcgctgcctcaagcgcaggatctccgacgccctctatcggcagctggtcgccgacgccgaccgagcagcgctcaacaagcaacaggcgcccgatgacacgggcccgggagggcactgcggggcgtctcaagaatccagcgcggtcgaccttcccccgcacatcgacacttcggatcagccacttcccggacccgcgacaccgacgctacaaccgcctcggcctacccggaagacctcacggccgcgaacgcctcagaccaccggttgacaacaaaggggagc

SEQ ID NO: 8352 - DNA, 1465 bp, unidentified
  source 1..1465: mol_type = unassigned DNA; note = element_d14c665
  misc_feature 1..5: note = core
  misc_feature 6..230: note = LE
  misc_feature 231..1448: note = CDS
  misc_feature 1449..1465: note = RE
  misc_feature 1..234: note = bridgeRNA
cccccgttacctttctggtggccccatggtggggctgcggtcgccgggtccggtatgactcagtgcccctgtcgaagtcatgatccggggggtgttgtcgccgggcctggtggcgttggctgaccgctgatagggacagggccgccgcgtgttggtaggtctcttcgtaacgtgggtgccggcgactgacgctcgatcggtgaccgtccgaactggaaggatggccaccgatgagtgaggaacccgaggcaccgttcacggtgtggtgcgggctggacgtcggcaagcaggaccaccacgcgtgcgcgctcgaccctgccgggaagcgtctgttcgacgcgcccctgccgcaggaccagcaccggctcgaggacttgttcaccaagctccagcgccatggccgggtgctcgtgatcgtggaccagccgaacacgatcggcgcgttgccgatcgcggtcgcccggtcgatgggtatccaggtcgcttacctgcccggactcgcgatgcgccggatcgccgacctccacccgggcaccgcgaagaccgacgcccgcgacgcctatgtgatcgccgacgccgcccgaacgctgccacacaccctgcgcagagtcgacgccggcgaggagacgctggccgagctgaaggtactggtcgggttcgacgacgacctcgccggtgaagcgacccgcctgtcgaaccgaatccgcgggctgctcacccaagttcaccctgccctggaacgcgtactcggaccaagattggccaccaaacaggtcctcgccctgatcaagacccacggcggcccccaaggcatggccaccgccgggaagacccggctgctgcggaccgcgaccaaggccaacccgcggcgggcaaccgagctcgtcgacgccatcgtgaaggcccttggtgaacaaacagtgaccgttcccgggaccgctgcggccgacactgtcctgccgaaactcgcggccagcctggccgccgtgctggatcagcgggccgagatcgccacccaggtcgaacaggtcctcgatgcacaccctcttgccgaggtcctgacctccatgcccggcgtcggggtcaggaccgcagcccgcatcctcctcgacgtcggcgacggcagcgcgttccgcaccgccggccacctcgctgcctacgccggactcgcgccggtgactcgccgctcgggcacctcgatccgcggcgagttccccgcccgcagcggcaacaagcacctcaaacgggcactgttcctgtccgcgttcgccgcactgcgagccgaccccgtcagccgcgcctactacgaccgcaagcgagcccagggcaagaagcacaacgctgcactcatctgcctggcgcgccgccgctgcgacgtcctccacgccatgctcaggaccggcagccactaccagacaccacccgtcgaatcagtccccgccgcttgacacagaacatagggaca

SEQ ID NO: 8353 - DNA, 1383 bp, unidentified
  source 1..1383: mol_type = unassigned DNA; note = element_d14f88d
  misc_feature 1: note = core
  misc_feature 2..89: note = LE
  misc_feature 90..1121: note = CDS
  misc_feature 1122..1383: note = RE
  misc_feature 1145..1375: note = bridgeRNA
caatggtatggactcctcctcccctaaacggcatctaggtgccaaactggtaatcgataccaccagcaaacggaaaagaggagtccaccatgaagcttagtagagttgggattgatttggcaaagaacgtttaccagttgcacggtgttgatcgaactggcaagacggtatggaaacgccgcctgaagcgccatcaatggttcaaggcgctgctggataaatcggaatccagttgtgtgattggcatggaagcctgcgccagtgcgcatcactggggtcgggagcttcagtcacgaggttacacggtcaagttaattcccccgcagttcgtgaagccctacgtgaagagtaacaagagcgatgccagggatgcagaagcgatctgcgaggcgatgagccgaccgaacatgcgttttgtgacggtgaagacggtggagcaacaggacattcaggcgacgcaccgtatccgggctgagctgatcacccagcgcaccgccaaggcaaaccagatccgcggcttggtggccgagtatggcctggtggcaccgaagcatatgagttcacttcgtgctgcgatcccgtgctggctcgaagatgcggagaacggtctgacgggcgacttccgcaacttgttgcatggtgtgtggaacgacttgctgggattggatgatcgtgtgtgcgagatggataagttgatcaagcgactggctgataacaatgacgactgcgtgcgcttgcagcagatacgcggcgtgggtccgatgatctccacggccatgatcgccacggtgggtgatgccagacaataccgcaccagtcggcagatggctgcagcgattggcatcacacccaaacaacacagttccggggacagagatcgcctgctgggcatcagcaagcgtggtgatgtctacctgcgtacgctgatgatccacggtgccagatcggtagtggctagcgcgaaacacaaagacgatcggctcagtcgttgggtcacgggcatcgccacgaaacgacacccaaacgtggcggcggtggcattagccaacaaaacggcacgcatggcctgggccatgctgcgtcacaaaactgattacgatcctgattacgcgatacgctgaaacaggataaatacaaggagaccctcaaagacgattgcttaagcaaactgcatgatggcaaacaggttagaccggcgtcggctaaacccggtaatgtccacgtacctgaagtacgagaaagcgattgggagctgacgcgcgaataaaccattatggcccggcatcagtgaatgtatgccaactaaagaggccggatatacgtatgcagtcgtaccatgtctgccagatacagcttgcttgcaaatgaggaggagtccatata

SEQ ID NO: 8354 - DNA, 1375 bp, unidentified
  source 1..1375: mol_type = unassigned DNA; note = element_d14ff4b
  misc_feature 1..2: note = core
  misc_feature 3..86: note = LE
  misc_feature 87..1118: note = CDS
  misc_feature 1119..1375: note = RE
  misc_feature 1146..1363: note = bridgeRNA
tgatgctgtggacggctcctccaccggcacggaagtgccattgatgtgggtgctgttgaggcccccacgattcggaggagccaaacatgcaagcggtcacgacaattggtctcgatattgcaaagtcggtttttcaaatccacggagttgacgcggcaggtcatgtagtcgttcgccgcaagctcaagcgccgctacgttgtgccattcttccagaagctgccgccgtgcctcataggcatcgaagcctgtgcttcctcgcatcattggtcacgggagctcaaagcgctgggacacaccgtacgcctgatgccgccggcctacgtgaagccctacgtcaagcggcaaaagaatgatgctgccgacgctgaggccatctgcgaggcggtcactaggacaaacatgcggttcgtggcgaccaagacgccggagcagcagagctgcctgatgctccatcgcacgcgccatctgttcattcgccagcagaccgcagtgatcaatgcgatccgcgcccatcttgccgaattcgggatcgtcgcaccggtcgggcgcaatggggttgaacaactgctcgatgtggtcgccgacgcaagtgacaaacggctgcctgagattgcgcgtgcctgccttgtcgctctcggcacccaactgcggacgctaaaggcacagattttgaacttcgatcgccagatcatggcctggcaccgatccagcgaggcgagcaagcggctcgatgagatcccgggcgttggtccggcgctagccaccgctctggtcgccagcgtcgctgatgcgaaggctttccgatctgggcggaatttctcggcctggatcgggctcgtgccgaagcaacactcgagcgggggcaaggacaagctcggcagtatcagcaaacagggcgatcgctatctgcgcagcctgttcaccgcgggcgcgctggccgtcatccgctatgccaagatccatggcaccaaacatcggccctggcttacggcattgttggcgcgacggcctacaaaggtcgctgcgatcgcgctcgccaacaagatcgcaaggatggcgtgggccatgatggccagaggtgatcgctacaaggaacccgtcgcactcgcgaggtgaccgatcgcgccgacatccggcgtgatgtgaaggttgggagggccaacagcacgtaatgcagagccggtcgatccggcgatcaggacaacccacttgtgccagtgcatctcgaatgcgggcttttgaccgggacctgatccgcggagggcattatggccagcggccttgtgtgccgcgctaacaggccgaacacatggctgcaccgaccagcctgcaaacgtgaagaaaagccttgccaactcggagccgtccacaca

SEQ ID NO: 8355 - DNA, 1317 bp, unidentified
  source 1..1317: mol_type = unassigned DNA; note = element_d155eab
  misc_feature 1..2: note = core
  misc_feature 3..69: note = LE
  misc_feature 70..1083: note = CDS
  misc_feature 1084..1317: note = RE
  misc_feature 1090..1311: note = bridgeRNA
ttaattatatggtccgcctcactctcaagccctacgcttagagtaggctctcagaacaaggtgaaccatatgtctactattcacatcttaggtatcgatttaggcaaacactgctttcatgcagtaggtaacaatcactctggtaaagaactcattcgccggaagtttaatcgaagccaactactacgtttcttatctgttcttgaaccaactaccattgcttttgaagcctgtggtggcgctcactggcttgctagaaagtgcgatgcttatgggcatcaagttcgacttatcccccctcaatacgtaaagccttatgtcaaaggcaacaaaaacgatttcattgatgctgctgccatagctgaagctgccagtcggccaaccatgagatttgtctcagtaaaatcagaagaggcacaagtcatcgcaactatccatcgagtaagagatggttacattaaagagcgaaccgcttgtatgagtcgtataggagcaatcttacttgagtttgggctcagctttcctaaagggcacgctaagatgaaagtactgttccaatggttggccgagcaagatgctaagttgccacaaagtctgattgctgagttactctcggttcatgagcactataaatatttgaatgaccaagtttccgagcaggataagaagcttaaagtgattatccaaaataatgaaaatgcagagctgctaaagacgattcctggtattggtgatttaacggccacactgtgtgttgcaaatatcagctcaccatccaatttttgtggaggtcgagagatggcagcctggctagggctagttcctaggcagttttcaacaggaggtaagtccaagttgttaggcatgagtaaacgaggtaataaacacttgcggactttattcattcatggggctagggctgttcttgcgaggatagaaacaacaggaaaggtgttcggagattggctagtcaatcttcgagcaacgaaaccttttaatgtggttgtagtagcacttgccaataagctagcgagaatagcttgggcggtactataccaccgccaagcttttaaggctgtatagccataaccaagtttgcaacgccaatgaacgtgatgacaaaaacggtcaatcggccagattaagaacctgacataaaaaatagcaatcaatgctttgggctttttaaggataatctggcgcggatatcatcgtggagcgggaagtaaatgttcccaacttggactccgaatacattagcgcaaaccaaccccgttattacttaattgtagttgcaatatcggggcggaccataca

SEQ ID NO: 8356 - DNA, 1220 bp, unidentified
  source 1..1220: mol_type = unassigned DNA; note = element_d1662dd
  misc_feature 1: note = core
  misc_feature 2..69: note = LE
  misc_feature 70..969: note = CDS
  misc_feature 970..1220: note = RE
  misc_feature 990..1214: note = bridgeRNA
gaatgacatggattccccctcacgaggatttgccacacttaggtgttgcatcaaataccggaggtaaccatgtcttctcaattcttttgtggcgttgacctcgccaaacaccacttctccctgcacgcggttgatgaccgaggaaaggtcattcttcacaaatccgtatcacgcgctaaatatgttgccccttaccgtactaaaggcaagaatgacctcaatgacgccatcgctatctgcgaagcggttcagcgccatgccacccgcttcgttcctgttaaatcacctgaacgacaggcgattctctccatccaccgaatgcgggaacattgggttcaagaacgcaccgcgctcattaatcgcattcgtgccctgctcgctgagtttgggatagttatccccaccggacgccacgcgattcaacgtgatgttccgcttattctcgaagcggcggattacggactgcctgatattgctcgcgctgtgctcggcgatagttttgagcatctacaagtactcaaccaacgtatcgacgacaccgaactgtgctttgacatagtcaccaaggccagccccaatgcacagcgtattcttaaggtacgaggcattggtcctcagacggcaaccgccattattgccaccattggtaaaggagaacagttcgactccggcagagactttgccgcctggctcgggctggttcccaaacagtattcaacaggcggtaaacccaggcttgggcggataagtaaacgcggtgacaaatatctgcgaactctcttagtgcatggcgcaagagcggtcatcactaaccttggggagaaacaggacaggctcagtgtctgggggcggaacattcttgaacgaaggggaatgaaccgcgccattgttgctctggcaggcaaaaatgcccgtatcatctgggcgctgttacataaccaaaccgactatcaagactacgccgcctgagtaagaggcggcgcagggaaacacaccaaccgggtcattgcagacgcagctgatgaggaaaggttaagaccatttgcagagagcctgttaatgcggcgggcacattgataccttctaacgaataaggcactgcaaccgcgcaatgtcatcagggccatggcgtgagccactgaaaggccgaatgtagagcggcagtccaaacctaactcgaaaagtgtagcggatgtttgacgaacgggggaatccatgta

SEQ ID NO: 8357 - DNA, 1286 bp, unidentified
  source 1..1286: mol_type = unassigned DNA; note = element_d16a76a
  misc_feature 1..2: note = core
  misc_feature 3..246: note = LE
  misc_feature 247..1272: note = CDS
  misc_feature 1273..1286: note = RE
  misc_feature 60..224: note = bridgeRNA
tccattagactataaaatataaaataggtataatgggacacagatctttgagcaaatttaagtgccgaatagagagctgaataagtctaagctggctcaaaagtagaacttatattgcgaataagacccagctctctatgatggttaaagctatatagtgttaccatcgcttataaaagcgattattaatggagaaagttcatatcatcatttattcggtacaaaaataaagaaaggagtcccattatgttaaagaacacttttttcataggacttgatattgcggctgatgattttgcagcaagcatatatcagtcccctgaaaaaccagtaattaccaaagaggctattaaaaacaatccagagggttttggtatgttaatctcatggcttaaagagcacaatattgattgcacaaattctgttatctgtatggaagcaaccggtgtttacagtgaagccatcgcctattatctatcaacttatggctttaaggttagcgttgagcctcctcttaaggttaaacgtgcttttgacccagtaggccataagacagatcccgttgatagtaaacaaatcgctgaatatgcctatagatacagcgatgagcttaaattctggcagcccagaaaagatatcctcgagaaaatcaagcaactcttaacagccagggagcaattcacaaagcaaaatactgctataaaaaatgctatgaaatcttatgaaagacatgttgtccaagtgcctttaatcataaaggctcatcacgaaactctaaaagagctcaagaaacatattgccgagattgacaaagagctgaatcggcttatacgtcaaaatccaacaatctctcaaatgagcaaccagttaaaaggtattccaggtgttggattattattagcctctaacttaataacaatcactggtgcattcaatgatatatctagctacaaaactctatccgcattcttaggtatatgtccttatcaatatagaagcggaaaatcaatctacaaaactcctcatacacgtaattttggaccagcatatgcccgtaaactacttatgcttgctgcccgctctgttgctactcacaatacagcatttagaaaatattatctccgcaagctcgctgagggcaaagccaaacagcttgtcctcaataatatagcaaataagattattaaaatagcctgtgcattgataaagaacaattcacaatatctagaaggctattattctgtaagtccattatgtcttaatttagcttgacaaagtcatagtgt

SEQ ID NO: 8358 - DNA, 1632 bp, unidentified
  source 1..1632: mol_type = unassigned DNA; note = element_d17877e
  misc_feature 1..3: note = core
  misc_feature 4..283: note = LE
  misc_feature 284..1447: note = CDS
  misc_feature 1448..1632: note = RE
cacgtataatataattatgtgattttttcacatatattagaaactcttttcttttgtatatttaattacaactgaattgagttataatatttaagcactgtggatttgtagataagtatttacagctttgactggttcggggtgacaactaccacaggcttttatttttattggtaattagttggttaacgcttgacgttttatatatctacgtgaatacataaatagaagttctgtgtcaaaaacatgcagtgcaagtaataactatatggaggtgtttaaaatgtattttgttggtattgatatttcaaaatacaaacatgactgtttcatatgtactgaaacaggagaagtaattgaatcgaacttttcctttccaaacaccagtgatgggtttgaacaattacttaatttattaaaatctattgataattttaaagaaataagaatagggtttgaagcaacaggacactatggaatgaaccttaagctattcctagaaaagaataattattcttttatggaatttaatccaaaacttgtaaaagaatttataagtggacaaacacttagaaaaaccaaaacagataaaaaagatgcttatcaaattaccaaatatcttatatctgcggattacaaaccccatccaaaacaattttatcacaaatattctttaaagtcattatctagaatgagagaaaagcttgttaaacaacgttcttattatgaagttgctttaactaatgttttagaccacatatttcctgagtacaaacctttctttaataataccttttctgcgtcttctatatttatactaagtaagtataaaagtcctgataaaattaaaaatatgaaagactatgattcaataagaaaaatatcaagaggaaaatttacatcggcacaattttttttacttaaagatttggcaaaaaatacaattggtacttcaaatgaaatatttgagctagaactagaaactttacttatattacgttctcaaatagaattcgagataaagaaacttgaaagtaatattgaagaaattattaaagaacttaatccaccaattttatcgattaaaggaattggttatattttaggtgccggaattgtatctgaatatggagatgtttctagatttaaatcagctgatgcaatggttgcttttgctggtattgaaccaagtatatgccaatctggtacagaatcacatactggtcatatggtaaaacatggttcagggcatttaagatactatttattgaatgcagctgattgtatatttttacacgatcctatatttacagaattttattataaaaaacgtaatgaaggaaaatcacatagagtggctttaaatcacgtggcaaaaaaattaattagaattatttataaattagaaactgaaaatattacatttgattcatcgaaagtaaaataactggtgtaattattttgatgaataattatcattacaattgcttgttaatgagatagacttatagtctaacgaaattaacaaacaattgtttactttcaaaaaataccattttgaaaggtttttgtcatatctaaaaatctatttttgcatttttatgaaaaagcacttgactttttatagttggt

SEQ ID NO: 8359 - DNA, 1369 bp, unidentified
  source 1..1369: mol_type = unassigned DNA; note = element_d1792e4
  misc_feature 1: note = core
  misc_feature 2..67: note = LE
  misc_feature 68..1096: note = CDS
  misc_feature 1097..1369: note = RE
  misc_feature 1138..1360: note = bridgeRNA
taatgggatggtccgcccccgttctcaccaggatgtggtgatgatcagggagaggaggatttcatccatgcagatttccacgatcggcattgacatcgggaagagcagctttcatttcgtcggctttgatgcgcgaggcgggatcgtcgtgcggcgccagtgctcgcgcacgcagctaatccgggagctggcgaaggtgccaccgtgtctcgtggggatggaggcctgctgcggcgcacaccacctcgggaggattctgatcgcgcagggacacgacgtgcgattgatcccaccgcaatacgtgaagccgttcgtcaagtcgcagaagaacgacctgctggacgccgaagcgattggcgaggccgtccagcgaccgacgatgcggttcgtgccactcaagacgatggagcaactggatctgcaagcgatccatcggctccgcacgcgtctcgttgcgcgtcgcaccgcggtgatcaatcaaatgcggggattcctgctcgagcgcggcgtaacatttcctatcgggcggcgcgcgctggtcgagcggttccccgaggtgctggacaatcccgccctggggctgtccgtccgcttctgtcgcctgctgcagcaactccgggacgagtggcggctcctggacagtgccattcaagaagtcgatcaggagatccacacgctcgcgcatgacgacgaggcctgcgatcggctcatgcaggtgccgggcatcggcccgctcacggccaccgccctcgtcgccgccatcggcaatggggcggcctttgcgaaggggcgggatctcgccgcctggctgggattggtgccgcggcaacattccacggggggcaaaacggtgcttcgcgggattagcaagcgcggcaacgcctatctccgatgtctcttcattcacggggcacgcgccgtctgccgtcatcatcggcagaagccgcaccgcctgggacggtggctcgcgaatctcgaggcgagggcccatcccaacgtcgtcgtcgtcgcgctcgcgaacaaattggtacgaacggcctgggccgtgctccagcgaaacactcactacgacgggaggctcctcgcgaatgcgtgacgggtggccgtctcgggcgatagcacgacatcggccctaatacacaccgacgtctgcgagcacatatcaccgatgatcgaacagtccaccggcgggtccgcatcctggtccgcaaaacggtcgatcgaacgaccggcgatctaatgaggacggacccgcgcggctttccatcgtggcccgaagcggttaccgcttcactcagaggccggatacattagcgcggacggttcctcaccgatgatggcagcttgcggatcaggggcggaccataca

SEQ ID NO: 8360 - DNA, 1374 bp, unidentified
  source 1..1374: mol_type = unassigned DNA; note = element_d186469
  misc_feature 1..2: note = core
  misc_feature 3..120: note = LE
  misc_feature 121..1116: note = CDS
  misc_feature 1117..1374: note = RE
  misc_feature 1151..1369: note = bridgeRNA
agatacggtaatgggccgcgtctccaggcgttctggaggagtggctgtcccccgatcatgatggagtgacggggtttcaggtgtggtgccgaagccccgcgaacctgatggaggacagccgtggaacattatgccggattggatgtgtcgctggaacagacgagtgtgtgcattgtcgatgcgcggggcacgatcatttcagaagccaaagttgcgagcgagccggaagccctggtcggcttcttgcgtggccaagggctggatatcggcagagttgggcttgaggcgggcccgctgtcacagtggctccatgccgggctggttgcagccggctttgaggcagtgctgcttgagacccgtcatgtgaaggcggccttgtcggcgatgacggtaaagaccgaccggcgcgatgcccgcggcattgcccagttgctgcgtctcggctggtatcggccggtgcacgccaagtcggccagcgcgcaggaggtgcgctcgctgctcactgcccgcaagctcattcagggcaagctgctcgacatcgagagcggcatccgcggagtcctgcgcggcttcggcttgaaggtgggtccgatcagccgcggccgtttcgaggcacggatccgtgagctcgttgaaggccaggccatgctcgcgacggtactcgactcgatgctggcagcccgagctgcactgcaggccgagtttgcacgcctccaccgaacgctgctggttctcgctcgtgcagatcctgtctgccgtcagctgatgagcgtccctggcgttggcgcggtcgtggcgatcacgttcaagagcggcgtcgatgatcccacgcgcttccgacgctcgcgcgacgtcgggcctcacttcgggctgacgcccaggaagtaccagtcaggcgagatcgacgttaccgggtcgatcagcaaggtcggcgaccggatggtccggaccgcgctctacgaggcggccagcgtgatgctcacccggaccgtgcgcatgtcgcctctcaagagctgggcaatgggagtggcgaagcgacgcggcgggaagaaggcgcgagtggcgcgcgctcgcaagctgggcgtcgtcctccacaagcttccgctggaccagtgagaccgccgccatcgcatgaggaggagagcttgagagatcgggtcagctagtcagccggcccgtagtcccaccgctgggacggtgaagatggtgaagccgcaatgtccgcagtcgctgccttgcacacgacgctggaaagataggctcaccgcttcctctgaccgtatgatgtggcagctcaaggttgaccacggacagaagcaagtaaccagcggcaggatcttaaccggggcagcttgactcatggcccattacaga

SEQ ID NO: 8361 - DNA, 1355 bp, unidentified
  source 1..1355: mol_type = unassigned DNA; note = element_d187969
  misc_feature 1..2: note = core
  misc_feature 3..71: note = LE
  misc_feature 72..1097: note = CDS
  misc_feature 1098..1355: note = RE
  misc_feature 1107..1345: note = bridgeRNA
ttatggatggcccgcccctcccgccggcaccagtgtatgatgccagtgtttaagagaggaaggagcgaaccatgcaaataatgatccttggtattgatctgggcaagaatagctgcagccttgttgggctggacgaaagcggaatggttgttgttcgaaagcggctgcggcgtgatggagttatcggttttgctgccaaactgtcgccatgtgttattgcgatggaagcttgctgtggtgcccatcatatggggcggtcactggcggctctggggcacgaggttagactcatgtcgccggaatatgtgcggccttacgtcaaggctcagaaaaacgatgaccgtgatgcagaggcgatcgccgaagccgcaactcgccccaccatgcgttttgtcgaactcaaaagtgaggaacaactcgacgttcagacgctccaccgcgtgcgcgaccgcctggtcggtgaacgcacttcgctgaccaaccagatcaggagcttacttttggagcgcgggcatgtcgtcgcccaagggcatgctcgactacgattcctgctcggcgagttgctggataccgatgcggtcgcactgagcccgcgcatggtgtttctgctgggtgacatgcgcacacgctgggaggagcttgatcggcgtatcgcagcctttgatgccgagttcgcagcgatggcccgagccgatgtacgggctcggcgtttaacagaaattccagggattggggcgctgaacgccacggcattggtcgctgcggtcggtgacgcagcgaccttcgccaagggacgcgacctcgcagcttggttgggcctggcgcctcgtcaagccaccaccggtggaagaccaaagctcttgggcattacgaagcgcggcagcaaatacttgcgcaagatgctaatccagggcgcgcgatccgccatgcccacgttagcaaagagcgacactgcaatcggggcgtggctgcgaggacttcttgcgcgcagtcattccaatgtcgctgtcgtcgcattagcggcaaagatggcgcgaaccgtgtgggccttgctccaccacgagcgaagctacaagagcatgccggtgacagcttaagacatatagaaatgcgcacatggcgaaaacgggccgggtgcgatgaactgcgagtggtaaaaggaagatggcctgacagtctatcggtgtcccgaaaacctccggcgtaaaatggccttcgaggccggcccctttatgaggatcaggacgcgcggatctccatcttggcagtggccagcgcgccaacatgccggatacgtttgtgcagactgttcacaccatcatccaattgtcccttgcaacggggcgggccatacg

SEQ ID NO: 8362 - DNA, 1334 bp, unidentified
  source 1..1334: mol_type = unassigned DNA; note = element_d18cef7
  misc_feature 1: note = core
  misc_feature 2..312: note = LE
  misc_feature 313..1092: note = CDS
  misc_feature 1093..1334: note = RE
  misc_feature 1097..1330: note = bridgeRNA
taatgagatggtcagcccggcgagaacctcaggtctacactactgaggttctcacttttcctgaggaggctttctcatgaacagcgtaacgattctaggcatcgacattggcaaaaatagcttccacttgcacggccaaaacgcacaaggccatcaggtattacgcaagaagcttaatcgccgacagttgctgccattacttgcacaaatgccaccttgcaaagtcgccatggagtcctgtggggttcacagtttcttgccagagaaatcaccaagctcggtcatcaagtccaactgattgcgccacagcatgtgaaagcttacgtcacaggcaacaagaacgacttcattgatgccgaggctatttgcgaagccgcatcacgtcccagaacgcgatctgtacaggtgaaatcggttgaccagcaggtgctgtcgaccgtgcataaactgcgtaaatcactggtgagtcgacgcaccggggtgatcaaccaagtgcacggattcttacttgagtttggcgttatctttcccaccggctatgccgcgttggagcgggttcctgcattgatggaagagcacaatctacctctgctcctgcagcaggccattagtcggatgcttgatgacattcgtcaattgaccagcgaaatcaaagcgttggataccgagatcaagcagcaagtaaatgggagtgacgccggcaaaagattacagagcatccccggcatcggccccctcatcgctagcgcgctggtggccgatgtcggggacgcttcgatatataaatcgtcccgagatttttcggcttcgctgggattggtgccacggcaatactcgaccggaggccaaaccacactgttgggcataagcaagcggggcgataagtatttgcgaaccttgttgatgcaaggtgcccaaaccctgctttaccgaattgataaacgaaacgatgcccttggagtctgggctagaaacctattggcccgaaaaccactcaacaaagttgcctgtgcactggctaataaaatggccaggattgtctgggcgctattgaccaaaggcggcacctacaacgggcatgccaccgcgtaatcctgttttaccaccagcttttgcgacgtcagtaattgatggcgataaacggcagataccctggctgagaacctggtaagcaaaatagctttctaagctgaagcccttttcaggacaggcaggagcgaatactcatcaagggccgagcgtgtacccgcgctcacatggagcccgaatacattagcgcaagcctgatttaccgttcatcgtgactggatagcaaaaggtgggctgaccataca

SEQ ID NO: 8363 - DNA, 1349 bp, unidentified
  source 1..1349: mol_type = unassigned DNA; note = element_d18e067
  misc_feature 1: note = core
  misc_feature 2..69: note = LE
  misc_feature 70..1101: note = CDS
  misc_feature 1102..1349: note = RE
  misc_feature 1105..1339: note = bridgeRNA
tatggaatggctcgcccctttcccccggcgcaagattgcgtcggttgaacacggcacggaggcgagccaatgaatgagatcaaggttctgggaatcgatcttggcaaagacgtttgcagcgtggtgggtttcgatggggcggggaaggtgttgctgcgtcggcggatgcggcgcgacagtatcctcaagctggcgtcaggaatgccaacctgcgtcatggcgatggaggcatgctgcggcgcccatcatcttggccgcctgcttcgcgagcagggtcacgatgtgcggctgatgtcgccagagtatgttcgcccgtatgtgaaggctcagaagaatgacgatcgggacgcagaggcgatcgcggaagcggcaacccgcccgacgatgcgcttcgtcgatctcaagagcgacgagcaactcgacatgcagagcctgcatcgggcgcgggatcggctggtcggcgagcgcacgacgctgattaatcagttgcgagcgatccttctcgaacgcgggatcgtgatggcgaagggacggcgcaagctcgaacttcgactggatcaactcttttctggcgaggtgacgatcagccgtcggatcagactgctggtcgaggacatgcgggcccaatggcgcgcccttgacgagcggatcggcgccttcgatgccgagttcgttgcgattgcgcgcgaggatgccgcaacgaagctcctttcgacgatcccgggggtcggcccgttgaatgcgaccgccttcgtcgcctcggtgggaagggcggagacgtttggccggggccgggatcttgccgcctggctcggcctcgtacctcgccagatgacgaccggcggcaaacctcgtcttctcgggatcagcaagcgcggcaacggctatcttcgtcggatgctgatccacggcgcgcgagcggccttgccatccctggcgaaggggcggacgttgctcggcgaatggctgcgcggattgctcgcgcgaacgcatatgaacacggccgtggtcgcgctcgcggcgaagatggccaggatcatctgggccgtgttgagaagcgggcgccccttccaggtggaggcgacgccgccggctggatgatcagagttcggccgaagggtagcgcccttcaggccagcgttgtctgtgagtggactgaaaagatggcctgacagtcgaacggcgtgccgtaatcctgatcaaaaaaatggcgttagacgccgacggctttatgaggatcggtacgcgcgaaagctccatcttggccgaggcacgacctcgagaccggatacgttggcgcagactgagaagccgtcaaaaaatcccttgcaggcggggcgagccatacg

SEQ ID NO: 8364 - DNA, 1445 bp, unidentified
  source 1..1445: mol_type = unassigned DNA; note = element_d1ad5d1
  misc_feature 1..5: note = core
  misc_feature 6..233: note = LE
  misc_feature 234..1430: note = CDS
  misc_feature 1431..1445: note = RE
  misc_feature 1..235: note = bridgeRNA
cacccgttaccttcttcgtgcgccgtgaacaagcggtgtctggtcgccgggcctggtatgacttactgcccctgtcgtgtgcatgatccggggggtgttgtcgccaggtctggtggcgttggttgaccgctgatagggacagggccaccgatgggtaggtctcttcgtaacgtgggtgccggcatccttcgcctgatctggtggccaggtcgattccgttttgaggaggcagtgtgggccgtcgcgagtacgccgtgttcctgggtctggatgtgggcaaggaggagcaccatgcctgcggcgtggacccggacggccagcgggtccacgacaagccgctgccgcagtcggaggcgaagatccgcgcggtgttcgaggcgctgtcggtccgcggttccgtgctggtggtcgtcgaccagccggcctcgatcggcgcgctggcggtcacggtggcccgcgagctgggtatcgacgtggcctacctgcccgggctggcgatgcgccggatcgcggacctgcacccgggcaacgccaagaccgacgcgcgtgatgcctacatcatcgccgaagccgcccggtcgatgccgcatacgctgcgccgggtcggcaccgacgacgatgccttggctgacctgcaggtcatcgtcggctacgacgacgacctggccggcgaggtcacccgggtcagcaaccgcatccgcggcctgctgacccagatacacccagcgctggaacgggcgctaggcccgaatgtccagcaccccgccgtgctcgaactgctgacccgcttcggcggccctcaaggactagccaccgcgacgcgacggcagctggtcgccgccaccaagccccgggctccccgctcatacgccaagcttgtcgacgcgatcgagcgggcgctgaccgaacagaccgtcaccgtgcccggcacccgcgctgccgagctcgtcgtgccacagctcgccaccaccctcgccgggctgctgacccagcgagctgatgccgcccggcagatcgaggagatgctcgatgcgcaccctctttccaaggtcctgacctcggtgccggggatcggcgtcaggaccggagcacggattctcctcgaggtcggcgacggcaccgcgttccccacctccggacacctcgccgcctacgccggactcgcgcccgtgacccgccgctccggcacctcgatccgtggcgagcaccccagccggggcgggaacaagcagctcaagcgagcctttttcctcgccgcgttcgccgcgctgtccgaccccacctcacgggcctactacgaccgaaaacgagccgccggcaagaaacacaacgccgcactcatctgcctcgcacgacgccgcatcgacgtcctccacgccatgctccgaacccgcaccctctacaaacacccaaccccaacagccgcttgacgaaacccataggga

SEQ ID NO: 8365 - DNA, 1370 bp, unidentified
  source 1..1370: mol_type = unassigned DNA; note = element_d1b5b72
  misc_feature 1..2: note = core
  misc_feature 3..76: note = LE
  misc_feature 77..1105: note = CDS
  misc_feature 1106..1370: note = RE
  misc_feature 1078..1358: note = bridgeRNA
tgatggggtggacgccccccaacggcatcaatgtgccaaagtggaggtgttaccgcaccacttaagggaggcgtccgtggagaatgttagcatcatcggcctagatatcgccaagtctgtttttcaagcgcacggcgccgatgcgaacggcgcggtcgtgtttcgcaaaaagatttctcgcgccaagttgttggaattcttcgcctcacagccggcttgcaaagtggtgatggaagcgtgtggcggggcacactattgggcgcgcgagatcgccaggttcggccatgaagtcaaactgatcgcgcccaagtacgtcaaaccattcgtgaagcggcaaaagaacgacgccgccgacgccgaggcgatttgcgaggcagccacgcgccccactatgcgatttgtggctgctaaaagcgaaaccgcgcaagcgaacggtcttgttttccggacgcgcgatatcttggtgcgtcaacgcacacagatcactaacgccgtgcgcggtcacctcgccgagtacggcttggtcgcgcctcaaggcgcgggacattttctaagactggcgacgcagctcgaggatccggcaacctcgcttcctcaagaggttcgctcgatcctctcgctactcacgcagaccgcgcaggcgctgaatgagaagattgcccagctcgacaaagaaatcgcgcgccgcaccagagaagatgaagtcgcgcgccgcctcatgacagttccaggcgtaggcgccatcaccgcgactgcaatcgcagcactggcgccgccagcaacgacgtttcgcaaaggtcgagacttcgcggcatgggtaggcttgacgcctttgcagaaatcaaccggcggcaagcaaaaactcggcgctacatcgaagatgggtgagcgaaccattcgtcgtctgctcgtcataggcgcagcgtccgccattcatcacgccacgcgcgcaggcttggcgccaacatcttggctagcacggctgctggcgcggaagccgcgcatgctggtgattgtggccctggccaacaagatggcgcgcatcgtgtgggcgctcttgatcaaaggcgaggattatcgagctccggcgagcgcagcggcgtaaggctcatgcgcgaaccgcgaggccgttgaggcgtagaggtggtcaaaggagaatatggcgcaacagtcgatgagacgagatcaggaaaaccagtctggcccaacgtgcgcaacagcacgctatttgatgtggacctgatctttgtactcccatacgggcccgcggcgctgacggtcgcattagaggccggacagatggctgcaccccgactacgcgcgtcagtttctccaaagattcctcttgcgctttagggggcgtccacaga

SEQ ID NO: 8366 - DNA, 1177 bp, unidentified
  source 1..1177: mol_type = unassigned DNA; note = element_d1c296f
  misc_feature 1..2: note = core
  misc_feature 3..206: note = LE
  misc_feature 207..1154: note = CDS
  misc_feature 1155..1177: note = RE
  misc_feature 3..182: note = bridgeRNA
cttgtatggtaggacttgaagggaggaggagggacaaggctcgattctgactgttagccgcagtacagaccgtgggagatttcgcccctcctcctttcacccaagcgccgataaagaatgcatctggcctaaaccgacgataggaacaagcctgcgcctctgggtgaacccttcaagtgttcaaaccttagcccggagaattttcagtggcaatgccggtttctgtcacaaagccgatggtgggcgtggatgtcgccaagaacgaactggtgatctatcacgccaaacttgatgtactgacagcgattcccaacgacaaagcggccatcaaaaggtggttgaaagcattgccggggcccgtcgctgtagccattgagtcgaccaatatctatcacctggaattcgctgatctggcctatgaggccggctgcgagatctacatggtgggcggttatgaactgcatcattaccgcgaaggcgtaaaaatccgcgccaaaactgacgcgctggacgccaagctgctggctcgttacctgaaaaacgaagggcatgagcttcacccctggaccccgccatctgcgctgtatcgccagctcctgagccttttccgccgtcgcgcagccttggttcaggctcgagtggccctggtacaaagctgggctaacgagccgctgctgaagaccgctttcgccgaacaaattgcagccatgcagaggcttgagacattgatcgagaaaacgatcaaggatcatctgagggatgctggtttgctgggtcagctgaaccgttgcttgaaggttgagggcattggctttctgaccggagcccgcttgcttacggcatttcagcgaggggatttcagaaacgcagacgctttcattgccttcttggggatggacttgcgagtgtcgaaatcaggacaaaaagacgggcgccgcagcttgagtaaacgaggcgacccggaagttcgtcggctgttacacaatgccgccatgtcggctagccgcacatctgcctggagaagcttctatgaaaagcaaagagctcgtggtttcacgaccactcaggcgttggtaatgctggctcgcaagcttgctcggatcgtattcgctctgctgaaagagcaaagcgaataccaacccaaagcggcttgagggcttcccctcaaccatagaat

SEQ ID NO: 8367 - DNA, 1724 bp, unidentified
  source 1..1724: mol_type = unassigned DNA; note = element_d1d99c4
  misc_feature 1..2: note = core
  misc_feature 3..223: note = LE
  misc_feature 224..1687: note = CDS
  misc_feature 1688..1724: note = RE
  misc_feature 19..197: note = bridgeRNA
cttatatgtttgttttagtgtttcgaatataacaagaaatcatcaacttgataggtgaaggggggagatcccttggcgcttgacgccgtcccgcagtttcttctctatcaagttgagttcgtggtataacttggcactggatgccgcattcaccataaggctgaacgatgcttgatttcttttttaaatcgaaactaactatttcctttaacacgaacagacgatggaaaacaacgcttatttaggtattgatgtagctaaaggatcggctgacttcctgctgattgatgcccggaaagaaatcctcgaagaaggttttgtcctggatgactgcactcagggccgaaaggttctaacccaattaattgacggctggttcgaggggggagtcactcatttatattgcggggtggagagcaccggagggtacgagaacaactggtttacccttctttgcagccttgccgcaatctatcaaaaaaaggggaaaacccttcgggtgacccgagtcaatccccggccggttaaagcctgtggggaggcggccatgctgcgcacccaaaccgatcaaaccagtgcgcttgccattgccagctacatgatcggattcccggaaaagattcgatatagccctcatgccggccagtcggaggatccattgtggctggcggcccgcggacaagccgggctgattcgaatgctcctcaaacaaaagacgcagctgtccagccagcttgagaaactgctttacacccgccttggcgagacaatgatttattgtcgcaacgggattccaggctggctgctgcgcctgatcagccgctacccaagtcgggagcatctgcgccgggccggcgtcggaaaggtagccaaaataaaaggcatatccctcgataaagcacagagcctgctgggtaggctgcatggcgaccaacccaccacaccggcgatcgcctgccatacaattaaagccacagccaggcagatcctccatctgcaaacccagatcgatgcccagcaagacttcttgatcaatcagttttccgaccatccggatgtgaagcttctggaatcaattaccggtattgggagtgccagcgctgttcggttgcttgttgaaattgaagatatttcccgattcgacagctgcaaagccttctgcgcttactttggggtgcatcccacatggaaagaaagtggagacgggcattggaagacgggcatgagcaagaaaggccgggcgcaggtacggggaattttatatatgagcagcctgtcggccctacggtgggactcggacatgaaaggactctaccaccggtttcgcaaagaaaaccgaatgaatcactaccaggcgatgggcgtggtcatgcacaagctgcttcgtattgtatatggcgtgcttaaaaatcaaacaccttacgatcggcaagtggatcggaagaaccggcggcaatcaaaggaaaaccaacaggcataccagaaaaaagccgctcagaataagaccactcaaaagacgactcggcaacgatatagtaaaagagctgattcaacagaatatgctccgatcagccgaagagcctacaaaaaaagaaaacaggaggtctcccagtcttcactagtggaagaatatgcgggatcacctcctgccaataacccaaacgggataccgaaagaaaacatataaaaattgttttaaaataacttgaaaattaacggtataa

SEQ ID NO: 8368 - DNA, 1536 bp, unidentified
  source 1..1536: mol_type = unassigned DNA; note = element_d1dc4d2
  misc_feature 1..3: note = core
  misc_feature 4..224: note = LE
  misc_feature 225..1421: note = CDS
  misc_feature 1422..1536: note = RE
  misc_feature 8..223: note = bridgeRNA
tttcgtattattaggtcagccagaaacttctggttggcctatttttgtaggtgctttaagatggcggtagccgggagaacgagggctcttttggggaagttaccccgtcacaaaaactgttctcctactccctccaatgaccatgtttgagctggtaggggcaatagaccccgtatcacaagcgaagctatgggtttggaaccatcgtaggagtgccggcaaatatgattcaggaggtagttatggaaccagtagtgggagtcgatgtagctaagggattcagtgtggtacaagcttttttaaagcgagatgagccttggaagaaggcaataagcatctcacatgagaaaagtggacttgagcaattgggagagatgctgaccgagttgcagacacagactgcgcaaatgccagtggttgttctggaagcaactggccactaccatcgtggacttgtcgcttatttggaacgtagcggttggacctatttcatcgtcaatcctctacaggccaagcgggcgaaaggtactcatttaagaaaggtgaagacggatgctgcagatgcttggcatctagccgagatgtattaccgaggagatgtaaatccgcaccgaatgtgggaggagggatacacagagcttcagcatgtgacgaggcagcatgcgtttgtaacggggaggtttgtacaagcgaagttaaatatgagggctttgctggatcaggtttttccggaatatgagaaggtttttagcaacctattctcggtgacatctctacacgtgcttgccagctgcttggagcatgatgtggaggatcttcatggggtcatccaaaaacacgctgggaaatcccattcgaagaagtgggcagaagctaagacggaatcccttagggaagtgctgttccgttggagtgaagagccaaggagtcttgcgcaaacctctgttttaagcggtatggtgaacttagttctagcattcacagaacaattgagcgtactagagaagcaaatggatgagttagcaatgggccttccagaggttgaactcgtgaagagtataccgggaatcggggataaactagcagctgccattgtcgcagaaatcggagatatccggcagtttaatgaagccaagcaactggtggcttttgcagggttagaccctagcatattcagctcgggaaaattcacagcgacccactcccgaattaccaaacgaggctccaagagacttcgccgagcgttatatttagccgtacagtgtgggattcgaagaagagtcaatcctaggattcgggactactatgagaaaaaaagaaaagagggcaagccctacaaggtggtcgtgattgcctgcgccaacaagctactccatcacgtatatgccatccttagtaagcagcagcccttccaactgtagtgcccataattatccagaaccttcacacctatgagggttctttgtcgtgctcaaaaatagtataccaagaagaatgtgaatcaccaacacaaaatccttgacaagtattagctgg

SEQ ID NO: 8369 - DNA, 1377 bp, unidentified
  source 1..1377: mol_type = unassigned DNA; note = element_d1dca92
  misc_feature 1..2: note = core
  misc_feature 3..89: note = LE
  misc_feature 90..1118: note = CDS
  misc_feature 1119..1377: note = RE
  misc_feature 1142..1363: note = bridgeRNA
gatggagtggatggctcccgctcacggcatctgagtgccaagatggtggaagttgtcgagacgaccacgcttgagaggagccacccaccatggagattaccactgtaggcattgatctggccaagagcatttttcagattcacgcggttgatgaagccggcaagaccctcataggcaaagcgttgcgacgcgcgcaggtgctgccgttttttgccaagctgccgccgtgtctcatcgggatggaggcgtgtggcacctcacatcattgggcacgtgaactgacaaaactcggccacgaggtgcggttgatgccgccggcctacgtcaaaccgtacgtaaagcgcggtaagaccgacgcgaacgatgccgcagcgatctgcgaggcggtgacgcgtccaaacatgcgctttgtgccggtgaaatcgaccgatcagcaggcagcgttggcgttgcatcgaacgcgcgatctgctggtcaagcagcgcactcagctagtgaacatgatccgggggttgctggcggagttcggtatcgagatggcgcgtggcctacggcatgcgctggagctagcgacccggttatcagccggtgaagcagcggaagtgccatcggtcgcgcagcgcgtcgtgacatcgcttgccgatcagataggtgctttgcaggtgcaactcgtcaagctggagaaagagcttctcgcgtggcatcgatcgagcgagctgtcgcagcgcttggcgaccattcccggcgttggcgtgatttcggcgaccgcactggccgcctcggtgacagaaccggagcgtttccgttccgggcgccagttcgctgcctcactaggtttgacaccgcttcagaattgtagcggtggcaaggagcggatggggcggatctcgcgcatgggcgatcgctacctgcgtcgattgctggtggttggtatgacctcgctgatccggcgcgcacgatcagcgccggcctctgtcgatccacgtctgcccgcgatgcttcaccgaaagccagcacgggtggttaccgtggcggccgcaaaccggacggcgcgggtcgcctgggcgatcatgacgcatggcggcacctaccgcgcaccactggtcgctgccgcataacgacaaccaaggagacaagcttcaccaggttgtgaggacgatgagaagtgatggcgaaccggtcagaccgggagccgggacaccccgtcgaacgtcgtgggcatcacagcccgcaaagcagagtgggacctggttcgcggataccatcagggccagcggttaactgaacgaccgcatcaaaggccggacacaagactgcacccgaccaatgcgccaaatcatcaaatcgccccttgcaacgcgggagccatccacacag

SEQ ID NO: 8370 - DNA, 1507 bp, unidentified
  source 1..1507: mol_type = unassigned DNA; note = element_d1e6eb1
  misc_feature 1..3: note = core
  misc_feature 4..231: note = LE
  misc_feature 232..1482: note = CDS
  misc_feature 1483..1507: note = RE
  misc_feature 68..224: note = bridgeRNA
aaacccacatgagcacattgctcatgcaagaaggatgaaaacctgatatcattgcaaagccattaattgctttgatatgggcggtgaaggcagtccgccgtttaggggcgtagacctcgttagtgaaactagccaaatcccgcggatgcaagaatgcgtcagtagaacgcgaatgcgaatgagcaccctttgaggattaagttatccgcccatatcaggacgggaacaatcatggaactgcagaggaataaagtttgtggcattgacgtgcacaaacgatttctgatagcaacaatcctttgccgagacgggaagaaggatactcaacgctttagcgttaccctggaagatctcttaaaatttagagattgggttatcgaaaatggatgtgaacaggttgccatagaatcaactggaatctattggcatcctgttcactctgttcttgagggaaagatcgacttgattgtggcgaattcctacaaaattaagcacacgccaggaagaaagactgatgtcagcgattccgaatggattgctgaactttgtctcaacggcatgattgagccttccaggatttttcctaaagatgatcgagagttaagaaggctaaccagagccagagagggttacgtcaagcagatgactcaggaaaagaacaagatacaccaatctctcgattctgcatgcatcaagttggcctcagttatctctgatatttttggcaagtccgggatgtacctcttgaattgcgttctagaaggaagagagattgatgatataattgacggcattccatctggacgacttaagaaaaaggcggatcaaattaaagagtctatcaagagtcgtctggatgtctctcaggtcattttgattaggggttctctgagcttgatgaaatccatccaggagaggatagatgagctggatggggagattagcgccagaattcaatatcgtaagaatgatttagccattgcaatgtctatacctgggacaggttttgtttctgcaactgccattctggcggaaattggcaactatactgatttcgaaaagccagagcagcttgccgcatggtgtggccttgttccttctttatatcagtcagcagaaaagacaatccttggagggataaccaaacaaggctccaagcatatccgaagaatgctgatccaggtcgcctatgccatatcgagaaccaaggattccaagctgaagaaattcttcctgaggattcaagccaagaagggatctaaagtagcagcggttgctctggcaagaaaggtcctgtgcattcttcaccatcttctcataaatcaagaaatgtatattgaagacagagataagaagaatatgcgtcagaagcccttaataccgccgtctcctattgagatgtcgatccaagagatgattgactgcatcgtgcgggcaggttatgttgttacgaagagcgatagcataggagggttcggttaaatcaatttttcgggtttttcatgcg

SEQ ID NO: 8371 - DNA, 1149 bp, unidentified
  source 1..1149: mol_type = unassigned DNA; note = element_d1e7e24
  misc_feature 1..2: note = core
  misc_feature 3..165: note = LE
  misc_feature 166..1134: note = CDS
  misc_feature 1135..1149: note = RE
  misc_feature 10..180: note = bridgeRNA
cttgtatctttggatctcggaccgattcacgcagcccgagataaccaagggatgcagatcaagcccgtcacggagcacatggcgcgtgaattggaccgtctttcttgagcccgaacggttgccggaaccctcagttcgcataaacaaggatgggagtagaaggacatgtccgattcgatctttatcggtatcgatgtatcgcgcgacactctggaggttggcagcaccgcgcagccggccacttggagtcagcccaacaccactgaggccattgaggcgctgagcactcaactgctggcacttggcccggccctggtggtactgcaggccacgggcggctatgagttcgaggcggcctgcgcgcttcaagccgcgggcctggccgtggcggtggtcaaccctcgccaagcacgcgactttgcccgtgccatgggtgcgctggccaagaccgacagcctggatgcacgcatgctggccgagttcgcccgcgtgctcaaccagcatccgaagcgcgagcgctttgtcaaacctttggccgacgctcagcgccagcgccagcgccagcgcctgcaggcgctggtgctgcgccgcaggcaactcgtggacatgctcactgccgagcggctgcgcttgcgcacctcgcacgccagcgcgcgtcccagcgtcgagcaaaccatcgaattcctcaaggcgcagttgggggatatcgagcgtgactgtgctgagcatgtcaacgcgcgtcacgctgagctggccagcgctcttggcagcgtcaaaggggtaggtacggccactacggctgtgctgctggcgctgcttcctgagctgggcacgctgtgccgcaggcgcatcgccgcgctggtgggcgtggcgccgctcaatcgcgactgcggcctgatgcgaggaaagcgcaccatctacggcgggcgagcagatatcaggcaggtgctgtacatggctgcgctggtggccgtgcgtcataacccagtgttcagggccttctacgaacgcttgctcgcagcgcgcaagtccaagaaagtggccctggtggccgccatgcgcaagctgctgggcgtgctcaacgccatcgctcgatccggcaagcattgggacgactcgcttcatttggcttgacaaccaagacggttg

SEQ ID NO: 8372 - DNA, 1451 bp, unidentified
  source 1..1451: mol_type = unassigned DNA; note = element_d1e85fd
  misc_feature 1: note = core
  misc_feature 2..301: note = LE
  misc_feature 302..1075: note = CDS
  misc_feature 1076..1451: note = RE
  misc_feature 12..233: note = bridgeRNA
ctactagaggattccctcagggccggcgtctggccagactcggcctaggtgctcggcgggttcgctctctattgggctgcccacccggttgcgggtgtggctcactttcggtctgctgcccgtcgggcaccgctgacgaggcgtggctcaagaagggactgccctgctcgtagtagcaatgcccacctcgccgtccctatcggaacgagcacaggcgggagaagcacgtggaacaggtcatcatcggggtcgatcccacaagctgtcggccacgatcgaggtcgtcgacaaccaggagcagatgcttggctctggtccgttcaccaccgaccaggccggctataaggccatgcgggcctatgcgaagacctggcccgacagagtctgggcggtcgaaggcgccaacggtgtcggacgcccgctggctcaacgcctgctcgaagctggcgagcgtgtcgtcgacgtgccggcgaagctcgcggcccggattcgactgttcgacaccggacacaaccgcaagaccgatgccctcgatgcgcactccatcgcgatcgtcgcggtccgcacccagaccctgcgggtgctgcaagtcgacggtgaactggaggcgctgcgaatgcttaccgaccgacgagaagcactcacccgacgccgggtccaaaccgtcgaccgtctgcaggcgctgctggctgagctactccctggccaggcaaaacgcgacctcaccaccggccaggccaaggccatgctggccaccgtccgcccgcgtgacatcgctggcaaaacccggcgtcgcatcgcagccgatgagctcgccgaactgatcgctgtcgaaacgaagatcaagaaggccaccgccgagctcaaagccatcgtgctcgcccgcggctccacgctcatggatctgcacggtgtcggcccggtcgtggccgcccgaatcctggccgacgtcggcgacgtgacacggttcgctgaccgcaaccgattcgcgtcctggaccggcaccgcgccactggacgcgtcctcgggtgagcagaaccgccacggctctcaagggctgggaaccggcggatgaaccacatgatccacatcgccgcagtcacccagctccgcctggacaccgacggccgcgcctattaccgacgcaaacgagccgagggcaagaagtcccttgaagctatgcgctgcctcaagcgccgaatctccgacgtcatctaccgacaactcatcgacgacgccgagcgctccgcaagaacggacgccagtgcgagtccgggagggcactgcggggcgtctcaagaatccagcgcggtcgacctgcccccgcacatcgacacttcggatcagccacttcccggacccgcggaaccgacgctacaaccggccgcccgccggcgaaagactccaacagagaacacgctctcagcggcgtcttgacaacagaagggagc

SEQ ID NO: 8373 - DNA, 1578 bp, unidentified
  source 1..1578: mol_type = unassigned DNA; note = element_d1ea044
  misc_feature 1: note = core
  misc_feature 2..251: note = LE
  misc_feature 252..1445: note = CDS
  misc_feature 1446..1578: note = RE
  misc_feature 6..226: note = bridgeRNA
tcgtattatatggtcagccggtcattgaactggttgacctattttttataggttttatgcttgaggaagtcgggggaggacgtgtgcgcccgtgggacactgatcccgtccgtaatactgtccaccccttccttgtagaaacatgtttgaggctggttgggacacgatcccgcataacaagcgaagctatgacactacaagggcgtgtaaggggagcaccggcgaatctacttaaggagttgtgatcagttatgaatcctgttatcggcctggatgtcgccaaaggagaaagccaggtccaagcctttttacaaaggaaaaaaacgtataagcaaagctttaaatttgaacaccatctacaaggacttcacacgttttatcaggaagtggaacaggttgccggtcagcctccggccgtcattttcgaatccaccgggcactatcatgaacctgtgcttcaatttctggaggatcaggctatcacgtattatgtcatcaatccggtcgtttcttatgaggccaaaaaaacgggtctgcgtaaggtgaaaacagacaaagtcgatgcgtatcatctaggtgagttgtactataaagaagatctggaagcctttcagaagaaaaccgagcaatacctggatctgcgtcaattaaccagacagcacagtgctttaacggatagctatgttgaaataaaattgcagttccaagctgcagtcgatcatatttttccggaatatcataatgtcttcagtgatctttgtggcaagttatcgttgaacaccttactgcattatccgactgcttcggctattcaaaaagtctctcaacaaacattagccgacgatatgtgtcaattcggggctagacgttccgacgcatggtttttggataaagcagcccaattaaaggctgcggcagaccgtaatccctttcagcatcctgtctgtcatggtcatattgtcagcttacagatgtatattcagatgctttttcaatatcaagagcacctatcccaattaaaacgagaaatagatgcccttgctcggtcttttgaagaccatggattgatccagtcgattcccgggattggagataagcttgcagccacaatcatctccgaaatcgggggcatcaatcagttcgaacgcccgaaacaactggctgcttatgcaggactagatccaagtgtttttgagtcaggcaagtataaagcttccatcaaccgtatcaccaaaagaggatcatcacgattgcgtcaggccctttacacagctgtgcaatgcggtcttgccaaaaaccgaaacaagaaactgatagccttttacagtcgcaaaagaaacgagggcaagccacacagggtcgctgtgattgcctgtgccaataaactcgttcactggattcacgccatgttcaagcgtcaggaagtctttgtagaccaatcctaagaaactattaaagttcacaatactctgaaaccttactggttcagcagtaaggctatttggtatgttcaatttttagtgtaacatgttttttcaaacttttttagacttaagtattgacaactattggctggta

SEQ ID NO: 8374 - DNA, 1225 bp, unidentified
  source 1..1225: mol_type = unassigned DNA; note = element_d1ec4eb
  misc_feature 1..2: note = core
  misc_feature 3..238: note = LE
  misc_feature 239..1210: note = CDS
  misc_feature 1211..1225: note = RE
  misc_feature 6..212: note = bridgeRNA
cttgtatctcgactattgcttcccaaagaggcgatagtccccgactgatcatcgggggagagcctggaagacgtacccagcctcaggccacgagcctgtttcgtagatagtgctccggccctccacactcactcgcaaagtccgaacggtatctagggcctaccctcggtaagagcccgcattcacaaggttgggcagggtgcagtgatgatcgctatcaatcgatgaaggagagctcatgtccagtatcgttggcatcgatatcgccaagcacagcttcgatattgccaccctgcaagccaatggcaaattccgcaccaagagcaagttgagcaatgcggcggcggggtttcagacgctccaacagtggctgagcaaatacgccgagccgagcgcttgggtcgtgatggaagccaccggggtctaccacgaggccttggcggagtacctgcaccaactgggttaccgcgtgtgcgtcatgaatcctgcgcagatcgccagctacgcccagagccagttacagcgggtcaagacggatcgagtcgacgccaaattgattgccgactatggccagcggcacctggacaagctgcgggcctggcaacccgaaccgctggccgcgcggcggttgcgagcgctggtacgtcgactggaagacctcaaggagatcgagcagatggagctcaatcgcctagaggtttcggacgccagcgttcagagctctatccgctcagtgctgcagcatgtccaggagcagattgccgataccctgaaggcgatccaggatcacatcgacaacgatccggacttgcgcgccaaacgcgatctactggtcagcatcgacggtatcggcgataagacggcggccttgctactggccgagttgggcgaccccttggggttcaagagtgatcgggcgatcaccgcgtttgctgggctgaatccgaagctgcaggactccggcaaacacaaaggccatgtgtctatctctcgcatgggctccgcccgcctgcgctccgggctgtacatgcctgcggtcgcggcgatgatccacaacccggcgatcaaagccctgaaggagcgcctgcaagcccggggaaaggccggcaagcagatcgtctgtgcggcgatgcgcaaactgcttcacatcgcctatggggtgctcaaatcaggtgagccatttgatgtcaaaaaggcccttgcccgctgaggggcaagacggtat

SEQ ID NO: 8375 - DNA, 2009 bp, unidentified
  source 1..2009: mol_type = unassigned DNA; note = element_d1f0608
  misc_feature 1..4: note = core
  misc_feature 5..583: note = LE
  misc_feature 584..1432: note = CDS
  misc_feature 1433..2009: note = RE
  misc_feature 1..237: note = bridgeRNA
ccccgttaccttcttcgtagtcccgcaccgcggggccacggtcgccaggttcggtatgactttcttcccttgtctctcgaatgatccggggggtggtgtcgccgagcctggtggcatcggtagaccgctgatagggacaaggccaccgggttcgaggtaggtctcttcgtaacgtgggtgccgggtatcgatgctggatcggcgaccggtaggaccggacgaaagactgcttcatggacacgagttacgccgtgttttgcggcatcgacgtgggtaaaagcgatcatcacgcggtcgggctggacaccgccggcggccgactgttcgacaaggcactgccgaacgacgaggcccgactacgggctgtgttcgcggatctggccgtacacgggccgatcctggtggtcgtcgatcaaccgaacacgatcggcgcgctgccggtcaccgttgcccgagactgtggtcacgacgtcgcctacctgccgggggggttgtcgatgcgccgggtcgccgacctgtatccggggggcaagcgaaaaccgatgcccgcgatgcgttcatcatcgccgataccgcccgcaccatgccgcacacgctgcgccgggtcgacgtcggtgacgagaccctgaccgaactcggtgtgctcgtcgggttcgacgacgacctcgccggcgaggcgacccgggtcagcaaccgcatccgaggactgctcaccggcatccaccctgccctcgaacgagtactgggacctcggatcaaccatctggctgtcctcgagatcctgtcccgctatggcggaccggccgggatccgacaggccggcaaacgccgaatcaccaccctcgcggtcaaacacgcaccgcggatgggcgcccgcctggccgaggaaatcttcgccgccctggacgcgcagaccgtgacggttcccggcagcaaggccgccgagatcgtgctgccgaaactcgccgactcgctcaaagaggtgctgcaacaacgcagaaccatcggtgacgacgtcgagaggattctcgacgagcaccctctttcccaggtcctgacctcgatgcccggcatcggagtcaggaccgcagcacgcatcctcatcgagatcggtgacggctcggacttcgccacagccgggcacctcgccgcctacgccggcatcgccccggtcacccaccgctccggcacctcgatccgcggcgagcacccggcccgctcgggcaaccggaaactcaaacgcgccctgttcctgtccgcgttcgcggccctgcacgacccgaccagccgcgcctactacgaccgcaaacgcgccgagggcaagagacacaacgccgccctgatctgcctcgcccgacgccgctgcgacgtcctgcacgcgatgctcaagaacaagaccttctaccagccaccaaccgcagacgcggcgtgatcacgcccagcaggcgtgctaacgcactcgcttcgccagatggaccagcgcatagccgcctggagtcggagttcggtgcgtttcctgataaccgaaccgagagtagagccgcaggttgccgaggctgcgctcacccgtgaacaactgcagatcagtgatctgctcaggtagtcgctcttccaccagttcgagcagtcgactgcccccggccccggccctgcatgtccggggccacgaccagccgtcccagctcggcgatgtgaagctccgtcagagagagatacacgcgcacggcggcgacgagacgccgggagtcgtcgcgcaacccgaacgcgagaacgtcgggctgcgtcagctcgctcaccaactcggcgaaggactgcatcaacggggggaaggttcacgtcatcgtgggcctgagcctcagtcacatacgcagcccgctgcaacgtcagcagctcacccgcgtcccccacccgacagcgtcacaacggattccatgcacgtcgactattccagcccctaccggaccgcactccagtggcatccccgagcggttgacatcaacatagggaca

SEQ ID NO: 8376 - DNA, 1268 bp, unidentified
  source 1..1268: mol_type = unassigned DNA; note = element_d1ffc53
  misc_feature 1: note = core
  misc_feature 2..68: note = LE
  misc_feature 69..1097: note = CDS
  misc_feature 1098..1268: note = RE
  misc_feature 1050..1263: note = bridgeRNA
taatgggatggtccgccccgcacccaagcgtcagtattacggcatcgccaagcagaaggagagaaaggatgcgaaccaaaccaatccctgagactgccgccttcggcattgatatcggcaagaaggtgttccacgttgtggccctgaacgctgccggcaccgttatccagcgtgccaagttctcgcgtgacacgctgatggcgttcttcgaagtggcaccgaaggtgctgatcggcatggaggcctgtccgggctcacaatggctggcgcgccggctggctgcgatgggccatgacgcccggatcatcccagcacgcttcgtgaagccctatgtcaaatccaacaaaacagataccgtcgatgctgcggccattgccgaagcggtgacgcgaccgactatgcgcttcgtgaaagttcgaacgcccgaacaggtcgatcttcaggcacttcaccgcatccgcgaccggcttgttgggcaaagaactgctgtgatgaaccaagcgcgcgcattctgcattgaatacggattggccatgcgggtcggtgctggcggcttccatgccgatatccggaggcatctggcgaacgaggagaatgacctgacatcgaccatgcgggtgctgctcgctgagttgctggatgacctcggctacatcgaaggccgcattaaggccgtgaatggcaaggtagaagcctatgcgcgcgagaacgataccgtcagccgcctcgtcacaattccgggcatcggggcgcttagcgcaaccgcggttgtcgccgcagcgggcgacggacgacagttccgcaaggcgcgtgatctggccgcgtggctggggctggtgcctgcagggcactcgaccgggggcaaacagacacttctgggcatcagcaaacgcggcaatcgctatgtgcggcgcctgatcatccatggcgcgcggtcatgcttcctgcacttgaatcgggcgaaccatgccctcggaagctggctctctgcccttgaagcacgaacgcaccgcaacaaggccgtggtcgccttggcaaacaagctgacgcgcatcgtctgggacgtgatgaccaaacggttgatcgaccacgggtaagccacgcgcaaaaaaacgggacaccatcccgtgccactaatctggaacccgaggtgcggatctcatcaaggccttgtcgccaaaagcggctgactgatcagaggccggatacatttacgcaagccggtgcgtcacccacgaaaaccttgcaatagcggggcggaccataca

SEQ ID NO: 8377 - DNA, 1409 bp, unidentified
  source 1..1409: mol_type = unassigned DNA; note = element_d2046f4
  misc_feature 1..2: note = core
  misc_feature 3..108: note = LE
  misc_feature 109..1131: note = CDS
  misc_feature 1132..1409: note = RE
  misc_feature 1157..1404: note = bridgeRNA
agatggggtaacgggcgatcgttggcggaagggttggtcgtccctcacagtgatggtgtcacgaggtcgggaccggggtctcgcctcaagcatacgagaggaacgaccatggaatattatgccggtattgacgtgtctttgaaagcttcgagcctttgcgtggtggacgcgcgcggcaaggttattcgagaggccaaggcggcgagtgagcccgaggctttgatcggctggtttgcggggctcggcctggagctggagcggatcgggctcgaggctggtcccttgtcgcaatggctgagcgcggagatggcgcgggccgggctgaaggtggagttgctggagacccggcatgtgcgggcggcgttcaagaccatgccggtgaagaccgaccgctcggacgcgcgcgggatcgcccagctgatccggttgggctggttccggccggtgcactgcaagtcgctgtcggcgcaggagacgcgggcgctgctcgccgcgcggcggctgatgaaggacaagctgcacgacatcgaactgagccttcgggggttgctgcgcaatttcggcctgaaggtcggcaagaccacacccaggacctacgagggccgcatccgggagttggtcgccggtcatccgatcctgcagacgctcgccgaggccatgctgacggcgcgggcgagcctggccggccagttcgcccagctcgatcgccaggtgcgcgcgagcgcgcggacgagcccgaacgccaggctcttgatgaccacgcccggcgtcgggccgatcgtggctctcgacttcgcctcggcgatcgacgatgcggcccgcttcaagtcctcccagcaggtcggcgcctatttcggcctgacccagaggaagtatcagtccggcgagaccaacatcaccggacgcatctccaagctcggcgacaagggtgtgcgcgcctcgctctacgaagccgcccatgtcatcctcacccggccaaccaggccatccacgctcaagacctgggcgcaaggcgtggtcaagaacgccggcatgcgcaaggccaaggtggcgctggcgcggcgtctggccgtggtcatgcaccgcatgcttgtcgatcaaacgcccttcgatcccgccaaggccgcctgaagcagacaggctcaccccgatatcgccttcgcgaagggctaggacgtcccccttgcgcgagccagcgtccctccgccgggacgacggaccaggtcaggtcgcttctccccatgacggcgttctcatccgaacgacctcgcccgcgagattgaaccggccggtccttatcggatcccatgatgacggcggcctcagcgccgacctcggacagaagcatgaccccggcggaccgaccagcgctcaaaacaggggcttgacctcccaaggcccgttacaga

SEQ ID NO: 8378 - DNA, 1388 bp, unidentified
  source 1..1388: mol_type = unassigned DNA; note = element_d209fe7
  misc_feature 1..2: note = core
  misc_feature 3..88: note = LE
  misc_feature 89..1117: note = CDS
  misc_feature 1118..1388: note = RE
  misc_feature 1088..1375: note = bridgeRNA
agatggagtggttgccgccctcccctgacggcatcgcaatgtgccaagattgtggtgttcaaggccacacaacggagaggacggcgagatggacgatatgatgatcggagttgatctggcaaagaatgttttccagcttcacgggaccctgcgaacgggggaagtgcagttccgcaagaagcttacgcgacagcagtttgcgatattcatggcccagcaggctccttgcttggtcattttcgaggcctgtggtggcgcgcattactggacgcgggaaatggaatcgcttgggcacaaagttaaactgatcgcgccgcaatacgtgcgcccgttcgtgaagcgccaaaagaatgacgctgccgatgccgaggcgatcgtgatcgcagcacgccaagccgagatgcgcttcgttgagcccaaaacgattgaccagcagtcgcacgcagcggtgttccgcggccgggagcggctggttcatcagcggactgctgatgtaaacgccctgcgagcgctgctacacgaacatggccacgtgtttcctgtaggaatgcgctaccttgatcgcatgacggtgcttgtggaagataaagccgccgacctgcccgcgctggtccgggaagagtgccaggacatgctggcgcagattgcagagaaaacagcgcggatcaccgagcgcaccgcgaaactcaaggcgctggccagccagtcggacacggcgcgccgactccagaccatgccaggagtgggaccgatgacggccgtcgcggtcgaagcgtttggccccgacatggcacagttcaagaccgggcgcgactttgcggcgtggttagggctagtgcccaggcagcattcctcgggaggcaaagagcgcttggggcgcatgactaaggcgggccaagccgatatccgacgccttctgatcatgggcgcaatgtcgcgactgggttggcttgggcggccaaagattgcgcagggcagctggctgtcacgaatgttggcgcgcaagccgacaatgctggtcgcgatcgcgctggccaacaagatggcccgtcagatttgggcgatgctgaggaagaacgaagattacaaggatccggcgcttgcagtcgcggcatgatgctcatgctggactgatagcgacggtgccaaggggagtgtgagaagacgacgacctgaatgggcaaaatgatcgaacagatccggattgagaaaaccagctcagcgatacgagttgaaagctcgatgtgtagatttggacccaatccgctgatcaccatcccggcccgcggcttctggaagtgccgcaatacgaggcctgacagaagttcgcactcgatcacgcgccaataaggtcagaatcttcttgcgctaaaggcggcaaccacaga

SEQ ID NO: 8379 - DNA, 1451 bp, unidentified
  source 1..1451: mol_type = unassigned DNA; note = element_d20e53f
  misc_feature 1: note = core
  misc_feature 2..229: note = LE
  misc_feature 230..1249: note = CDS
  misc_feature 1250..1451: note = RE
  misc_feature 14..232: note = bridgeRNA
ctgattgagactggtaggtgcgttacggcggttgtcgtaacgtcgatggtgctggtcggtcggctctctaagcgcctgccgcccgacgggttggctttggtacgaactgctgaccggccggtgtccatcgccggggtgtggctcgaaagaggcgcgaacacgatcgacccgaatcaggagtgcccacctcggtttcatcaccgagagaaaggcactttgcctgtccatcatgatcgggatcgacccacacaaggcatcccacaccgccgttgccatcgacggaaacgaacacgtcctcgacgagatccgggtgagatcgtcgacgacccaagccgaccagctccgatgctgggcggacagtttcgagaaccgaacgtgggcggtcgagtccgcccagggactcggctacctgctcgcccaacagctcattgccgcaggcgaggtcgtgctcgacgtgcccgctgtgcgggcgtcgcggatccgaacattgagttcggggcggtcgcagaagaacgacccgaacgacgctcgctcggtggcgatcgcggcgctgcgagctgacgaccttgctcgcgtgcgagctgatgaccatgctcggatcttgcggctgttggcgaagcggcatcgggatctgggccgggcgaagaaccagtcgtgcggccgactccacgctttgttgttggagatgattccgggcggcgccgggttccggatgtcatcgatcaccagggcgaacacgcttctcggcacgttcgaaccgaccgacgcaatgggctgtcagcgactcgagatcgcttgcgagcttgctgtcgagatcgcccgtttcgacgaacaactgaagacttcgaaacgacggattcgtcctgcggttgctgcgtcgaacacgtcgctcacatcgatccgcgggctgggaccgatcacggcggcgatcatcattggacacaccggcaacatcgaccgtttcccgacgagggcccggttcgcgagccacaacgcgaccgcaccgatcgaggcgtcgtcgggctcgcgggtccggcaccggctcgacccgcgtggcaaccgacagctgaactgggcaatccaagtcgtcgcgatctcccagctccgacacgactctgcaggtcgcgagttctacgaccgcaaggtcgccgagggcaagtcgtccaaggaagccatccgcgctctgaagcgacggctctccgacgtcatctaccgacacctcgtcaacgacgctcgccagctgcgctgacgatcaagtgggcctgggaggacactcaggaacgacacgaaatccagcgtgaccatccttccatcctgaacagccggctcttcggatcagtcacttccggacccgacaaccaacgctagaaccctccagcccgccgagcaagagggtcagcctcgccgcgcccagaacgacctcgaaactgccccttgacacaaagaggctt

SEQ ID NO: 8380 - DNA, 1384 bp, unidentified
  source 1..1384: mol_type = unassigned DNA; note = element_d20eef8
  misc_feature 1..2: note = core
  misc_feature 3..85: note = LE
  misc_feature 86..1126: note = CDS
  misc_feature 1127..1384: note = RE
  misc_feature 1128..1371: note = bridgeRNA
tgatgatgtggaacggcccctcccgaacggcatcaaaagtgcctaaggttgccgtttgcaacgggagataagaaaggaccgttccatgattaccacagtcgggctggatttagccaagtcgatttttcaggtacatgccattgctggcgatggaaaagtgattgagcgccgaacgttgcggcgctcgcaggtgctgccgttcttcaagaaactatcgccttgtctcgtcgggatagaagcgtgtgccagcgccaattattgggcacgacagttgcaagaattgggtcacgatgttcggttaatgccgccggcgtatgtcaaggcatacgttaagcgcaacaagaccgatgcggcggacgcagaagcgatttgtgaggcagtgacccgccccaccatgcgcttcgttccgatcaaggcagaggacgagcaagcggcgggcatggtgttgaagacccgcgaattgctgatccgccaacgcactcaagccgtcaatgccttgagatcacatctggctgaagttggaattgtagcagccacagggatgaccagcatcgccaagctctcagccatcgtacgtgatgcaactgataatcgattgccagatgccgcacgcatggcgctgatggaaatagctgaacagatcgaattactggcggatagtatcgaaaggctggacaaggaaatccttaccagtgtgaaagccgacgaagctgctcgtcgattgatcagcattcctggtgttggtccaatcatcgccgcaacagtgcggtcagcagtgcccgatcctgctggtttccggactggtcgtgattttgctgcatggattgggttaacacctcgcgcccattccagtggaggaaaggaacgaattggatccatctccaaacgaggaaaccagcaattacgaacgttgcttgttcttggcgcgacagcagtcctcaaacttgcccgtactggttttaagatgccgcaatggattgttgcactcttgcagcgccgacccttcaaggttgtggctgttgccttggccaacaggatcgcgcgcatcatctgggctcttctggttaagggtgggatctatcgcacaccactcatagcgacgccggtgaatagaactcggcaataggctttccggtgcaaattcaccgggaaaaagggcaaggtgcttgaaacgtgatgaacccagagggacagcatcccgacgcaaatcagaccgtaaaatcgcaggcgcattttagcgcgagaacgtgatcaggcgatttgcttcgcggatatcatcgtggccagtgggctaacgatccataaataggccggacatatgactgcaccgtccaaccgggtgaacgcatgaaaaaaagccttgcaaacggggccgttccacata

SEQ ID NO: 8381 - DNA, 1348 bp, unidentified
  source 1..1348: mol_type = unassigned DNA; note = element_d2166de
  misc_feature 1..3: note = core
  misc_feature 4..86: note = LE
  misc_feature 87..1106: note = CDS
  misc_feature 1107..1348: note = RE
  misc_feature 1119..1335: note = bridgeRNA
ggatggtgtggatagctcctgctccacccggcgtcgcaatgcgccatactgcagttgtctatcactgctatgaaaggagctacccaatgcaagttacaacaatcggtatcgatctggccaaacatgtttttcaggttcacggaattactgaggatggggaggttgtcttcaatcgagcgatccggcgcgcacaactcatgcagttcttcatcaatctggagccctgtttgatcggcatggaggcatgcgggtccagccactattgggcgcgagaactgaccaagcttgggcacgatgttcgcttgatcccagccaattatgtgaagccctatgtcaaacgcggcaaatctgacgcgaatgatgccgaagctatatgtgaagcggtgacacgcccgacgatgcggtttgttgcgcccaaatccgaggaacagcaggccgtcttgttcctgcattgtgcgcgcgatttgatcgtcaggcaacgaacacaactcagcaacatgcttcgcagtttgctcgccgagtttggtgtcatcattccacaaggaaccggagccgcagtcaaatacgccaaaggtgttctggagggagaaaagcccgcccttccgcaaatcgcaattgatgttctgaaacaacttagccaccaacttgtcgctatgcatctccggttccgctggtacgagatgcgcatgcgacttcattcgaaactggacaaacgcgttatgctgttgcgcacgatcccaggcgttggccctgtgaccgcgtccgccattgttgccactatcggcgacgcaaaacagtttaagaatggtcgacaatttgcagcgtggctggggctcacacctctgaacatgtcgagtggcggaaaagaacgattaggacggatcacaaaaatgggtgaccgatacattcggcgtcttttggtgaccgggatgacagcgagattgcggcaaatgaaagtgaatcctgaccgcgtcgatccatgggctatcggccttcttgagcgcaaacctgctcgactggcgaccgttgcaatggcaaacaagactgctcgaattgtctgggcggtgttaaccaagaacgaatactaccggcctcacacagcctaacaaaaggaacacccgagacagcaagacctacgaaatgatggcgcacagtcagcccgccaaccaagacaccccgtcgaatgtccaggacacattgttgttcgataagccgtttgggacttggtcgcggaaaccatcagggccggcggctacgagtgccgcgcaaacaggccggacacacgtctgcttctgaccagtgcgaaattacttcaaatatgtcttgctatgcaggagctatccacaca

SEQ ID NO: 8382 - DNA, 1586 bp, unidentified
  source 1..1586: mol_type = unassigned DNA; note = element_d225501
  misc_feature 1: note = core
  misc_feature 2..262: note = LE
  misc_feature 263..1462: note = CDS
  misc_feature 1463..1586: note = RE
  misc_feature 9..248: note = bridgeRNA
cgttacctttttagtagccccttagacgagtaagaattggggttgttggcctgtcggtcccggcatggttcctgcccccagtcatccatgatccggggggtgttgccaccggggtccgataggcgccagggatatcgctaatggggaccggaccagcacaaggaaccgccgtgtaggtcagccgtaacgtggatgccgagccttgccgccgcaggacaagccaacgaaggtttcacaggacactttttctgggaggttagcgttgatcaaagaccatgaatccgtcgatatcttcataggcgttgatgtcggcaagagcaaccaccacgcggtcgccatcgaccgtgccggcaagaagctactggaccgggccctgccccaggacgaggcgaaactccgggccatcatcaaggccgtggccggcaagggcaccgtgttgctggtcgtggaccagccctccaccattggtgccctgcccgtcgctgtggcccagtccgaggggatcatggtcggctacattcccgggctggcgatgcgccgcatcgcggacctgcacccgggagaggccaagaccgacgcccgggacgctgcgatcattgccgaggcggcacgctccctgccacacacgctgcgttcgatcgtgctcgccgacgaacaagccgccgaactctccatgttgtgcgggtttgacgatgatctggcgaagcaggccacggcgacatcgaaccggatccgcgggctcctgacacagatccaccccgccctggaacgcgtgatcggtccccacctggaccatcccgccatggtcgagctgctgctgaagtatccgtccccggacaagctccgcaaggccggccaggcccgcgtcggcaccctgctgggcaagcatgccccacgggccgggaaacgctggaccgccgatgtcttcaccgccctgggcgagcagtccgtggtcgtcgccgggaccggcgccgccggcatcgtcctggcccagctcgcaggcatgctcaaacagctccgcggcgcccgcgaggagctcctggaacaggtcgaagccctcgtggaggcccaccctcttcaccaggtcctgacctccatgccggcggtaggcgtcaggaccgcagcacgcatcatcaccgaggtcgccggcaaggaattccgctcctccgggcacctggcctcctacgccgggctcgccccggtcacctggcggtccgggacctcgatccgcggcgaccacccctccagaaagggcaacaagaccctgaaacgggcgttcttcctctccgcgttcgcggcgttgaaggacccgctctcacgggcctattacgaccggaaaagggccgaggggaaacggcacaaccaggccctgattgccctcgcccgcaggcggtgtgacgtgctcttcgcgatgctccgcgacggcaccttctacgaggcgccagtggccaaggcaacctaaccaaaccaggaaaaccagctgacgggcactcaccgccagcaactaccccctgcccaaaaacggcatcccaaaaatacttgaagaaaatccagccaaccccttgacgaaaaacatagggacaccc

SEQ ID NO: 8383 - DNA, 1399 bp, unidentified
  source 1..1399: mol_type = unassigned DNA; note = element_d225e01
  misc_feature 1..2: note = core
  misc_feature 3..85: note = LE
  misc_feature 86..1129: note = CDS
  misc_feature 1130..1399: note = RE
  misc_feature 1146..1387: note = bridgeRNA
tgatgaggtggaacggcccgctccgacagcaccaaagtgctaaagtgtggtcgttgtcgcaaacgccacaaggagggactgttccgtgaacgatgttacaattattggactggacttggcgaagcacgtttttcaggcttatggcgcggatgccgaaggcgcaccgctgttcaaccgtaagctacgacgggccgaagttttgcgtttctttgagaaattgccgccgtgcctggtcgggatggaagcctgtgcaagtgcgcattattgggcacgagagatctcggcattcggccacgaggtcaggctgctaccgccccaatacgtgaaaccgttcgtcaagcgcggcaagaccgacgcggccgatgccgaagccattgctgaggcgatgacgcggaagacaatgcggttcgtccccgttaagacggccgaacaacaagcagcggtaatggttctaaggacacgtgcgcttctggtccgccagcggactcaggctatcaacgcgttgcgcgcgcatatgagcgaacttggcgtgatcgccccaactggcatcgctaacgttaaagcattggcggccatcatacgggaaaagaacgatattcgcctgcctccagctgcgcggtttgctctcaccgaaataatcgatcagatcgatatgcttgccgcacagatcgacaagctcgagcgcgagatcattattcaggcccggaaggatgaagagatgaggcgccttgcaaccattcccggcgtcggcgccatcatcgctatggccgtgaaggcgttcgttcccgacccggctggctttaaatcgggacgtcacttcgcagcgtggataggcctgactccgaaagcgcactctagcggcggcaaggagcggcttggccgaatatcgaagatggggaacccggtgttgcgatcattactaacgacgggagccgcagcggttctgcgtcacgtacgtgatcgcgatcgagtgtggtcatggttgaaggacatgctcgggcgccgccccttcaaggtcgtggcggttgcgcttgctaataagatcgctcggatgatctgggctttgctgatcaagggcggaacataccgcaatcccgtacgaatagaggctgaggctgtgaccatataagcgcaggacattagacacgagctgaccggcggtagccggcagaagcgaggtgcataacaggcgatgaatcacgggacgagttcccgaaacaggagaggccgaaacccgcgacgcgcacaaagcgcgcccccttgatccagccacctgtttcgcggacttcatcgaggccagcggtcgatcaccgcgcaagtaggccggacatatgaccgcaccgtcctgatgtggtgaaatcgactgaattgccccttgcaccgcgggccgttccacata

SEQ ID NO: 8384 - DNA, 1179 bp, unidentified
  source 1..1179: mol_type = unassigned DNA; note = element_d229014
  misc_feature 1..2: note = core
  misc_feature 3..213: note = LE
  misc_feature 214..1164: note = CDS
  misc_feature 1165..1179: note = RE
  misc_feature 19..190: note = bridgeRNA
cttgtatgtttattttgcacgtataaaaacatggtcaaagccaaacaggacgggatagaccgtaactaacttggtcgcagaggccgtttaatagcatgggtcatcccgtcctgcctcctcaagagctcgaacagttgcccgggattgataagcccgcatcatcggcaagactgagccatagcggaggcgtctggagaaaagggggattcgattatggaagatgtgctcacctttgtcggcatcgacgtatccaaagcccggctggatatcgcctcgcacccagctggtgccacgcactgtggtgccaacgacgcaactggaatcaaggccctggttgagcagctgcgtgcggtcaaccccacgttgatcgtgctggaagctacgggaggcatagaaaggtttgtggtacgcgccctggttgcagccgaactgcccgtgacggtggccaatccgcgtcaggtgcgggattttgccagggctacaggtcagttggctaaaacagacgttctcgacgcccagatattggctcgctttgccgaagccgtgcgcccggcgctgcgcccgctgcctgatgaaatgactttggaactgcgtgcgttgatcggtcgccgacgccaaatcaccgaaatgctgactgccgaaaaaaaccgattgagccgggctcctcgacgagtacagaaacgcattgaggcgcacatccattggctgcaatcggaactggagcggtaccatgaggaccttgaccaaatgatccgtcaaagtcccatctggcgcgagcaggaggatctgctcaagagtgtgcccggcatcgggtccgtcattagccgcactgtgctggccgagttgcccgagctgggtagcttgaaccgcaaacagattgctgcgcttgttggtgtggcaccactgaattgggatagtggcctgctgcggggccgccgcgttatttggggtggtcgagctcacgtacgcactgctctctacatggctgctttgactgccagcagatgcaatcctgtgctccgagacttttacaaaaggctgcgtgccgcgggcaaagcaccaaaagttgccctggttgcctgcatgcgtaaactgctggtcatccttagcgcgattctcagacatcgtgttccgtggcgtccggtggtcgctcagattccttgaaattaaacacagttg

SEQ ID NO: 8385 - DNA, 1418 bp, unidentified
  source 1..1418: mol_type = unassigned DNA; note = element_d22a73c
  misc_feature 1..4: note = core
  misc_feature 5..201: note = LE
  misc_feature 202..1404: note = CDS
  misc_feature 1405..1418: note = RE
  misc_feature 1..192: note = bridgeRNA
ctccgtaagttggtaggcggcccgggagggccggatgtggctgatgggtctctgtcttcagtgacttcgaaggagtggccgtccgaccctccggggcgctccggtcgctgattgagatctgcgcacgagtcgctgtttacggagatgacgacggggtgttccacgggccggcgacatgacgtcgaacgcctggaggagcgaatggaaccctcgcgtcaacgcatctgggtcggtatcgacgcgggcaaggcccaccactgggccaccgcagtcgatgagtccggcaccaccctgtggtcgaagaagatcgccaacgacgaaggcgcgatcctggacgccctggccgagctcctggtcctggccgacgagatcgtctggggcatcgacatctgcggcaccgcctcggcgctgctgctggccctgctggccgcccacggccaacaacccctgtacgtgcccggacgcaccgtcaaccggatggccggcgcctaccggggcgaggccaagactgacgcccgcgacgcctacgtcatcgccgaaacggtgcgccaccgcaccgacttcgcccccatcgacgtgcccgccgagaccgtgcgtgccctggccgtgctgaccgcctaccgcaacgacctggtcgctgaccgaacccggcaggtcaaccggctgcgggacgccttgtgctcgatctttcccgccctggagcgcgccttcgactactcccgcgccaaggggccgctggtgctgctcaccggcttccagaccccgcgcgctctgcgcaggatcggccgggcccggctggagacctggctgcgcaagagaggggtccgcagcgccgagtcgatcgccgacaaggcgatggaagcggccgcctcccagcgcgcccgagtgtccggcgaagccgtgaccgcgtcgatcgtggcggacctggcccgccagatcctggacctggacgagcggctcaccggcaccgagaagcaggtccgcgaaacgttccgggagctggacgccgcgaagatcatcgagtcggtgcccgggttcggtcccgtcctgggcgcggagttcatcgccgcggccgggaacctgaccggctaccgggatgccgggcacctggcgtcggcggccgggttggtcccggttccccgggactcggggcgcaggagtgggaacctgcaccggccaaaacggtacaaccgggctttgcgcagggtgttcttcatgtccgctctctcggcgctcaaggtcgaggggcccagccgggagttctaccagaagaagcggggcgagggcctcaaacacgtccaggcggtcatcgccttggccagacggcgagtgggtgtgctgtgggcgctgctgcgagacgggaggaagttcacccccgctccaccgctcccgctggcggcttgacaccttcattgaga

SEQ ID NO: 8386 - DNA, 1693 bp, unidentified
  source 1..1693: mol_type = unassigned DNA; note = element_d22d6b3
  misc_feature 1..2: note = core
  misc_feature 3..308: note = LE
  misc_feature 309..1580: note = CDS
  misc_feature 1581..1693: note = RE
  misc_feature 49..298: note = bridgeRNA
ctcgtataataagtgtataagatcttgatgattttatacatcttttattatctttctattttgctttatatttataaagaagtcctagtgctataattaagttagatatagctgaaggaaagtacttattctccttgcggtcataccgcttttgaagcttgtaaacctgcttatcatatgtaattctttacccggttgttgtttgaatgtccactactctataaatccacgtggccaggaaattctaatgtgcgaggctggaactgtatgataaggctaggacttcttttatatctagatctattttaatggtggtgatatttttgtctaatcaacttaattctgtttatgttggtattgatgtttctaaacaatcaaaccaagtctttattactgactttaatcagtctctatcgaaatcattcagtgctcctaataataatcatggtgccgaattaattgagactaacttgcttagttttcttcacaatactaattttactcatgtagttattgtattagaatctactggaatttactctgctcatatagcgacttatttatctgcttcaaaaaagttatttccttttcacattgaagtctactgtattaatcctaagatttctaagaactatcgtgctagttttgctgatatggataaaactgatccaaaagatgcatttatactagccgaccttggtagaattggtagaactacctctatgactccttttaagggatctcaaaaacttgctcttcagcgtttaactcgtcacagagttcaccttgttgaattgattactaaggagaagaactatgtactaacgaatatcttcttgaaattctccgagttcgggaataaagattctaagtttacttctgatatatggagtaaaactgcgcttgctattctcgaagagtattcttctcctgaagatattattaatactcctcttgaggatttagttgtttttattatgaaaacttctaaaaatagatttgataatgtaaatgacgttgctgaactaatcaagaaagccgctcgtgcttcttatcgtcttgataaagctgcttatgaacctattaatcaagctatttcttctagtttagttcttgttcgttgctttgaagatgaaattaagaaagttaattgttctattgaattactcgtgaaaggtttttctcatcacgaatatctctcgcttcgttcaatcccgggaataggccccgtcttcgctgctggtattatttctgaaataggttctattcaccagtttgattctgaagagtctttagctaagtacgccggtattacctggcgtaaaaatcaatcaggtaaatttgaagctgatgatactaaaatgactaaaactggtaatcattatcttcgttattaccttattcaagctggtaactctgttaaaaactatattccactttataatgactattatcataaaaagtttaatgaagttactactcatcaacacaaacgtgcactcgcactaacttctcgtaaacttattagattgatctatggattaatgagtaagggtcaactttataataagaattactaactgttgcctataattaataatccacctaactgagttaggtttcttatttatgtctagtctactaaaaactagtcttttttattgtttttatctcttgacatcattaccggttg

SEQ ID NO: 8387 - DNA, 1546 bp, unidentified
  source 1..1546: mol_type = unassigned DNA; note = element_d22dc1e
  misc_feature 1..2: note = core
  misc_feature 3..288: note = LE
  misc_feature 289..1527: note = CDS
  misc_feature 1528..1546: note = RE
  misc_feature 91..257: note = bridgeRNA
agcgtgtgagcgccgctggcgcgccgtgggtttgggaaagtatgcgtcctgcccgccttggtctctggtcaaggcggaggtggcgagcgatcatggttggtgtccgtctcggtgaacaccgacccaacttggtgccgcgagtccgtgacccagcgtggtgtggaggacgcccacgggaaccgtggattgttgctttgaagcacgggtattagattcctgaataatccctgtcctccccgagacagacactgtcattatcggtgcatcgatattggagggaagccgggaatggacatcgttcatgaacgcgccgcgggaatggatatctccaaacgcgacgcgaaggtctgtgtgcgggtccccggaacccgggccgggacctacacctcgaaggtcacgacctggggcgcgaccacgcaggcgatcctggagctgcgcgagttcctggaacgcgaacacatcaccattgtggtgatggaagcgaccagcgattactggaaaccgttcttctacctgctcgaagaaaccctgcccgtgatgctggtcaacgccaaagccgcacggaacatcccgggacgcaaaaccgatgtctccgacgctgcctggctggcgcaactggccgcgcacgggctgttgcgggcctcgttcgtgccgcccgaaccgatccgcgatctgcgggacctcacccgggcccgcgccatcgcggccagggaccgggcccgggaaatccaaaggctggagaagttcctggagagctccgggatcaagctctcctcggtcgtttcggacctgaccggggtctcctcccgggacatgctcgaagccctcatcaacggcgaacggaacccgaacgttctggccgggatggcccgcgggacgatgcgctcgaagatccctgccctggtcgatgccctgaccggaaggttcaaaccccatcacgcattcatggcaagactgcacctggaccagatcgatgcccacaccagaaccatcgaagccctcacagcacggatcgaggaggcgatggaaccctttcgtgaggccagggaagccctggccaccatccccggagcctcccgacgagtcgccgaagtgatcatcgccgaaaccggcgcggacatgaccgtcttcgaaaccccggcccggctcgcgtcctgggccggggtctgccccagcgcccacgaatcggccggacacatcaaatcagctcacatcatgcccggcaacaaatacctcaaagcagcactgggcaccgcggccatgtccgcaacgcggtccaagaacacctacctcgccgcccgataccggcgcatcaccgcccgctccggacgcaacaaagccctggtcgccgtcgagcattccatcctgaccgcagcctggcacatgctcagcaacggcgagtgctacaacgaccccggcaccgaccacttcaacaggatcaacccgtcccgagcgaagaacaacgccatcaaacaactcaacaacctcggctacaacgtcaccatcaccccactcaccgcagcctgacccgccttactttcgtatt

SEQ ID NO: 8388 - DNA, 1413 bp, unidentified
  source 1..1413: mol_type = unassigned DNA; note = element_d22dfe5
  misc_feature 1..2: note = core
  misc_feature 3..116: note = LE
  misc_feature 117..1157: note = CDS
  misc_feature 1158..1413: note = RE
  misc_feature 1173..1408: note = bridgeRNA
agatgccgtaatgggccctgcaccgaacgagcggtgaaggtggctgtcccccgatagatgatgaaacggggtcacgacgttgagtcggccccaggcatctgagatggaggacagccgtggagcactatgccggaatcgacgtctcgttggaactctcgagcgtttgcgttgtggatgggcgaggcaagatcgtgaaggaggcgaaggtcgcgagcgagccggaagttcttggttgtttcttcaaggaacttggcgttccggtgaatcggattgggcttgaggcggggccgttatcacaatggctgcatgcggggctgacgcaagcagggtttcaaaccgttctgctggagacgcggcatgtgaaggctgcattgtcggcgatgacggtgaagacggaccgcaaggatgcgtgtgggcttgcccagctgctgcggatgggatggttccagcaggtgcacgccaaatcgattggatcgcaggagatccgagcgctgctggtcgcgcgcaagcagcttctcggacagttgctggatgtggaattgagcattcgaggaatcctgcgcggtttcggcctgaaggtcggccaggtgacccgcaaaacgtttgaagcgcggattcgggaattggtgacaggtcatacaacgttggagcgcattgctgaggcgatgcttttggcgcgggcaactttgaaagcgcagtacgagaaactgcacaaggctgtgctcgcgattgttcgtgaagatgcggtctgccgtcggctgatgacagtgccgggcgttggtcctgtggtggcagtgaccttcaagtctgcggtggacgatccgagccggatcgggaagtcgaaggcggtaggagcgctgttcgggctgacaccgaagaagtatcagtcgggtgaaaaagatgtcactggcggaatcacgcgaaccggggatgagatggtgcgcacagcactctatgaagctgccaatgttctgctgtcgcggataacgcggttctcaaaactcaaacgttgggggatggacgtcgccaagcgacgaggttcaaagcgggcgaaggtcgccctggctcgcaagatcggagtaatcctgcaccgcatgtggattgacggcacaacttaccggtgggccgaagcgaacccgatcgcagtgcagggttgatcaaggaggaatacgagacgcaagcggccgaacagaggccctactgcccgaagtcccgtcgccgggacggtggagctggtgaagccgttacacggccagtggccgtcattcgacgaaccacgcgtatctagataggctcaccgttccttctgacagcatagtgtggcggcctcggcgccgaccacggacagaagcgtgagctcggcggcgtgacgatcactcggggagacttgacatcaccggggcccattacaga

SEQ ID NO: 8389 - DNA, 1218 bp, unidentified
  source 1..1218: mol_type = unassigned DNA; note = element_d22f82e
  misc_feature 1..2: note = core
  misc_feature 3..228: note = LE
  misc_feature 229..1203: note = CDS
  misc_feature 1204..1218: note = RE
  misc_feature 6..200: note = bridgeRNA
cttgtatctcgactactgcttattttagagcgatagttcccgattgatcctcgggggagcgagtgcaagccgtgtccgccctaaagcttcgagcttgtaacgtagatagcgctgcactcctccgcactcatccagtaagtccgaacggtatcctgagcctcgagctcgcatcagcaaggttggacggatgaagtgatgatcgacctaactcaatgaggagtaagcgtcatgacgatagttgtcggcatcgacatagctaaacagaccttcgatatcgccactctgcaagataacggcaagtaccgcaccaaagccaagctgagtaataacgctgcgggctttgaggtctttcggcagtggctgcttaagcacgctgaagccgatgcctgggtcgtaatggaggccactggcatctatcacgaagctttggctgagtggctgtttaagctgggttaccgtgtttgcgtccttaaccccgcacaaatggcctattacgctcgcagccagctgcagcgggtaaagacggataaagtcgatgccaagctcatcgctgactatggccgcaggcatcagaccgaactacgagcttggcagcctgagcagccttctattcgccgtctgaaagcgttagtgcgccgtttgaaggatttgcaggagctggagcaaatcgaacaaaaccgcctagatgtgaccaacgaacagaaggtcagggcgtcaattgaatcggtgcttgagcacttgcgtcaacaaatcgatgaaacgctaaaggcgatcaaacagcacttcgatgacaacgacgatctacgcggccagcgagacctgctaaccagtatcgacggcattgcggacagaaccgcagcgcttgtactggcggagttgggcgatatcgaacgcttcgaaagcagccgtgcggtcacggcctttgccggacttaatcccaggttacaagaatcaggaatgctcaaaggtcatgtgcggatatcgcgcatgggctcagttaggttacgcgccgggctttatatgccaggtatcgtatccatcactcgtaaccccgctattcgggcactggctgagcgaatgagagccaatggcaaaacgggtaaacagatcatctgcgcagctatgcgcaagctgctctgcattgcctacggagtactaaaatccggaaaaccatttgaccctcttctcgctattgcaagatgaggatcaagacggtat

SEQ ID NO: 8390 - DNA, 1183 bp, unidentified
  source 1..1183: mol_type = unassigned DNA; note = element_d231b19
  misc_feature 1..2: note = core
  misc_feature 3..217: note = LE
  misc_feature 218..1168: note = CDS
  misc_feature 1169..1183: note = RE
  misc_feature 22..192: note = bridgeRNA
cttgtatgtttggtcttggcaagtcaaaaagggcttgccggggcggagggaccagcgccgcatctggccgcaggcacagaccgtgggagagctcgtcccgcccctcaccttcaggcgcccatatggaatctatcggcagcgaccgacgattaaaggcaagccagcgcaacggtgagctcccggcaagcacgacacacgctaaccgggagagatgacgatggcaatggcagtcgagacgctacaactgggggttgatgtggccaaggccgagctggtgctctgccaaggctgggatgagcagctggtgacgctggtcaacgagcggcgcgcgatccgctcctatctgaagcacctgtcggggccgacggcgctggcagtggaggcgaccaaccggttccatctggcactggtcgaggaggcacaggcgctgggccacacggtgtatgtggtcgacggctaccgactcaacgcctaccgcaagagcattggcggccgggccaagaccgacgcaagcgatgcccggcttctgctgcgctatctgcgccatgagcagacctcgctgcggccgtggagcccgccgccggccggctacaaccgcctgatccggctactgcgccggcgcgccagcctgatccaggccaaggtggcgctgacccaaagcctccaggagctgcccgagctcaaggccgccgtgcgcagcctgctgcgccagttcgcccggctcgacctgttgatccagacgcggctgcgccaggcactggccgagcatggctgggcggcggatgcccagcgctgccaggcgatcgagggcatcggcccgctcaccgccgccggcctggtcaccgtcttccgccgcggcgccttccacagcagcgatgcctttatcgccttcttgggactcgacgtgcgcgtgcgcgattccggccaattcactggccggcgcaagctcaccaaacagggcgatccggagctgcgccggctgctccacaacgcagccatggccgcctgccgctgcgctacctggcagccgttctaccagcgctaccgaaaccgcggcctgagcaccacccagtgcctggtcatcctggcccgcaagctcgcccgtatcgccttcgcgctcctcaaaaaccagtcgacctatcagcccaactccaccccgatgccttgacctcgaacatagaat

SEQ ID NO: 8391 - DNA, 1229 bp, unidentified
  source 1..1229: mol_type = unassigned DNA; note = element_d259649
  misc_feature 1..2: note = core
  misc_feature 3..192: note = LE
  misc_feature 193..1206: note = CDS
  misc_feature 1207..1229: note = RE
  misc_feature 15..198: note = bridgeRNA
cttgtatctgtcagtgccatttgattagctaccgaatgtcacaaccggggctggtgagtcagtacgtcaggcaagcatttaatgctgcgccgtagattcagaccccagccccatttctcttagacactgaatggtatccaggtccccattataagtggtgaggccgtatgaacaagcggagtaaaaagagagatgacagcatacgttggcattgatgtaagtaaaaagaaattagacgttggtttttattccgacaagctgggtaaaaacggacagaggaagaagaaaacaaaggtctttaagaacgaccgtcaggcgttctctcagctggagagctggctaacgcagcagactcaacataaagcacaggacatcgcgatagggattgaagcgaccgggatttatcacgaagctttgatttatacgctgaacgagcagggatttaaactctttattgccaacccggggcgggcaaagaaatacttcgagtcgcttggcgttacccataaaacggacaaatccgacagcctcctgctggctcgttttacggaagataaagctcataacggtgacattacctggtggaagcctgaatcgccggaagcccggcatttaaagcttttactcagacgcctgaaggccttgcaaaaagacgctctacgcgagaagaaccggctggaagcctgcgccaataccgacacttcaccacgggtggtgaaatcgattgaagatatgatagccgtgcttaatgaggaaattaaagcactgctaaaagaaatcgacgaccatattgacgggcacccgcagttaaagaaaaaccgtgagttgcttgagagtattgatggtgtgggaccgacggtctcccgagagctgaccagcttgttcagcgtaaaacgcttcagcagcgccaaagaggcggcggcctatctggggttgatacccaggctacaggagtccggctcacataaagggatgacccggttaagcaaaatcgggccttcggctatacgagccttactgtacctgccggccgtagttgccagccgttgtaacccggacatcgcttatcagaaacaaaggttgttagctcagggtaagacgaaaatgcaggcgcttggtgccgccatgaggaaactggtacaaatctgcttcggcgttatcaagcatcaggaagaatatcgacctcaaacatcattgagtgtttgaagtcgattggtacaagatggtat

SEQ ID NO: 8392 - DNA, 1407 bp, unidentified
  source 1..1407: mol_type = unassigned DNA; note = element_d25e521
  misc_feature 1: note = core
  misc_feature 2..87: note = LE
  misc_feature 88..1113: note = CDS
  misc_feature 1114..1407: note = RE
  misc_feature 1174..1399: note = bridgeRNA
caatggtatggacccctcccacctaacggcatcgatgtgccagtttggtagaatttgacttccaaacaaccggaggaggagtccgagatgaatattaaacgagtcggcattgacctggcaaaacaagtttttcaagttcatggtgtggataatcacgacaaggcagttttgcggaagcagctaaagagggggcagttcttgagtttctttgcagagttaccgccgtgtttgattgggcttgaagcctgtggcggtgcgcatcattgggcacgggagctacaaaagctgggacataccgtgaaactgatggcgccgcagtttgtgaagccgtacgtgaaaagcaacaagaacgatgccaatgatgccgaagccatatgcgaagcggtaggccggccgacgatgcgctttgtgtcgatcaagacggttgcccagcaagacctgcaggccatccaccggatcaggagtgaactgattaagcggcgtaccgccaaagtcaaccagattcggggcttattagcggagtatgggctggtcgttggacagcaagtaaacactttgcgccgggctttacctggcttgctcgaagatgccgaaaatggcctcagttttgatttcagggcattattggaggagttacgccaagaccttatccagttggataaacggacgctggaaatagacaaaaaaatccataccctcgccaatgctgacccggtatccaaacggttacaaggcattccgggcatcggaccgatcattgccaccgccatcatttgtgcggttggcgaagggaaacagttcaagcgcggtcgggatatggcggcctggttggggttgacgccagggcagcacagcagtggcggcaaagaccggttattggggatgagcaagcggggtgatccgtacctgcggacgttgttgatccagggtgcaaaatcatcgctcaacgcggccgggaagaaaacggacccgtgcagcctgtggctgaataacttatgtgtcaggcgacataaaaacgttgccgttgtggccttggcgaacaaaaatgccaggattgcctgggcgctgttgcgcaatgaaactcattacctgccggaaggcataacgatataggctcagaggagagaggaggaaggcaactgtttaaactgggcgtattttgagataaaaatgttcaaccacgatttgtaaggcaaccaccactgatggtaaacaggtcgaaccggcgtttgcaaaacctggaaagtctgctgtgccattgagcacgcgaaagcgattaggagcaaacgcgcgaataaccattatggccagagctagtcagctcataaacaggtcggatatacgtttgcagtcgtacctaaaaaaccaaaggtgatttttgcttgcaaaacgggaggtgtccatata

SEQ ID NO: 8393 - DNA, 1353 bp, unidentified
  source 1..1353: mol_type = unassigned DNA; note = element_d2616de
  misc_feature 1..2: note = core
  misc_feature 3..83: note = LE
  misc_feature 84..1118: note = CDS
  misc_feature 1119..1353: note = RE
  misc_feature 1144..1341: note = bridgeRNA
agatgtatggactcctcccccaaatagggtgagtacggtataaagagattggacaattacttttaccaataaggaatccatacatgtcaaaatttaacctaattagcatcgacttggcaaaaaatgtttttcaagtcggtaagttttttcatcaaaaacttcaaagtaataaagcggtgggcagaaaagagctactgaccatactcactacgtcacctcgctgtaaagttgttatggaatcatgtggtggtgctcattattgggcacgcaaagcacgtagtgttggtcatgaagtcgtgattctagatcctcgatttgtcaaagcatttagagttggccagaaaacagatgcaaatgatgtcattgcaatagctgccgcttctttctcacctaatgtccgcccgtgtaaatcactgacgcaagcacagcaaagcttacagtcaatagagcgaatgcgcgccttagctgaaaagcagaaacgacagctggctaatcaaatcagaggcctgttacttgagtttgggattgtaatcaagcaatcagaatgcgcgtttaggcaagctattcctgagattctagaggatagcgataatgggttaaccgctggtttaaggcagtgtctagctcagtgctatgaattatttaaagcgcaatcaacattaaaagaaacattaaatgagttactgacaggtttggtaaaacaagatgagcaatgtgaacgcttactggaacttgagggtgtcgggcctatcacagcggttggtttattaataagcttaagtgacacaacccattttacgagcggacgcaatgcggcagccaatgttggtgtcacccctcgccaacactcaagtggtggaaaagtgcgaataggtcatatagccaaataccgtggcgagataacattacgcagccacttgtttctgggagccagagcggtcatcagtcagctaaagcatcgagaaccaaaaacgaaaaaagaacaatggctcaaagcattagttgaaagacggggtgtgaagtgtgccgccattgcattagcaaataaaacagttaggacggcgtatgccatgctgaaaaagggcacgagttatgaacccagtttattagccaattaatatttagccttcaataacagaaacaacagtattgaccaagaacctgcgttaagcggttagacccacccttgatagcctgtaaagtgcctgggtgttaaaacaccgagtaggagaagaggcacaagggcgcgaatacatcaaagggccgaggtagctcctcattatgagcccgcatataagcacgcagtctgacaaaattaacgaagggtattgtgcaataggaggagtccatata

SEQ ID NO: 8394 - DNA, 1424 bp, unidentified
  source 1..1424: mol_type = unassigned DNA; note = element_d27276b
  misc_feature 1: note = core
  misc_feature 2..241: note = LE
  misc_feature 242..1411: note = CDS
  misc_feature 1412..1424: note = RE
  misc_feature 14..256: note = bridgeRNA
ctacttgtttcattgacgtcagggtcggtcctggccaaggctcgatctaggtgcctggggctgtcgctctcatttcggctgctgaccggggtgggcggtgatgtctgttctggtttggctctcatttggcctgcgcagcctcgggctccgctctgatgagcgggagtggctcaagaggggtttgcccagctcgaagtagcgttgccctgcccgctcgaacaactcgagatgggagcagggcatggacgagtccgtggttgtgatcgggatggatccacacaagcggtcggccacgatcgaggtgatggccggcgacgagcaggtcctgggccgtggccggttcggcacggacgcggccggatacaaggcgatgatgcgctacgccaagcagtggccggcccggacctgggcggtggagggctgtcagggcatcggtggccatatcgcgcgccggctggtgatggctggggagacggttgtggatgtaccgcccaagttgtccgcgcgggctcgggtgttcgccaccggtcagggccgcaagaccgacgccaccgatgcgcactcgatcgctcttgtcggggtgcggatggccgggttgcggccggtcgcgaacaacgaccagctcgcgatcctgcggatgctggtcgaccggcgccgcgccatcggggaggaccacacccggatgacctcccagctccatcaactgctgctcgacctgatccccggaggcgcgaagaaggacctgtccgcggcccaagcaaaggtgctcctggccggggtccggccccgcgatgaggtcggcaagacgcgtcggcggatcgccgccgaactcatctccgatctcgaacggctctatcagcggaagaaggccgccaacaaggagcttctcgcgctcctcaaagccaccggcaccacgttgacccagctcaacggcatcggtccgtccgctgcggcccggctcctggtcgaggtcggcgacatcacccggttccccgaccggaaccacttcgcgtcctggaacggcaccgcacccatcgacgcatcctcgggagacaacacccgccaacgcctgtcccgggccgggaacagacagatcaaccgggccctccacatcatggcgatcgtccagctccgcaaccccagcgaaggccggacctacttcgaccggcgcaaagccgccgggaagacctcgatggaagccatgcgcagcctcaaacgacggctctccgacgtcgtgtatcgcaccatgctccacgacgcgatcgctgctggagcgagcccgggagggcaacggggcaacgactctgactccagcgcgaccggaccaacaccccacaccggcacttcggaaaagccacaacccggacccgccacaccaagcctacgaccagcccttcccgccgcctcttgacacagaggggagc

SEQ ID NO: 8395 - DNA, 1183 bp, unidentified
  source 1..1183: mol_type = unassigned DNA; note = element_d273fdb
  misc_feature 1..2: note = core
  misc_feature 3..208: note = LE
  misc_feature 209..1168: note = CDS
  misc_feature 1169..1183: note = RE
  misc_feature 5..190: note = bridgeRNA
cttgtatctagctcctcgcggagtttgcgatcattctggtccgggcgccagctcgatgccacctgggtggtgaacaccgtgcgttagccggagcggcgtcccggaccgtccgtcgcaggagcccgaacagttgcaggggccggccgcgcgccgagcccgaattgtcgcaaggacgggccggggcgacactctcgtgaggagggggcgcatgttcgtcggcattgatgtcgccaaggcggagttggtcgtcgccacgcggcccggcgaggcgccgtgggccgtcgcgaatgacgagcgcggcgtccacgcgttgaccgagcgcctgcgcgccgccgcgccgccgctgatcgtgctcgaggcgacgggcgggtacgagctgctctgcgtcgctgccctcgccgcggcggcactccccgtcgtcgtggtgaacccgcgccaggtgcgcgacttcgcgaaggcgacggggcagctcgcgaagacggaccgcatcgacgccggcgtcctcgccctcttcgccgagcgcgtgcggccggcggggcgcccgctgcctgacgcggacgcgcaggagctcgacgcgctgctcgcccgccgccgccaactgctcgacatgctgctcgccgagcggagccggctgggccaggtcttcgggcgcggcaagcagccggtgaggaagagcctcaaggcgcacatcgccttcctcgagcgcgacctccgaacggccgacacggacctcggcgccatggtgcgccgcagtccggcgtggcgggagaaggatgacctgctgcagagcgtccccggcgtcggccccgtgctctcgctcacgctcctcgccgacctcccggagctcggccggctctcgcggcgcgagatcgcgaagctcgtcggcgtcgcgcccctgagccgcgactcggggacgctgcgcgggcggcggttcgtgcagggcggccgcgccggcgtgcgcgcggtgctctacatgggcgcgctcgtcgcgacgaagcggaacgccgtgatccgcgggttctaccagcgcctgctcgccgccggcaagccgaagaagctcgcgctcgtcgcctgcatgcggaagctcctcacgatcctcaacacgatggtgcgcacgcggcagtggtggtgcgcggcgcgggtcactcaggcgctcgtccgtgcttgactttcgagacagttg

SEQ ID NO: 8396 - DNA, 1215 bp, unidentified
  source 1..1215: mol_type = unassigned DNA; note = element_d2773ca
  misc_feature 1: note = core
  misc_feature 2..212: note = LE
  misc_feature 213..1184: note = CDS
  misc_feature 1185..1215: note = RE
  misc_feature 35..201: note = bridgeRNA
tcttaagttagcattttattaaattagaaacttaatcatacagaaccaaagagcggaataaggttatgatatacgcagagactttgatctcgtcaacattgataatccctgctcttttctatgttaaattcgttcagttctatgaagctttagacttcgatttcaagttgttgaattcactatagataggttctttacaatccttttttcttatgaataaagatataaaatatttaggaattgacattagtaaagatttctttgatgtatgtgataataacttagtgtattatcaatttaagaacaatctttctggtttcagaaagttagttaaattactggattcaaataccatttgcgttatggaagctacaggatattatcatactcgattagcttattttttgttggagttaggttttggagttagtgtggttaatccattaaaaataaaacgttatatccaaatggacttatcgaaaataaagactgataagagtgatgcaaaaatgattcaactttacggaaaagatcgtagacctaagttgtggattggtcaatcagatactcaacaagaatgtctccagttattacgtatgctcagtatttatagtaaacaaagtactcaattaaaaaacaaaatacatggagaagaagttttagggtatccatcaaaagttgttattaactctttaaataggagtttgaaaaaactcaaaaaagaaatggaagttctagaaaaagctttaaatgataatgtaaaaaaagaataccaagaatcactaactttattaaaaagcattccaggaataggagataaaacagctttaatattattagtttttacagatggttttcatcgttttgaaagctcgaaagaactatgtagttacactgggttaacacctataacaagacagagtggaagtagtattaaaggaagaccaaggattagtaaaatgggcaatccaaaactgaggaatttactatttatgtgcagtttcaatgcttgtaaatacaaccaagggtgcaaagcgctttacgatagaattgtagcgaaaggaaaaagtaaaaaactagctttaatagcagtatgcaacaaattactaaaacaagcattttctattgtcaaaaatggtgttccatacaacaatcagtacaagagtactttggttaataattaaggaagttttatttggtttttacctcagttct

SEQ ID NO: 8397 - DNA, 1514 bp, unidentified
  source 1..1514: mol_type = unassigned DNA; note = element_d27eac3
  misc_feature 1..3: note = core
  misc_feature 4..246: note = LE
  misc_feature 247..1266: note = CDS
  misc_feature 1267..1514: note = RE
  misc_feature 3..220: note = bridgeRNA
cttatattatatttaacgcagttagctactgccaaagcccaagtggtatacttggaataagccactgtggattagttcatttcctccaatcgcttgacgatttccgaaagggtctaaccacagcttcttgtttcaattggtaatgagtttgataacgcatagacgttttatttcgtctaaggtaacaaggcaaaaagttcgtggataaccaagtagacttgaaatactatatctggaggtactcccatgccttatgtgggcattgatgtcgctaaaaataaacacgatgttacagccttgaatgtttcaggaaaaactgttcttaaaccactcactttttcaaataataaagctggttttgaacttttagatctgtctcttcgacagctcaaccaagactatctcatcgctcttgaagataccggacattatgcctttaatctactgaacttcctgcatgaacaaggatataaagtttacacctacaattctttgctcatcaagaaatttgccaaatcattattacttcgcaagactaaaacggataagaaagacgctcatggcatcgctcttaaacttctttctgaccccaatcgtgaacaatttcaacacgataatcggcaagtagaactaaaaatactggctagacatattcatcgtctcaagaaaaaacagtctgattggaaagtacaatacactcgttgtcttgatatcatctttcctgagttggataaaatcgttggaaagcattcagaatatacctaccaactcttgacatgctaccctaatcctcagaaaaggattgaggcaggatttgataagctgatagaaattaagcgattgaccgcttctaaaattcaggatatcctctcagtcgcacctcgttctatcggaacaacatctcctgctcgtgaattcgaaatcatcaaacattacaagaggctcattgacaaggcggaaacatgtgtcaatgacttgatggctgagttcaactcggtcatcacgacggttactgggattgggaatcgtttaggggcggtcattttagccgagattcgaaatattcatgcctttgataatcctgctcaattacaagctttcgctggactggattcttctatttatcagtcaggtcagattgatttagctggaagaatggtcaaacggggttcccctcatctgcggtgggcactcatacaagctgccaaagcatgccctcgcttttcacctgcttttaaggcctatcttaagactaagttagaataaggaaaacattacaatgtagccatcatccaccttgcaaaaaaacttatccgaaccctgttttatatcctaaaaaagatctgccatttgacgaacaaaaagtgatgtaatttctgaaattaacacaggattacctttgaaaaaatggactttttcaagggctttttgccgtgctctaaaatcatcgccaaatcatcaaattgaaataagaaataatttagataaaactattgacttttcttatagtttgt

SEQ ID NO: 8398 - DNA, 1199 bp, unidentified
  source 1..1199: mol_type = unassigned DNA; note = element_d282130
  misc_feature 1..2: note = core
  misc_feature 3..206: note = LE
  misc_feature 207..1187: note = CDS
  misc_feature 1188..1199: note = RE
  misc_feature 15..212: note = bridgeRNA
cttgtcttatgacttttcccgtcgccgacgtgcgatgaaggaccgttgattctggatggccatctcgggtcaacgggaaggggaagggtcgaaactatgtgggccattataggccgtgatacagtatgaccgccccttcttttccttgcgccctgaacggatacctgaggtctggcctcggatgacaagcataggacatggaaaagatgatgcacccggccgaggcttttaagcccgcaccgacagacgcgctgatcacgatcgggatcgacgtgtccaaggaccatctcgacgcggcccgtcacccaagcggggacagcctgcgcgtgccgaacacccgcaagggccatacggagctgctacggtggctcggcaattcaggcggcatcgcaagggtcgtgttcgaaccaactggcccttatcaccgcatgctggaggaacgtctcgcgtccgtcggactgcagatcgtcaaagtgaacccaaggcaggcccggcgtttcgccgaagcggccggaaggctcgccaagactgatcgcatcgatgctctgatgttggcgcgttacggagcgcttctcgagcctgtcacacgaccggtgcgttccgatgtccagaaccggctggccgaactggtcgctgcccgtcgcaacctgatgcgcgatcgcacggcgactctcaatcgcctcaagaccctgacgatcgagttgctcaagcgccatgcccgtcacaggctgcgccagatcgaggcgcaggtcgcgtctcttgatgccgctattgacgccatcgtcttgggcgatccggtgctcagccgacgccgcgacgtgctggtcagcattcctggtctcggcctgatcacggcgcacaccctactcgccgatatgccggaacttggcgccatggaagaaggccaagctgcctcccttgccggcctggcgccgattacgcggcagtccggcacatggcgcggcagaagctccatccaagggggccgcgccagtctccggcaagctctctacatgccagctatcgttgccatgcggttcaatccggatctcaagcgtgtctatgacaggctcatagcccagcgaaaacacactaagatcgctatcaccgcgatcatgcgaaagatcgttgtcctcgcgaatgcgctcctgcgcgataatcgcctctgggcaccgaaaacctcttgatcactacggata

SEQ ID NO: 8399 - DNA, 1167 bp, unidentified
  source 1..1167: mol_type = unassigned DNA; note = element_d288c9c
  misc_feature 1..2: note = core
  misc_feature 3..177: note = LE
  misc_feature 178..1146: note = CDS
  misc_feature 1147..1167: note = RE
  misc_feature 34..198: note = bridgeRNA
cttgtatcttgaaaattggttaatataacagcgattagatttggcaatgtgtatgcagcctgttgtctcctggggtttatagcccgtgattaagcgtttggcgcatacactgagccactcatctgaaacccgaacagttgtccgtactccataacgcatttgcaaggatgggtaataatgagtctgccaaatccactctgtgtgggaattgatgtttccaaagcgacactggacattgctactaccagtgagttcgcacagttcactacaggtaacgacgctgatggctttgatgccattattgctgaactcagaaagcattcggtggcgttgattctgatggaagccaccggagggcttgaggctgctgtggcctgctcgcttcaggccgaaggttttgatgttgcggttgtcaatccaaggcaggccagagactttgcccgtgcaatgggatacctggcaaagactgaccgcattgacgccagagtgcttgctcagatggctgaagtcattaatcgccatccggaacgggaacgctttattcgggctctgccggatgccgaacgtcagctgcttgctgcaatggtggtacgcagacgccagttgattaccatgttggtggctgagcgtaaccgtctgcatcctgcacatccgcaaagcagaaaaagcattaatatcatcatccaggctctggagaatgaacttgcccggatcgatgaagatatgaacaggcacattcagagtcattttaaagagcttactgaacgtctgagcagcatcaaaggtgttggcaccatgacggctgctgcattgctggcagaagtgccagaactgggcaacctctcgagacgtgaaatcagtgcacttataggtgttgttccggtaaaccgggactcgggaaccatgcgcggtcgacgaaccatttttggcggtcgagcgggggcaagagcagccctgtacatggcagctcttgtggcaacccggtttaatccggtgatacaggcgttttacatgcgtctgcttgcagccggaaaagccaaaaaagtggcgctggttgcctgtatgcgcaagttgctgactatcctgaacgcaatgctcagaaagaacgaagaatggaatgaatcgtaccatcatgttgctccatgatttttacgttcaagacagttg

SEQ ID NO: 8400 - DNA, 1363 bp, unidentified
  source 1..1363: mol_type = unassigned DNA; note = element_d2a72b5
  misc_feature 1..2: note = core
  misc_feature 3..75: note = LE
  misc_feature 76..1104: note = CDS
  misc_feature 1105..1363: note = RE
  misc_feature 1080..1351: note = bridgeRNA
tgatgatgtgaccgccctccggacggcttcaatgtaccaaggtgggtctgcgaggatccacagagaggagcggtcatgtcagagattattacggtcgggcttgacctggcgaagaatgtgtttcaggcgcatggcgctgacgcctcggggcatgcagttctgcacaaaacgctgcggcgggatcaggttctggctttcttcgagcagtcgcagccttgcctcgtggcgatggaagcctgtggtggcgcccacttttggggccgtgagatcgggaagctgggccatgaggtgcagctgattccacccgcctacgtcaagcccttcgtgaagcggcaaaagaacgatacggcggacgccgaggcgatctgcgaagcggcgcagcggccgtcgatgcgcttcgtgcccgtgaagagcgaagagacccagggcgccgcgatggtcttccgcattcgcgagttgctgatccggcagcgaacacaggcgatcaatgcgctgcgtggccatcttggggagttcggccagatcgtgccgcaaggcgcagccaacgccacccgactgatcgccatcgtcaaggacccggacagcagcctgcccgccgatgccatttccacgctgaaggctcttgtcggaggcctcacccatctggagacggagatcggcaagctcgatgccgagatcgcccggcgtgccagggagaatgaggttgcgcggcgcctgatgacggtgccgggcatcggaccgttgatcgccacggccatcgcggtcttggcgccgccgcccgaaaccttccgcaaggcgcgcgacttcgccgcgtggctcggcctgacacctcgacagcattccaccgggggcaagccgcgcctcggggccacgacgaagatgggcgaacgctccctgaggcggctgctgatcataggcgcgaacagcgtgatcatcaaacggcatgtccatgcggcggcccagcccggcacttggctgggagagatgctgaagcgcaagccgccgatgctggttcgagtggccctggcgaacaagatggcgcggatcgtttgggccctgatggcccggggcggcgcctacaagtctccggccgcgacggcgtaagccggtcgtcggtcgcgaggacgtcggagcggaagagggcaaggagaagtttggcgcaacggtcgtgagacgggatcgggagaaccagggtgcaacagagtgccttcgagcacgcggctttgatctggacccgacctgcgaacaccatacgggcccgcggcataaaaatggccgcaacagaggccggacacatgtcagcacccgatgacgcgccaagatcgactcccaaaatacctcttgcgcaaggggcggttacaca

SEQ ID NO: 8401 - DNA, 1439 bp, unidentified
  source 1..1439: mol_type = unassigned DNA; note = element_d2ac1a6
  misc_feature 1..2: note = core
  misc_feature 3..154: note = LE
  misc_feature 155..934: note = CDS
  misc_feature 935..1439: note = RE
  misc_feature 1206..1434: note = bridgeRNA
agatggggtaacgggccggccgcccgctcgctacggcgcgatttggaagcgcgctcgcgagcggcctattggtcgaaaggcggtcgtccctcaaactgatggtgtcaataacggagtcgggcgagcccgctccaagcatcatcgagggacgaccatgtaccactatgcaggaatcgacgtgtctttggaaagctcgaccatttgcgtggtcgatagcactggcaagattttgcgcgagacgaaggtcgcgagcgagccggaggcgctgatcacctggttccgatcgctggggctggcgcttgagcggatcgggcttgaagcaggtcctctgtcgcaatggctgtatgcggcgctgcgggaggcaggctttgcggttgagcttttggagacccggcacgtccgcgatgccttcaaggcgatgccggtgaagtcggaccgcgatgaggcccgcgggatcgcgcaatcgatgcggctcggctggttccgcccggtgcactgcaagtcgatcgaagcgcaggagacgcgcgccgtcctgacggcgcgcaagctgctgcagtcgaagctgcgcgatgtcgagaacagcttgcgcggcgtactccggggctttggcctgaaagtcggcaagaccaccgagggcacgttcgccggacgtatccgggagctggttgccggccatcccggcctggaattggtggcaaaggcgctgctcgaagcccatgccgtactgcggcgcgagttcaatggtctggataagcacacccaaaaactggccagatcgcatccgcaggccaggctgttgatgacaacgccttccgtcggtccgatcgtggcgctcacctatgcctccgcgatcgacaatccaagccggttccgatcctcgaagacgaccggggcgcattttggcatcacgccgaagaagtaccaatcgggataaaccgattacaccggccgcatcagcaagatcggcgatgcatcggtgcgcgaggcgctctatcaggcggctcacgtcatgctgacgaagccggtcaaaaactgctcggcgctgaagggctgggccatgcggatcgccaaacgtgcgggcatgcgcaaggccaagggggcgctggcccgcaagctcgccgttatcctgcaccgcatgctcgctgatgcaacaccgttcaacccgacggctaaggccgcggcaacctgagcaaggaatatcaatcggttctgggcgagccacgacaccaggctctccccgagcgaagtcccttcgccgggacgatggatccggtcaggccgccatccgggaagtggccacaaccacgctccccgtagattggccggccggctcctcatgcaccccctaaggtgacggccaccgcgccgatcccgtacagaagcacgtgcccgcgagtgacaacgcaaaaagggattgactaaccaaggcccgttacaga

SEQ ID NO: 8402 - DNA, 1412 bp, unidentified
  source 1..1412: mol_type = unassigned DNA; note = element_d2b6c7d
  misc_feature 1..3: note = core
  misc_feature 4..80: note = LE
  misc_feature 81..950: note = CDS
  misc_feature 951..1412: note = RE
  misc_feature 1132..1399: note = bridgeRNA
tgatgtcgtggatggcgccctccaccagcgtcagacatgccaagatgggcatgtccaagaaccggagaggatccacttccatgcctgagattgccacgatcggccttgatatcgcaaagaacgtcttccagctgcacggtgtcgaccgaagtggaaggatcgtcctgcgcagggcgctgcgccgcagccagatgccgggtttcttcaaaaccctttccccttgcctgatcgggatggaggcttgcgcgacggctcatcactgggcgcgcacgctcatggctttcggccatgatgtccgtctgattccgcccgcctatgtcaaaccgtatctgcgtcgacagaagaatgacgctgcggatgcggctgcgatctgtgaggccgtcacgcgcccgtcgatgcggtttgttccggtcaagagcccacagcagcagagcaccctcatgctgcatggggtccgcgatcttctgatcgggcagcggaccgccctgatcaatgccctgcgcggccacttcgccgagctgggcatcgtggtggcgcaaggggctcgcaacacgcgccagctgatcgctttcctccatgaggaggccaatccagacttccccgcggcagctcgaactgcgcttcagcctttggccacgatgctgctcgggatcgaggcgcagattgccaggctcgataaggccatcttggcggcccatcgcagcgatccggtcagcctcagactggccaccatcccggggatcggcccgatcgtggcctcctgtctttcggccagcatcccggacgccagcctgtttcagggcagccgggagttcgccgcctatctgggctggtgcccgagcagcattcaaccggcggcaagccgcggcttggctccatctccaagatgggcaaccggcacctgcgtaagctgctggtcgtgggagcgcacgccgcgctctacagcatgaagtccggcaagaccaagacggtcctggcggactgggcccggtctctgctggccaagaagccgttcaaggtggtcgctgtcgcgctggccaacaagatggcccgcattgcctgggcagtgatggccaggagcacggcttacgagcccgggagccgtggcgctgccgcaccggcggcatagacgaccagttcaaacgacctgcccttcggggtatcccagttggcacggtgacgatgagatgatgtgaagccaaagcggacatggaccgccggagctggcaaacccgtggtgatgtcttgcgtcagtcaagcgcgataccgtgagagggagcagcttccagcgtaaaacatcagggcctgcggtcatgaagcaccgcgttcaaaggccggagacatgactgcacccgccccgctaggccaaacgtcatcaacaatcacattgccaaacgggcgccatccagaca

SEQ ID NO: 8403 - DNA, 1433 bp, unidentified
  source 1..1433: mol_type = unassigned DNA; note = element_d2bddbc
  misc_feature 1: note = core
  misc_feature 2..225: note = LE
  misc_feature 226..1248: note = CDS
  misc_feature 1249..1433: note = RE
  misc_feature 15..237: note = bridgeRNA
ctgattgaggatgtgggtgggcgccacggttgatccgtagcgtctcgaggtccttgcgggttcgttcacgaagcgcctgccgtcggcgttcgccggctggcttacgaacgaagagcgtcccgtcggggcttcacccgcggtgtggctcgaaagaggaacgtgcgctcaacgatccgaatcaggagtgcccttcgcggtcccatcaaccagaccacggaggaactcatgacagtgatgatcggtgtcgacccgtacaaggcgacacacaccgccgtcgccatcggtgacgatgaacgcgagctcgcgacgatcaaggtccgagccacccgcaagcaagtactccagctcttggcgtgggccgctccgttcgagtcgcggacctgggcgatcgagtccgccgccggcatgggctacctgctcgcccagcagctcgtcgacgccggcgagagcgtcgtcgatgtctccccgacgttggcgtcgagggtgcggctgctgggttcgggtcggtcggacaagaacgaccccaacgacgccctgtcggtcgcggtcgccgcgttgcgggcgccgacgctgcgggaggtctacgccgtcgatcacggtgaggtgctgcgcctgctggccaagcggaacctcgacatcggcagccaccgcacccgagtcgtgtgccggctccacgccgcgctcgccgggctcgccccaggcggaatgtctaaggagctcaacgcttctgaggctgaggccttcctcgaccaggtcgagcccgtgagcccggtggagcatgttcggctcgagctcgcccgcgagatgctggccgatgtgcgccggctcgacgcccagctcaaggactcccaccgccggatccgcgccgcggtcctcgcgtcgaagacgtcgctcaccgacctgttcggtgtcgggccgatgatcgcgtgttcgctcatcggctacacccgcgacgtccgccggttccgcaaccgtgaccagttcgccgcctacaacggcactgcacccgtcgaggtgtcctccggcggccgcatcacgcaccgactgagtcgccgcgggaaccgtcggctcaaccacgccatccacatggccgcggtcacccaggtccgccacgcccactccgagggccgggcctacttcgaccgcaagctcgccgagggcaagaccaagaaggaagcgctccgcgccctgaagcgccaagtgagcaacgccgtctaccggcagctgctcgtcgacgcagcgagatagcgggcccgggaggacagacgggagcgactcttcagccagcgcggccagcttcacatcccttgcagccggctcttcggtgaggtcactcccggacccagaaccacgctacgagcgatgcagccgcatcgcccctccgacgcgcccaacgcccacctcaggaactggcccttgacacaaagaggatt

SEQ ID NO: 8404 - DNA, 1484 bp, unidentified
  source 1..1484: mol_type = unassigned DNA; note = element_d2c9cfb
  misc_feature 1..4: note = core
  misc_feature 5..256: note = LE
  misc_feature 257..1474: note = CDS
  misc_feature 1475..1484: note = RE
  misc_feature 27..216: note = bridgeRNA
ctcactggtgcaccctccccacggaggaagctgaaaggatgcttgggagctcccggtgcccgtcggaccatcgccacggtcgcttgccttgcgaaggccaccatgagtatcgcgaggtccgacggcccgggacgccttgagcggcaacagggcgacgcgccgtagagcgccgatcagtgagcctcctgccacggcgtcccggtaccggcgggtgcaagcacccccttcggctgcctgcgcagcagaaaggatcatcatggatggtgccacaccagcccgggtggccgggctggactgggcctcgcgcctgcacgtggtgtgcgtgctggaccccgacgggcagatccgcgcccgcttccaggtcccccacaccggtaaggacctgcgcggcctgaccagacgactggccaagctggaggtcggccgggtggcgatcgagcggcccgacggcccggtcgtccaagcgctgctggataccgggttccaggtggtcgtgatcccaagccggcaggtcaagcacctgcggtcccggtatgggtcggccggcaacaaccacgaccggttcgacgcctacgtgctggccgatgtgctgcgcaccgacggccaccggcttgtcccgctgcgccccgactcgccccagaccgccgggctgcgggcggtcagccgtgcccgcaagcagctggtcgaccaccgcgtggcgctggccaacgagctgcgcgccaacctggaggtcgccttccccggcgcggtcagcttgttcgccgaggtcgacagcccgatcgcgctgcgcttccttggccgcttcccctccgccgagcgagccgcctggctgacccaggcccgcctgggcgggttcctgcgccgggtcggctactgcggccggaccaccaccgccgagctctaccagcgcctggtcgacgcccccgacgggctcggtggcgccgaaggtgaggcccgcgccgcggtcaccggcagcctggtcgccaccctgcgcgccgtccgcgcccagatcgacgagctggacggcgagatcgtcgagcggctggccgcccacgccgacggccacatcttcacgggtctgccccgctcgggccgggtccgggcggctgccctgctggccgagatcggcgactgccgccagcgcttccccgacagcccgtcgctggaatgcctcgccggggcagcaccctccacccgccagtccggcaagcacaccaccgtcaccttccggtacgcctgcgacaagaagttgcgccaggccgtcatggacttcgccggcgactcccgccgagccaatccctgggccgcccacatctacgaccaggcccgcgcccgcggccaccgccacccccacgccgtgcgcatcctggcccgagcgtggctccgggtcatctggcgctgctggcaggacggcaccgcctacgaccccgcccgccacggcgcctaccagcgcctgatcgcgcaaggaggttgacacagggcta

SEQ ID NO: 8405 - DNA, 1617 bp, unidentified
  source 1..1617: mol_type = unassigned DNA; note = element_d2ca2f9
  misc_feature 1..2: note = core
  misc_feature 3..287: note = LE
  misc_feature 288..1460: note = CDS
  misc_feature 1461..1617: note = RE
  misc_feature 42..267: note = bridgeRNA
ctggtatattcaatttgacctatatagttgactaaattgaatatacgttttctttctacctgacctcgtatccatcaggactgtttttgatagaattgaaatcgtgaatgtgtactttgaccacctccttgaagctttgacttcatgaaatagaatcttgccacttcttaatattcagaatcgagatcagttgtatgggtctttgaactcttatcttttaccaggatctatgcggatactttgtaagtggaatgcatattcatattttacagaaaggatatatttttatgcgttactttattggtattgatgtagctaaattcaaacacaccgcttgtgtcatagacacgtatggcaccgtccttgtagaatcctttgatttcactaatgatatcatcggcttccaatccttattgaaaaatatcaaaccattccttaaaaagaaacacctcgttggtatggaggatacgggacattacggagacaatcttcgcaacttcttattggaaaaacagtataaggtcgttatgttaaaccccatcgttacatctcatatccgtaaggcttccaacaaagccaaaaacgatagaatcgattgtttcgtcattgccaacacgatgatgaatcctaatttctacagagaccaacatgcacaatctattgattacgctacggtacgtcaactgacacgtatgcaccatacacatacggaagaaatcaaccgctataagtgtcagttacagaaatcaattgatattgtctttccagaattcaattctcttctcaacaccaaatattcaaaaacctatcttgagatactagatacctaccatagtgcttatacaatcgccaataccgatatccgcctgttacggaataccctaaaaaatgttggcgtaggtcgctccgtatcaatctctgcagaacaacttaagaaatccgccaaggaatctattggtcaacataatcttgcgattgaaatggatattccatttttgatttctcttatcagaagattgacttcaatactaggtgaaattgataaaaaaatagaagaattcagtcatcaactaaactctcctatcttggacatatctggaatttcccacttttcagctatgtcgatcatctccgaacttggtgacattacttatttctctagcgaaaagaagctcatcaagttcgccggtataaatccatgcgtttatgaatccggcacctatagtatgacacatacgcggttagaaaagaaagggtcaaagtacttgcgtaagacactatatcaaatcattgactctgtcatacgcttcaaccctatattccaagcattctatcaaaagaagatttcacagggtaagagttaccgctgtgcacaaggtcactgtatacgtaaactcttacgcgttatatacaagataatctccacaggtgaaggtttcgactctgccaaattgaaatagtcttaattccataattctagttaaaaatcaagctatgtaaggatagttgtttttgttgtacacaattcacttttcaaagaactatcgacacatatatttatcaagttatttattttcaaacttttcattactttactcttgatttatatatagttgt

SEQ ID NO: 8406 - DNA, 1326 bp, unidentified
  source 1..1326: mol_type = unassigned DNA; note = element_d2ca7f7
  misc_feature 1..2: note = core
  misc_feature 3..68: note = LE
  misc_feature 69..839: note = CDS
  misc_feature 840..1326: note = RE
  misc_feature 1093..1324: note = bridgeRNA
ttaatgagatggtcactccctccttcccggtactatgctgaggacaggctttcattcggagaactatcatggaaaacattgcgctcattggtatcgatctgggtaaaaactctttccatattcattgccaggatcgtcgcgggaaggctgtttaccgtaaaaaatttacccggccaaagttgatcgaatttttggcgacatgccccgctacaaccatcgcaatggaagcctgtggcggttctcactttatggcacgcaagttggaagagttggggcattccccaaagctgatatcaccacaatttgtccgcccgttcgttaaaagcaataaaaacgactttgtcgacgccgaagctatttgtgaagctgcatcgcgtccgtctatgcgttttgtgcagcccagaacggaatctcagcaggcaatgcgggctctgcatcgtgtccgtgaatccctggttcaggaaggtaaaacaaccaatcaaatgcatgcttttctgctggaatttggcattagcgttccccgaggagctgccgttattagccgactgagtaccattcttgaggataatagtttgcctctttacctcagccagttattgctgaaattacaacagcattatcactatcttgttgagcagattaaagatttggaatcccagttgaaacgaaagttggacgaagatgaggttggacagcgcttgctgagcattccctgcgtcggaacactgacagcgagtactatttcaactgagattggcgacgggaagcagtacgccagcagccgtgactttgcggcggcaacaggggcttgtacctcggcagtacagcacgggaggtaggacgacattgctgggaattagtaagcgaggtaataaaaagatccgaactttgttggttcaatgtgccggggtattcatacaaaaactggaacaccagtctggcaaattggccgattgggtcagggatttactgtgccggaaaagcaactttgtcgtcacttgtgctctggcaaacaagctggccagaatagcccgggccctaacggcacgacagcaaacttatgtagcataacggcagaaatacaccggtttaaagaattactgatctggttttgcgaatactgatattgatgatactaacggcccaccggcctgttgaggaacctgtaaaacggaaaggctcattgaagccgtatattttctggaggttcatcaggcgcggaactcatcaaggcgcgggaataaaatcccattcagacgccggatagattcaagcaagccaacttgtcgtcaaaatcggtgttgcaaaaacgggagtgaccataga

SEQ ID NO: 8407 - DNA, 1462 bp, unidentified
  source 1..1462: mol_type = unassigned DNA; note = element_d2ca942
  misc_feature 1: note = core
  misc_feature 2..244: note = LE
  misc_feature 245..1447: note = CDS
  misc_feature 1448..1462: note = RE
  misc_feature 44..217: note = bridgeRNA
cgttaccttgttgacaggtccttttgacgagtgttgattgggcttgtcggtcagtcgctctggcatggtgttctacccctgtctattcaatgatccggggggtgttgccaccagagtcgattgatagtgggtgatcgctgattaggggctcggcaccagtgttggatgcctgtcgtaacgtggatgtgagacttactgtcgcggcctgatcgactgagtattaaccagttagatgggagcaaagatggtcactcatgaaacacccgaggtctttcttggcctcgatgttggcaagaccgagcactgggcctgtgctatcacgatgaatcagaaagtcgtgtggaacaaggccttacccaacgatgaagccaaactgatcgacatgtatcgctctttacaagaacacggatcgttgctggtggttgtcgatcagccagcaacaatcggagcgttagcagtcgcggtcgcccaacacatggggatacccgtggcctatcttcccggtttgacgatgcgacgtatcgctgacctgtatcccggcgatgccaagaccgacgagaaagacgcgttcatcatcgccgacgctgcacggagtttgccacacaccttacgtgaactaacacaagcagacactgacgaagcaacattgggaatgctcacaggttttgatctcgatctatcccgccaagttaaccaagtatccaatcggattcggggtttgttcactcagatccatccggctctcgagaaagttctgggatcgagactagaacacgacgccatcttagaagtactcatgacgtggacaacccccgataaactccgcaaggccggaagagccaggatcgacgcgaagctcaagaaacacggagcccgtcgccacagtgcatggactgaagaaatcctcgttgctttagcgagacagacagtcacggtcactggtaccgaggccgcaggaatcgtcatcccacatttagctcgccaactcatatccctgcacgctcagcgtgccgatgttgcccgtgaggttgaagggatcgtggtcaatcaccctctttacctggtcctgacctcgatgcctggaatcgggctcaggacctgcgccgtgatcatcgctgagctctccgggaagacttttactagtgccgcagcactcgcctcctatgccggactggcccccacgacgaggcaatccgggacctcaattaaatccgaacgagtgagccattccgggaacaaacgcctcaaacgcgccctcttcctctcagctttcgcagttattcggacagacccgaccagccgtgcatactacaaccgcaaacgaaaccaaggaaaacgccacaaccaagccatcatcgctctagcacaccgcagactcaccgtcctgtacgccatgctccgagacaacaccctctacgacaccccggaactagcccaagcagcttaacaaacaacatagggg

SEQ ID NO: 8408 - DNA, 1154 bp, unidentified
  source 1..1154: mol_type = unassigned DNA; note = element_d2cecf5
  misc_feature 1..2: note = core
  misc_feature 3..206: note = LE
  misc_feature 207..1142: note = CDS
  misc_feature 1143..1154: note = RE
  misc_feature 12..212: note = bridgeRNA
cttgtcttatcctgaacctggttcctgcggtatgaaggagccactgcccgccacgccatttatggcgggcagtggcggcggttggatcgtaagctgcttggtcgtgatggaccgttctcgagtgtgatcaaccgccgtcttccccaagggcctgaacggatacgcgtgtgacaaatcacgcatgacaagcataggacatggtgaagatgacagagcataccattggcgtcgatatttccaaatcccatcttgatgtttttcatctggagggaaaggcagcgcagcgttttgaaaacacccccggcggcttgcgcgcgttgcgtaaatggctgggctcaaggcccttggcccgtgtagtgtacgagccgaccgggccgtatcaccgtcttttcgaggacaccctgtccggcaagctaccgcttgtgaaggtgaacccgttgcaggcgcgccgatttgccgaagcctgtgggacccgcgcgaagacggatgcgttggacgcccgtggcctggcgcgcatgggggctgcgctggcgctggagcctgacgccgtaatctcacagaatacacgcgttctcagagacttgcaggttgccagaacggcattgatcaaagaacggacccggttgcgcaatcgaggccacgttcaaacgaacgccgttctcaagcgccagaccaagacccgtctgacgctggtcgagaagcagactgccgagttggacaatgagattgcgaaactcatcgacgccaatgaaaacacggcacgccagcgcgatattctgcgatccattcccggactgggccagatcgcgacagccgcgatcctgacattcctgcccgagatcggcacgctggacagacggcaagtgggcagccttgctggccttgttccctacaatcgcgactctggccagtggaaagggaaatcattcatcagcggcgggcgcaaacccctacgtgatgccctctacatgccagccctcgtcgccatgcgcttcaaccccgatctcaaggcaaaatattccgcgctgcgtgctgccggaaaaccggcaaaagttgcaatcgtcgcggtcatgagaaagctgatcgaaaccgcaaatgcgctcgtcaaagctgaccgagattgggtgaaaaaaacggcttgatcaagacggata

SEQ ID NO: 8409 - DNA, 1165 bp, unidentified
  source 1..1165: mol_type = unassigned DNA; note = element_d2d1b49
  misc_feature 1..2: note = core
  misc_feature 3..205: note = LE
  misc_feature 206..1150: note = CDS
  misc_feature 1151..1165: note = RE
  misc_feature 22..214: note = bridgeRNA
cttgtatctagctcctgccggagtttgcaggcattctgctcggggcgccagctcgatgccgtctgggtggtgaacaccgcgcgttagccggggcggcgcacccgatcccctgtcgcgagagcccgaacagttgcgggggccgccgccgaggcgagcccggattctcacaagagcgggccacggcgacccccacgcgggagggcggatgctgatcggaattgacgtcgcgaaggcggagctggtcgtcgccgcccggccgagcggggagcggtggacggcgcccaacgacgagcgcggcgtgcagaggctcgtcgagcggctgcggcacgacgggccggcgctcgtcgtgctcgaggccaccggcgggtacgagctgctgtgcgttggggcgctcgccgccgcggggctgcccgtcgtcgtggcgaacccgcgccaggtgcgcgacttcgccaaggccacggggcagctcgcgaagacggaccgcatcgacgccgacgtcctcgccctcttcgccgagcgggtcaggcccgaggtgcgcacgctgccggcggccgacgcgcaggagctcgacgcgctcctggcgcgccgccgccagctgctggagatgctccaagcggagcgcaaccgcctcggccaggtgttcggccgcggcaggcagcccgtgaagaagagcctgaaggcgcacatcgccttcctcgagcgcgagctgcgcatcgcggacacggacctcggcgcgatgatccgccggagccccgcctggcgcgagcgggacgacctgctgcagagcgtgcccggcgtcggccccgtgctctcgctcacgctcctcgccgagctgccggagctcggccgcttgtcgcggcgcgagatcgccaagctcgtcggcgtcgcgcccctgagccgcgactcgggggcgctccgcgggcggcggttcgtgcagggcgggcgcgccggcgtccgggccgtgctgtacatggcggcactcgtcgccacgaagcgcaacgcggtgatcggcgccttctaccagcgcctcctcagggccggcaagccgaagaagctcgcccccgtcgcgtgcatgcggacgctcctcaccatcctcaacgccatggcgcgcacgaacacgcggtggcaggagcaccccgccaccgcttgacattcaagacagttg

SEQ ID NO: 8410 - DNA, 1499 bp, unidentified
  source 1..1499: mol_type = unassigned DNA; note = element_d2da9ed
  misc_feature 1..2: note = core
  misc_feature 3..246: note = LE
  misc_feature 247..1479: note = CDS
  misc_feature 1480..1499: note = RE
  misc_feature 14..240: note = bridgeRNA
ctaatcagttctgggagtgagccatccggcagactcctggtcggtagccgaccggcaggtgagcactctcgggtcctggacgtcgagtcctgttgaaagaccgtgcccctgccggtgggccgggagagttgatcgctgctgggatgtcgtgcccgccgccggtcggcgtgagcactgcttgattaggtcgctgatggttctcccgccggctgctgtaggtgatcggcatcgggaacgggaggatcgttgcgactgttcgtgggagacgactgggccgaggaccaccacgatgtggaggtgatggacggctcgggtcgccggttggccaaggcccgtctgcccgagggcgtggcggggatggcgcggctgcacgcgatggtgggtgagctggtcggtgacgacgccgacgccgacgaggacgtggaggtgctggtcgggatcgagaccgaccggggcccgtgggtggcggcactggtcgccgccggctacacggtgttggcggtcaatccgttgcaggcggccaggttccgcgaccggctgggggtgtcgggggccaagagcgacgccggtgacgcgcacgtgctggccgacatggtccgcacccacggccacgagctgcgcccggtcgccggggacagcgccgaggtcgaggcggtcaaggtggtggcccgcacccacaagacgctgatctgggaacggacccgccacacccagcggctgcgccacgcactgcgcgactacttccccgccgccctggtcgccttcgaggacctggacgccgccgacaccctggaactgttggccaaggctcccaccccggcgaaggcggcccggctgaccattgcgcagatcggcgcagcgctcaagcgggcccgccgccgcgacgtcgcggagaaggccgagctggtccaggccgagctgcgcgccgagcacctcggccaacccgaggtcgtcaccaccgcctacgccgcctcggtccaggcgctcatcgcggtcctgaccgtgctgaacacccaggtcaaggccatgcaggggcaggtcgaggcccattttgggcggcacccggccgctgagatcgtgttgtcccagcccggcctgggaccgatcctcggcgcccgggtgctcgcggagttcggcgacgaccccgaccgctacaccaccgccaaggcccgcaagaactacgccggcaccagcccgatcacccgcgcctcgggcaggaagaaggtcgccctggcccggttcgtgcacaacgaccgcctcatcgacgcactcacgacccaggcgttcaccgcgctgcggcactcgcccggagcacgcgcctactacgaccggcagcgagcccgcggcagcggccacaacgccgccctgcgccaactcgccaaccgactcgtcggcatcctccacggctgcctcaaaaccggcacccgctacgacgaagcgaccgcctggtcgcatcacgccgagaacgtcgcggcttgacatctacgctcctgggatgt

SEQ ID NO: 8411 - DNA, 1452 bp, unidentified
  source 1..1452: mol_type = unassigned DNA; note = element_d2dc662
  misc_feature 1: note = core
  misc_feature 2..172: note = LE
  misc_feature 173..1201: note = CDS
  misc_feature 1202..1452: note = RE
  misc_feature 1218..1449: note = bridgeRNA
gtagatggggtaacgggccccggtctgccttccaagcaagccgcgctcgctacggcgcaatttgggtgcgcgcgtcgcgcggcttgcttggaaggcgggcggtcgtccctcacactgatggtgtgacggagtcgaggataggcctcgctccaagcatcgcggagagacgaccatggagcattatgcaggaatcgacgtgtcattggaatgctcgagcgtgtgcgttgtggatgggagcggcaagattgttcgggaaggcaaggtggccagcgagccggatgcgttgatcggctggctcacgtcggcgggctatgagctgagccggatcgggttggaagccggtcctttgtcgcagtggctttttgcggcgatgcgggaagcggggctggcggttgaactgctggagacacggcacgtgcggaaggcgttcgaggcgatgccggtgaagtccgatcgcaacgatgcgcgcgggattgcgcagctgatgcggctgggctggttccggccggtgcattgcaaatcgatgggagcgcaagagacgcgatcactactgacagcccggaagctggtgcaatcgaagcttcgggatctggagaacagcctgcgcggcatcctgcgcggctttggcctgaaggtcggcaacacgacggagctggggtttgcgggacggatcgaggaactcgtggcaggtcatccgcatctggagaggatcgccgaggcgctgctttcgatacacgccgttctgctgcgcgagttcaaggtctttgagaagcaagttcggtcaatggcgcgctgcgacgccaaggcccggctgctgatgtcgacaccggcagtcggcccgatcgtggcgctcacctatgctagcgccatcgacgatccggctcggttcaaatcgtcgaaacaggtgggagcacatttcgggctgaccccgaagagatatcaatccggcgagaccgactacaccggccggatcagcaagatcggcgacagctcggtgcgcacggtcctttacgaagccgcccacatcatgctgacgaagccggtcaaaggctgttcgaaattaaagagctgggcgatgcggatcgccaggcgggccggcatgagcaaggccaaggtagcgctggcgcgcagactagcggtgatcatgcatcgcatgctcgccgatggaacgccattcaacgccgcggcaacggcagcctaacagggagagcgcgacagttttcgggcgggtcacgacaccaggcctcctcgaagcgaagtcccttcgccgggacgatggatcaggtcagaccgcacgcttcgcagtggcactacgaccacgcggattagatttggtcggcctcatcctcttctaaccccatcaggtggcggccctgcgccgaccccgtacagaagcaagaccccggcgagtggatgacgcagaaagggattgactaatcgaggcccgttaca

SEQ ID NO: 8412 - DNA, 1382 bp, unidentified
  source 1..1382: mol_type = unassigned DNA; note = element_d2e137e
  misc_feature 1: note = core
  misc_feature 2..73: note = LE
  misc_feature 74..1117: note = CDS
  misc_feature 1118..1382: note = RE
  misc_feature 1152..1377: note = bridgeRNA
atgctgtaatggactctccccgcgccgcagttctataccgagaacggtggtgactgaaattgggagtttcgtcatgaagcgcatcgcagttgatctggccaagtccgtttaccaagttgccgagtgtgtccgttccggccaggtggtgcagcgcaagcggctgaaccgagaggcgttacggcgatatatacaggagcaggtcgaaccggtcgagtgggtgatggaagcctgtggcacagcgcactattgggggcggctggcgcaatcgctcggtcatcacgtgaagctgctgcatcctcgctacgtgcgaccctatcgccgtcgcaacaaaaccgaccgcaatgactgcgacgccatgctggaagcggcgcgctgcaccgatattcatcccgtgtcggtaaagagccacgatcagcaacagcttcagcaactgcacgggctacgtgaaacctggaagaagagtcgcacccagcgaatcaacctgctgcgcggcgtgcttcgtgaagcgggtatcgaagcgccggcctcgaccgcagccttcatccaggctgccagtgagctggttgaccagcctgaactcacgtccctgaatcgtctgctgcatatcgttctggccgagatcaacctgtatgaacagtgcatggccgaatgcgaacagcagcttcagcgctggcatgctgacgatgacatcgtgcgcaaactggatgaggtcagtggtattggcctgctgaccgccagtgccctgaccgccactgtcggtaagcccgaacggttcgccagtggtcgccagctcagcgcttggctgggcatgacgccgcgcgagttcagcagtggcaatagccgcaagctcggccatatcagccgacagggcaatgtctatgtgcgcactttgtttatccatggatcccgcgcggccttgctggcggcacagcgctgccaggcccgtacacctgaaaagctgacgcagttacagcgatgggccgtggagacggcagcacggatcggccacaacaaggcggcggtggcgctggccagcaaactggtgcggatctgctgggcggtgtggtgccacgagcggcggttcaatggcaattggcagagcgtaaagcccgcctgacggcgggggtgatcagtaaaggtgtgatggttttcttgtggttgtggtgagtagcagcactgtcggaacaggcgagtcctgcagcggaacaaggccgataacaatgatgatcctcgtgatcgattgaacgcttggtccccgctgcgcgaactacagaatggccagggcggtagcgcccagaacaggccggatatacgaatgcaaccgcgctgacgacaggtgcaaaagcaaagctttactcactacttgtggggagagtccatat

SEQ ID NO: 8413 - DNA, 1624 bp, unidentified
  source 1..1624: mol_type = unassigned DNA; note = element_d2e3bbc
  misc_feature 1..2: note = core
  misc_feature 3..287: note = LE
  misc_feature 288..1328: note = CDS
  misc_feature 1329..1624: note = RE
  misc_feature 50..257: note = bridgeRNA
ctcttacctttgcacccgattatagaattaatctcaattaacattgggataaggtttgttttttgtagttttgctagaagaatgggccttggagggcgagatcaatttgtattaggtaggttttcaccatatcgtggcaaagaaatgaccgtcctccttttctttatcttctagagtcaggacaaagtatctaaggacaataaaagtgatccagtgtagatttcaagagttaagacgacggaagatttggtctatagtcaacattataaattttaaaaggttacattatgagaccaaatttgtttatggaaatcgactatgtggtcagccagtgcgtaggcattgacgtttccaaggagaagttagtggcaacgatgtgcatgttcagccttgccgagcaagccgtctattcgagggccacggagtttgagaacagcaagacaggcttcaaccaactggtgaagtggagccgcaaggaggcgatgaaggacttgcctctgcgctttgtgatggaggcaacgggcgtgtaccacaagcatcttgccaaccaccttgttaagataggctgcacgaccatcgtgatgatgcccaagaaggcaagggagtttgcctactgggagggtatgattagcaagaacgacacaatcgacagccgcgtattagcccttgtgggctgcgtaaagagaagtatgcgcccatggcaaccgacgagtccaatctatcgtgagctgcgcatgatgaccagattctcccaggacgcaaaggtgttgcgtaccgaattgaataaccatctggaggcattgagccacagccatgagccagaaaagagtgtcatcaagcactatgaggcaatggttgatgcacttgacaagcggattgagaagaaccttgaaaacatgaagaaaaaggtggcttcggacgcagtgctggccaagaaggtggagaacatcatgaccatcccttccgtcggcttcctgtcggccgtgactgtcattgccgagaccaacggctttgcgctgatacaaagtagaaaccaactcaccagctatgcagggtttgatatcaaggacaaccagtctggcacggtcgagggcaagtccagaatctccaagcgaggcaacacgcgtatcagggctatcctctatatgcctgccgtgcagtgccagcgtcgcagcaaacacctgaaagacgcatacgagagaatcgtcgccaagcaccctgataagaagatgatagcagtaaccgccatgcagcgacgcctgctcctgctgatatatgccatttggaaaagcaacaaagcatacagtgaggactacaacaaggaatagcacttagaccatagccccagccaaaaaggaagaggttggagcggtttgacatgcctccaacctcagcgtgataggtacctgaaaaaggtatcttcactcgtcgtgtgcaaaattactaggaatctgggagataaacaactaaattgccgtttatttgaaaaaaataataatctatacctgaaaacacgaggggtttggggcgagtagcccccataaaggtataaaaacatataaaagttaaaaataaaacttattattctttattaacacttttttctttgaaaataatacagtat

SEQ ID NO: 8414 - DNA, 1324 bp, unidentified
  source 1..1324: mol_type = unassigned DNA; note = element_d2e6c6a
  misc_feature 1: note = core
  misc_feature 2..250: note = LE
  misc_feature 251..1318: note = CDS
  misc_feature 1319..1324: note = RE
  misc_feature 31..255: note = bridgeRNA
cagtgaagatgtccccggcacccgtctctgcgacgatggtgctgagtcctgcctgctggtctgactcaggagttgactgacctcgtgtcatcagcgggatctgtcgaccggccggcggggctctgtccatcgtgcacgcgaccggaacgggcggccgtgacttcataggagcctgcgctctcaggcgcccgtcactgtcctgtccgcccgcccggccgctcgcgtgccttcacgggaaggcaggtccagcatgacagcaaacagggcgtgcgtcatcggcggcgtcgatacccacggtcgcagccaccacgcggcggtgatcgacagcgccggcagggtcctcggttcggctgagttcgaggccaacgccgcgggctatcgacgtctgctcgcctggatgcgtcgtcacggcgagcttgcccagatcggggtcgaaggcaccggcacctacggcgccgggctgacgcgccatcttctcgctgaaggcgtgccagtagtcgaggtcgatcgccccaaccgtcgcctgcggcgccagcgtggcaagagtgaccccatcgacgccgaggccgctgccagggcggtgctcgccggtacggcaacggtcccgccgaaggaccgtggcggcatcgtcgagtcgatccgggccttgcgcacggcgcgctcgggggcagtgaaggctcgcggtgcggcgctcaacgctctgaaggcgatgatcgtcagcgcgcctgcggagctgcgtgctgccctcgaccatcttcacgccgtgccgctggtcaccacgtgtgccgccttgcggcctgatcagcagcggctcagcgacccgctgcaggccacgaaagccgctctgcgcagcctcgctcgcaggatcgtcgcactggacgccgagatcaccgagctcgatgccgcccttgcgcagttggtccaccgggcagcgccccacacgatctcgctgctggccatcggcgtcgaccatgccggccagctgctcgtgaccgccggtgagcggcccgagcggctacgctcagaggccgcgtttgcgcatctctgcggcgtggcaccggtccccgcatcgagtgggcagactcagaggcatcggctgcatcgcggcggcgatcgggccgccaaccgggccctgcacctggcggtggtcgtgcggctgcgctgttgtccgcgcacgcgtgcctacgttgagcggcgcacgcaggagggactttcgaagcccgagatcatgcgctgcctcaagcgctacctggcacgtgaggtcttccacacgctgagcgccgatcttcaggagctatacgggcttgacgggatataggagcat

SEQ ID NO: 8415 - DNA, 1477 bp, unidentified
  source 1..1477: mol_type = unassigned DNA; note = element_d2eb8fd
  misc_feature 1: note = core
  misc_feature 2..88: note = LE
  misc_feature 89..1105: note = CDS
  misc_feature 1106..1477: note = RE
  misc_feature 1245..1469: note = bridgeRNA
taatgggatggtcgccccctcctgaaacggcatcgatgtgccaaagtggaattgcaagccaaccacttgaaggaaaggagcgaccgagatgaagcttacgacgattggcattgatctggcaaagaacgtgttccaggtgcatggagcagacgagaagggaaaaacggtgctgaagaggcaactgaagcggagccaggtgctgcccttcttcgcccagtgcaagattggcatggaggcatgcgggagcgcgcactactgggcgcgaaagctccaggcgctgggccacacggtgcagttgattgcgccgcaatatgtgaagccgttcgtcaagcgcaataagaacgacgctgcggacgccgaggcgatctgcgaagcggcgatgcggccgaacatgccggcgataccgatcaagaacgccaatcagcaagcgatcctgagcatacatcgagctcggcaggggttcgtcaaggcgagaactgcggtgtccaaccagattcgcggactgctggcggagtatggcatcaccatgccgcaaggtatcagccacatcgccaagcgggtcccggagatcattgaggacggcgagaacgatctgccgggcaggttccggctactcatccaacgtctggttgatcacctcaaggaactcgaccgccaagtcagcgagttggaagtccaaatccagctgtggcatcgggagaacgaagtgagccggaaactggcgaaggttcccggcgtcggcccgatgacggcaagcgcgatggtggcgtccatcggcgatgccaggaacttcaagaacggccggcaactggcggcgtggttgggcatcgtgccgaaacagcactcgaccggagggaaacaggttctgttgggcatcagcaagcggggcgattcgtatctgcgtacgctgctgattcacggcgcccgggcggtgatccgaatcgccgaaggcaaacccgacaccgactcctggctcaagcggctacttgcgcgacggaacaagaacgttgcggcggtggcgctggcgaacaagaacgcgcgaacgatctgggcgctgctcacgcatgaccgggaatacaaagcggattttggagtggcgatatgaacatctcgatcacccttgaggtgacgggtttcccaccgcgccgctcgcctctggtcatagagggaccaccggcgagcggcaccatggaaaaccctgcggtatagctgcacagcgacgacagacttcgaaaggagaacttccaccgatggcacaggcaatcatgacgtgatggcgagataggttagaccgtggcaggtgcaacctcaccaggacacagagcggcaagctcggacaagtgcttaggaacctgccagcgtattccatcagggacggaggcttgtcagcctcgatcaaagtccggatctatggccgcaatctccaccttcccaccaccattgactgagggcttggcaaaccgggagcgaccatcta

SEQ ID NO: 8416 - DNA, 1376 bp, unidentified
  source 1..1376: mol_type = unassigned DNA; note = element_d2f0016
  misc_feature 1..2: note = core
  misc_feature 3..86: note = LE
  misc_feature 87..1115: note = CDS
  misc_feature 1116..1376: note = RE
  misc_feature 1086..1363: note = bridgeRNA
agatggagtggttgccgccctccccagacggcatcgcaatgtgccatgatgtggttgaataggccacagagcggagaggacggcatatgaaggatacaatagttggagtggatctggcaaaaaacgttttccagcttcacggcgcatcgatgacgggtgagattaagttccgcaggaaactggctcgtggtcagtttcttcgcttcatggctagtcagtctcctgcgcttgtagccatggaagcttgtggcagtgcccattattgggcgcgtgaactggtcgcgcttggccatgaagtcaaactgatcgctccgcaatatgttcgcccgttcgtcaagcgccagaaaaatgatatggccgacgctgaggcgatcgcgatcgcgacacgccagccggaaatgcggtttgttgagccgaaaacgccggagcagcaggcgcgggcggttcttttccgtgctcgcgaacgtattgtccatcagcgcacggaattggtgaatgccctgcgcgctgtgctctacgaatatggacaagtcgtcccccttggcattggtcatgtcaagcgcatcgagcagatgattgaagatgacagcatcgatctgccggagatcgtgcgagaagaatgccgcgatctgctgacgcagattaacgagcagacggtgcggatcgaacagaagatgaagaagctcacgactttgtcacaacaaagtgacgcggcccgtcggcttcagacaatgccaggtatcggcccaatgatagcgcttgccgtcgaggcgtttgccccggcgatggaaagcttccgctgcggacgggactttgcggcgtggctcggacttgttccccgacagttctcgtctggcggcaaggagaggctcggttgtgtctcaaaagccggtcaggccgatattcggcggcttcttattattggtgccatggcgcgggtgaactgggccagccgcaagcccccagttcaaggaagctggctggcgcgaatgctgggcaagaagccaaaaatgctggtggccattgcactggcgaacaagatggcccggaagatatgggccatgttgacgaagcaagaagattatcgagatttggcggcgggtgtagcggcgtaagtcgtctaccaaaagccgacaaagggagggtgagaagtcatcgaccagaatgggcaaatgatcgaaccgatccggatagggaaaaccagttcgtgcctttgagtgtttcaactcggaactaagatttggacccaatccgcagatcaccataccggccagcggtctctcgaaatgccgcatataaaggcctgacagaagaccgcactcgatcacatgttcataaggtcagaaacttcttgcacaacgggcggcaaccacaga

SEQ ID NO: 8417 - DNA, 1661 bp, unidentified
  source 1..1661: mol_type = unassigned DNA; note = element_d2faf9e
  misc_feature 1..4: note = core
  misc_feature 5..247: note = LE
  misc_feature 248..1450: note = CDS
  misc_feature 1451..1661: note = RE
ctcattgctccaccatgaggggtgcgacctgattgagggagggtcgcaagcttcggtgaccaccggggcacggcctcgctcgctcgcccgctgagggccagcatgagtattgccggcctcggtgggccgaggaccttagaccggcattagggacaagccgcggtgacggccgaccaatgagcctccggctacggccctcagcaccgaggagatcttcattgtccctcgacggcacggaggtgtgctcatgtatgtgggttgggattgggccggcaaggcccacgatgtgacggtgctcgatgagcagggtcgagtcgtcgagcatttcgaggttggccaccatgaggcaggcttcgagcacgccttgaagcgactgtgccaccatggtcgacctgaagcattgcccgtcgcgatcgaacgcccgagcggtctggtcgtggaacggctggtggaggctggccatccagtgattcccatccatccaaacgcttttaatgcggcgcgctcgcgatggggtgcgtcgcatgcgaagtcggacccgggggacagctatcgcctggccgattatctgcgcaccgacggccgccgcctgcgccggctgcggcccatggatgcggtgacccgccagctgcaggccttggttcggatgcgcgacgatcacatcaaggcccggattgccgccgccaatcaactcgaggcgctgctcaatgcgcactggccaggagccctgtccatcttcgccgacctcgcctccgacattgccctgaactttctggagcgctacccgacgccgcacgccacggccgggctcggggcgactcggctggccgctttcttgaagcgtcactcctactgcgggcggcgcagccccgcccagttgctcgagcggctgcgccgggcgccaacggcacccgaccgcctcgaccccgaggtgttggccgaactggtccgacaccaggtctgcttgctccgcaccttgctccacaccggcaaagagctcgagcacgccatcactgccgtcctgccggatcacgccaaggcccgcctcctggccggcttgccgcggatcggcgacggtgtcaacctggctcaagtgctcagtgaggtgggacccatccttgatgccagcctcgacgtcgatcacgccgccgcccagtgcggcgcctcccccgtcaccaaggcctccggccaaagccgcggcgtccactttcgctgggcggccaatccgcatgcgcgccaagcgctgcagatctttgccgacaactcgcgccatgcctcgccctgggcggcccgcctctccgccaggcacgtcgccgccggcaagcgccatccccacgccgtccgcatcctgatgcgcgcctggctgcgcgtgatctggagctgctggcattccaacatcccctacgatccagctcgtcaccgcagcgagctccgcctcgctggcgcctaaccacgcagccgaccgatgtggccgcggcgagttgctgttacgaaattccgaacacaggtcgtcaccgcggcgggcttccgaccctgccccgtctgccgccgcgaaatctggttccacccacctggtcccggacgccctcgcacctactgctcggatgcgtgcaagcaaattgcctaccggcgtcgacgagaaaaggggttgacttagggaa

SEQ ID NO: 8418 - DNA, 1368 bp, unidentified
  source 1..1368: mol_type = unassigned DNA; note = element_d2fef68
  misc_feature 1..2: note = core
  misc_feature 3..73: note = LE
  misc_feature 74..1099: note = CDS
  misc_feature 1100..1368: note = RE
  misc_feature 1075..1355: note = bridgeRNA
tgatggggtggacgccccccgacggcatcgatgtgccagagtggaggtgttaagccacgcaaaggaggcgtccatgacggaagttaccaccatcggcctggatctggccaagattgtctttcaagcccatggcgcagatgccgccggcaccatcgtgtttcgaaggaagctccggcgtgagcaggtgctggcattctttgccgcgcagccgccgtgtctcgtggcgatggaggcctgcccaggagcacaccattggggacgtgagatcggtaagctcggccatatggtcaagctgatcgcgccagcttacgtgaagcccttcgttaagcgccagaaaaatgatgccgccgatgccgaagcgatctgcgaggccgcgcaacggccgacgatgcgctttgtgccggtgaagagcgaggagaagcaggcctcggcagtgatctttcgaacccgcgatgtgctcgtcggccagcgcatccagatcattaacgcgatccgcggtcacctgtccgagttcggcttgatagcgccgcaggggccctcgcatgtcgagcggctcatcacgcagatcgaggatcctgcctcgggcgtgccggaagctgctcgttgttgccttgtcattctcgtcgaagcgctacgccgcctgcagggacaggcgaaagcgctggacgcggagattgcggcacgagccaaggcagacgataccgcccatcgtctgatgagcgtgcctggcatcggtccgctgatcgccaccgcgcttgaggcaatggcttcgccagcggagacgttccgctctgggcgcgacttcgcagcttggataggattgacgccgatccagcgttcgaccggcgggaaggagcgcctcgggcgaacgtcgcggatgggagaacgaacgctacggcgcctgctcatcatcgcatccagcgccgtggtccgatgggccaaacgaaaaggagtgccatccggctcttggctccataggatgctggcgcgtaaaccgccaatgctggtgatcgtggcgctggccaacaaaacggcgcgcatcgcctgggcactgatgacgaagggtggaatctaccgagctccgtccgtcgccgcctgagcgcagcgacggacgcgaggccgtcgggaggacgtgagaaggtcgaaggacaggtatggcgcaacgtcgggcgaggcgggatcaggagaaccaggcgcatggggagcgcttcgagcgcgttccagtgatgtggacctgatcctcgaactcccatacgggcccgcggccgtgaacaagccgcaaagtgaggccgaacacatggcagcacccgatcacgcgcagcagcctgcaccgaagattcttcttgcatccgacggggcctccacaca

SEQ ID NO: 8419 - DNA, 1237 bp, unidentified
  source 1..1237: mol_type = unassigned DNA; note = element_d303463
  misc_feature 1..3: note = core
  misc_feature 4..249: note = LE
  misc_feature 250..1215: note = CDS
  misc_feature 1216..1237: note = RE
  misc_feature 7..210: note = bridgeRNA
gctattagatttgttgtttatattgaagaatcgataattagtagaatatctgaacaaccaagagaagattggtgaactagttcgactgttgactttatagagtcatactgagcaatagtcctctcttctctaaggttcaagtatcatttagaatgttaagcaccaaggcttattaatagcgttaataccaaaccttgtggtcgtttcagaacaattctacataacatcaaatttatgaaaaatacagttatgggtattgatatttcaaaggataaaatagactattgtcttatcaattcagagagtcatcaggtcattcaacgaggagaggtggtcaacgatcgtaaggaactactaaagttcctaaacaaaatagatcttcaacagactagctttgctatggagcacacgggacactatggagctatgctatcatgggtgctcagtgagaaaaaagctttttattatttactcaatccacttgaactcaaaaggtcgcttggtgtccacagaggaaagaccgacgccatcgatgcatatcgcatagctaattatgcaatcaagaactcccatgcccttaaagcttttgaactaccctgcgaaaacctaagaaagctcaaggcgatggtaagtaccagacaacagatcgtcaagatatctgtacaattacaaaatagtataaaggccaatgttattctgtccaaaacgctggatatcaaaagaatgataaaggaacaaaaggcacaactcaagtcagttaaaaaacttataaacagcttagcagagcagatgcaggcagtaatagactcttgcgaacaacttaagaaaagctatagaaaaataacccaagtaataggagtaggtccattaaccgctatcaaatgtattagcgaaacggataattttacaagatttatcaatgctagaaagttcagctgccattgcgggctggcaccatttccataccagtcgggaagcagtattaagggaagaaccagaactcactacctgaaaaatgcgagtttaaaaggtatactctttaaagccgctactagtgcaatacagcacgatccacaacttagaaattattataacagaaagctagatgaaggaaagcacaagctgtcagtattgaatgcaattgccaataaaatagtacttagaatattcgccgtcgtcaacagagatgaaccatttataaaattaaatgcctaaaagcttggttttatcttagaat

SEQ ID NO: 8420 - DNA, 1566 bp, unidentified
  source 1..1566: mol_type = unassigned DNA; note = element_d31b8c6
  misc_feature 1: note = core
  misc_feature 2..226: note = LE
  misc_feature 227..1543: note = CDS
  misc_feature 1544..1566: note = RE
  misc_feature 14..241: note = bridgeRNA
ctacttatgtctttcaagacggcccgggtcggcgcaggctcgggtgaggtacccggccggacgctctctatgcggctgcccgctcggtgggttgggcgtggctctttcatggcatgcgtcctggccgggtgccgtggcgaggcgtggctcaagaagggtctgctcagctcgaagtagcgttgcccgtcctcgctgtttgatgccggcgtgagcgaggaggcaggcgatggaccgggtgatcatcggagtagtttcctgcaagctgtcagtgacgatcgaggccagggataaccgggagatcttgcgcgcggctggccggttcggcactgatacccgcagctatcaccagctgctgaaagtggcgcgtcagtggccagagcggacctgggccgtcgaggggggagccaatgggatcgggcgcccgccgctcgcgcagcggctcctggcggatggggagcgggtactggatgtgcccgccaagctggctgcccgggcacgcgtcttcgataccggacagggacgcaaaactgatgccgcagacgcgcacgccatcgtcatggtcgcgctgcgcgacaagggactgcgtgaactcagcgctgaccccgaactgatggtgctgcggatgctgtgtgaccgccgtgatgagctctcccgcgcccgggcgcaggccgccggccggctgcaccgcctgttcctggaactcctcgccggcggggcgccggtgaagaagtccaccgcgcaatacaaggccctgctggccacagtccacccgcgggacccggccgggaagattcgccggcggatggcggctgaggaactcgctgacctggcacgctgcgacgccaagctcaaggcgatgaaagccgagctcaaggccgcggtccaggccagcggatcacacctgatggacatctgcgggatcggccccgcgggagccgcccggatcctcgccgacgtcggggacatcgcccgcttccccgaccgcaaccacttcgcgtcctggaccggtaccgcccccatcgatgcctccagcggcgagcacacccgccaccggctttcccgcgccgggaaccgcaggcacggccacgtcctgtacatggccggcatcgtccagctgcgcaacgacaccccaggccgcgcctaccaccggcgcaagctcacagccgggaagaccgccatggaagcgatgcgctgcctgcgccggcgactctccgacgtggtctaccgccagctcgccgctgacgccgccgcctgcgcaccagcaccgcggcaggcgggcccgggagggcactccggggcgactctgtcatccagcgcggccggccttcccccgggcaccggcacttcggaccagccacttcccggacccgcaccccagacgctacccccgccacctgcgcttgagacaacccctgcggcccccgcagctgccacacaacgacggcgcgccggaggcgtcaacgtggagcgccctactggacgaacgacgttgacgccgaccagcgccggcgcacactcgacagcttcgggaccgcacacttgacaaatcccttcatagaagggagc

SEQ ID NO: 8421 - DNA, 1682 bp, unidentified
  source 1..1682: mol_type = unassigned DNA; note = element_d32384e
  misc_feature 1..2: note = core
  misc_feature 3..282: note = LE
  misc_feature 283..1497: note = CDS
  misc_feature 1498..1682: note = RE
  misc_feature 12..302: note = bridgeRNA
ctgttacaatataattagtcgggtaacaccttacaagccggtaagggtttacacgcatttgttacttaagctatactgaaagcagtgattggactgacgtatcactccttgggacaaagcgcccgtagcaaagacagtcatccatgctttcattatagcgttcggtttatgcaggttgggccacagaatactgtgcgttcgtgtcaccaaacagattgaataggtaatgagtaaagcatggtttgcccgattacaatatcaaatcaagagaggtaaaatattatgaacgcaataggtattgatgtttccaaaggtaaaagtacagttgctgtacttcgcccttatggtgaggttgtggtttcgccttttgatgttgctcacaccggaagtgatttaagagcattagctgatttaatcaagaagctccccggtgagacaaaggttgtcatggaggcaacaggaaactattttgaatccattgcccgctacctccacgaacaaaatatatttgtttccgtagtcaatcctgtgttaatcagtgacttcggtggaaacacgttaagaaagccaaaaacggataagaaggattcggtaaaaatcgcttcatatgcgttaacttactggcttgacctgaaggaatatacttctcaggaagatttgagaaaatccttaaaactgatgaacagacaatatcagcagtcaataaagctgaaaaccatgatgaataataatctgatttcgttgcttgaccttactttccctggaatcaacaagctgttcacatcaccttccagagaatctgatggtcacgagaagtgggtggactttgtattggaattttctcactgtgacatgatttccaagcttaccataaaggcttttgcaaagaaatacaagaagtggtctgataaaaactcatatcacttcacagaatcatcatgcgagaaaatatacgcttttgcaaaggattgtgtcagcagcgtttcttctgataaagcaatcgttttctctgttgtacaagcggcaaaaatgcttatttctgctacggaaaactgtcatgccatacagtctgaaatgaaccgtgttgcttctaagcttcccgaatatgatactgtaatgaacatgtatggtgtcggaaaagctgtaggtcctcagcttatggctgaaataggagatccaagacgttttcacagcagaaaagcaattactgcttattttggctatgacagcgagaataacgattcaggtcagaaaactaccagatcaaatccgatgacaaagaaaggttccggagccctcagacgaacattgttcatcattatgcaggtgcttctgcaaactaagccgcaggacaatcctgtttatgattttctcattaaaaagaaatctgaaggcaagcactattactcatacataaatgcagctgcaaacaaattcctgcgtatctattatgcaagagtaaaagaagttttgaatgtctcagaacagatgacataattgtctattcatgagttccttaccgtcggcacgacatacagagcatttttatgatgttctgtcaaggttgccgacccgctaaaaattttttaggctgctcaggcagtctttttgtcgtgtccttttttctttcagaaaattttttctgtttttttaattttaggggttgacttttatttgcaggt

SEQ ID NO: 8422 - DNA, 1571 bp, unidentified
  source 1..1571: mol_type = unassigned DNA; note = element_d326399
  misc_feature 1..2: note = core
  misc_feature 3..248: note = LE
  misc_feature 249..1424: note = CDS
  misc_feature 1425..1571: note = RE
  misc_feature 3..226: note = bridgeRNA
ctcgtattataaagtagtagtgattatagaccctctccaaggtctgtatgctatactgttaggagatactgtggattggtatttttctcctaccactcgatggttacggaaaggctccaaccacagcctctttgtatagttgttaatcagttagataccgcatgacggttgatttagaacgagggtacacaagcaaagagccctgtggtctcaaacagtatctaaatctattacgaaggagtatttttatgatctacgttggaattgatgtcgctaaggataagcatgactgctttgtcacaagctctgatggcaaagtcctctttccggtttttactatccagaataaccgagagggatttgatgatctcttttccaaaatccaatccgtttcttcagaggtgtccaatataaaagtaggactggaagccaccggacattactcttacaacctgctcggctatctcatcgacaaaggcctacccacctatgtcatcaatccgctccacacaaatctttacagaaaaagtctcagccttagaaagacgaaaacggataaggttgatgcccgaaccattgctatgatgctcatgtctgacgtgaacttgaagtcctactcagatacatcttaccacaatgaggcgttaaagtcactcactcgttaccgttttgataaggttcaggaacgtgcccggctcaaacagtctgtctccagacttgttaccattctcttccccgaattggaaaagcttgttccgtctcttcactcggcttccgtttatgctttactttctgaacttccttctgcagaaaagattgcctcctgccacctgacgcacctgacgaagctgctggaaaacgcctcgaaaagccgttatcgtcgggagaaagcgattgaaatacgggatgctgccagaatctccatcggctccaacatgcctgccaagtctctggaattaagacacacactccgcctgatcggagaactggattctgagatcacagaaatcgaatccgagatcaaacagatcatggatcagatttcttctcccattctgacgatccccggtatcagttaccgcatgggcgcgatgatcctcgctgagatcggggatttctcccgctttgattcgcctgataagatccttgcatacgctggtgcctctccctccacctatcaatccgggcagttgaaatcctcttattcccatatggaaaagcggggttcccgctatctgcgttttgctctcatcaatgctgccaagtatgtctgccactgggatgaaacattcggtgcatatcttcagaagaagatttccgaaggaaagcactacaacgttgccatcacccacgctgcaaagaaacttgtacggttgatctatgcaatggaaaaatccggcatgccttacataaaaacggcgtagctttttctgttctatattactcccattgagcacccgtatacgatgctctgtttgtcatgcgattttcaaggtacaaccatctctgatatgcgtttccgcaattcattcgtaacttcttcttttttgacttgacttttaatagttagt

SEQ ID NO: 8423 - DNA, 1288 bp, unidentified
  source 1..1288: mol_type = unassigned DNA; note = element_d32a399
  misc_feature 1..2: note = core
  misc_feature 3..238: note = LE
  misc_feature 239..1276: note = CDS
  misc_feature 1277..1288: note = RE
  misc_feature 24..250: note = bridgeRNA
ctgacttgttgaatcgactccagacgcacggtctgcagccgtagtgtccagggtgccggtcggcacgggcccgcaggctccttgccgccccttcgcgggctggctcaccgatagcgtgccgccgccggccggcacccgcgcggtgtggctcgacagaggcatgacggtgacacggtgacttcaagtcaggatgcccaccgcactcccttcccgatctcagcgagtgcgaggccagcctgtgatccttatcggtgtcgatccccacaagtcgtcccacactgccgtcgccgtcgacgccgcaggccaccacgtggcccagcgccggttcgtcgtcaacgccggaaccttccgccagctgatgcgctggtgcgagcagtggcccgaacgccgcttcgccatcgaaggcgcccgcggcctgggtcgaaccctcgcccagcagctggcagccacgggcgagaacgtagtcgacgtgccctccactctctctgcccgggctcggctgctggccaccggaggcgaccgcaagaccgacgccaacgacgcccgccacgtggcccaagtcgcactgttccgacaggacttgcggcccgtcgaacccgaggaccagaccacgatcctgcggctgctgaccgaacggcacgacgacctggtccacgaacgcacccgcgtcctgaaccgactgcacgccgtcctgcgcgacctcctgcctggaggtgcccccacggggctgtccgccgacaaggccgccgccgccatgaagggcatccgccccctgaccgccaccgatgcctgccgccgggacatagcacgcgacctgctcgccgacctgcgccgcctggaccggcaggtcaaggacaacgaagccgagatgcgtgacgccctcgccgcgacccacaccacactcaccaccctgccgggcctgggcaccgtcctggccgccaagaccatcggccacgtcggcgacatcacccgcttccccaccgaacaccacttcgccagctacaccggcagcgcgcccctggacgcctccagcagcaacaacgtccgccaccggctcaacaccggcggcaaccgcgcgctgaactccgtactgcatgtcatcgccgtctgccagatccgtgacggcggcggacgcggacaggagtactacctgcgcaagatcgcggaaggcacgacgcctgcggaagcccgcagcgccctgaaacggcggctgtccaacgtggtctaccggatcatgaaacgcgatcaacggaaccgcctcgctcaggccgcttgacacacagaggcg

SEQ ID NO: 8424 - DNA, 1561 bp, unidentified
  source 1..1561: mol_type = unassigned DNA; note = element_d33b2e8
  misc_feature 1: note = core
  misc_feature 2..244: note = LE
  misc_feature 245..1420: note = CDS
  misc_feature 1421..1561: note = RE
  misc_feature 2..222: note = bridgeRNA
tcgtattattaagtagtagttattagagcccctctccaagggctgtgctacactgaaagggatactgtggattggttttctagtcctaccactcgatggtttcagaaaggctccaaccacagtctctttgtaagtttgttaatcagttagataccgtacgacggtttatgtggaacgaggttacaagcgcaaggagttctgtggtcccaagcagtgtcaaatccatttatgaaggggtatcgctatggtttatgtgggaattgatgtcgcaaaggacaagcacgactgtttcattgtcagttcggagggtgaagtgctgcaagatgtatttaccattccaaacaatatgacaggttttgatgacttgttccaaagaatttgctctgtgtctggaaatttagacaacgtaaaagtaggccttgaggctaccgggcactacagctacaacattctgggatttcttctcgacaaaggtctgaccacctttgtcatcaaccctctccataccaatctctaccggaagagtctcagccttagaaaaactaagaccgataaggttgatgcccgaatgattgcatctatgctcatgtctgatgtgaacctcaagtcctacacagacacagcataccacaacgaggagctaaaatcactgacccgttaccgtttcgacaaggtaaaggaacgagcacagctcaaacagtctgttgccagattggtcacgattttgttcccggagcttgagaaattggttccaacgctccacatggtctccgtttacgcacttttaagtgaatatcccagtgccgggcaggttgctgctgcaaatttaacccacttaaaggcgctcctaagcgatgcctccaagggacgttacggtcgtgataaagccattgaaatccgtgatgccgccagatgctccattggctctaggatgtcggccaagtctcttgaactgcggcacaccatcaaactcattcatgagctggatgcggagattgctgaaatcgaggcggaaatcaagtctattatggacgaacttcaatcaccaattctgaccatcccgggtatcagctaccacatgggagccatgatcattgctgaaatcggtgacttctcacgcttcgattcgccagacaagattctggcctatgcggggctttcaccctctacataccagtccggacaattgacctcctcctactcacacatggagaaacgaggctctcggtatctgcgctatgcacttttcaatgcagccaagtttgtttgcaattgggatccagcctttgctgaatatcttgccaaaaagcgctccgaaggcaagcactacaatgttgccatctctcatgccgcaaaaaagcttgtgcgactcatatacgctttggaaaaatctcggcagtcatatagtcttgctttctaatcctccaaccttgccgcttttcgagcgcctgcaaagacgctcttttgtcatactcattttgctaattaacttgttttttccctcacggagtaacaccactgttttttcttacttgtgggcttgacttttaatagttagtct

SEQ ID NO: 8425 - DNA, 1383 bp, unidentified
  source 1..1383: mol_type = unassigned DNA; note = element_d33c7ae
  misc_feature 1..2: note = core
  misc_feature 3..76: note = LE
  misc_feature 77..1117: note = CDS
  misc_feature 1118..1383: note = RE
  misc_feature 1117..1370: note = bridgeRNA
tgatggagtggacggccccctacggcatcgatgtgccagaatgaggttgttgagatctcagacaagggagccgtccgtgaaccagattatccgcattggaatggatacgtcgaagcatttttttcagttgcatggggtggatgccgccgagcggccggtgctgcgcagaaagctgcggcgcaaggaaatgatggcgttttttgtcaggctgccgccgaccgtggtcgggatggaggcttgcggggcttcgcactattgggcgcgagagttgggtcagctcggccacgaagtaaggctgatcgcgccgcaacacgtgaagccctacatcaagcgcaacaagaatgacgggcgggacgccgagggactgtgcgaggcgatgagccgaccgacgatgcagttcgtgccggtgaagacggctgagcagcaggcggccttgatgctggcgggcatgcgcgagcggctggttgcccgacgcacccagctgagcaatgcgatccgcggctatgcggcggagttcggcctgatcgccgccaagggtctcgacaagatcgagccgctattggctgacatcgcggccgacggagccttgccggtgctggcgcgtgagctgtttgcgatgcatggcagggagtatgcgcaactgcaggccgaactgaagaacatcgaggccaggttgatggcttggcaccgcgcgaatgccgacagccagcgtcttgcacagattcctgggatcggaccgatcggcgccacggcgctggtcatgaaggcgcccgatcctcgtctgttcccgtccggccgacacttcgcggcctggatcgggctgacaccgaaagatcattccaccgccggcaagacccggctcggcaagatcacccgcgccggcgatgagatgctgcgcagcgtgctggtggcgggagcgaccgccgtgatccagcaggttcggcgcggtcgcggtcgtgcgtcgccctggctgcttgccctgctaaagcataagcggccaaaactcgcggccgtggcgctcgccaacaagatcgcccgcatcgcctggaagctgatgacgacgggcgagagttacgacggcgcgcggatgtctggagcatcggcattcgccgcttaacagatcggccggtcggcgggttcgctgcaccggccgagccggagctgcaagaggagagcagatggtaggatcgatcgatccaaggtgcgagacagtccgtgggacccattggccgaacacaggtcgcggggttgtttggagctcgcgtcgcggaaaccatcttggccagcggtccaaagcgaccgcatcaacaggccggacatatggatgcaagcgatccgatcagaccttcaaaaagctcttgcggcacgggggccgtccacata

SEQ ID NO: 8426 - DNA, 1658 bp, unidentified
  source 1..1658: mol_type = unassigned DNA; note = element_d340a5d
  misc_feature 1..3: note = core
  misc_feature 4..279: note = LE
  misc_feature 280..1494: note = CDS
  misc_feature 1495..1658: note = RE
  misc_feature 14..299: note = bridgeRNA
tttgttacaataaatttgccgggtaaagcacaccaaaccaggtgtgctttattcgttctcattcctaagctacaataagaggagtaattggtctgacagacgcccctttggactaatcacgtccggctaagaaacagtcagccatcctcttgttgcagcgttcggttttggcaggttgaaccaacacggtatccgtgcggcgttcgagtcacccaacaaagtgaatcggcaatgagtaaaagatgcacgccaattacaaaaaacgattggaggttacatatgaacgcagtaggaatcgatgtttccaagggaaagagcatgattgcgatcatgcgtccgctcggtgaggttgtcgctctgccgtttgaggtgagtcacaccgccgcagaactggatgaactggcaagattcatcctcaaaatcgacggtgaaaccagggtgattatggagtacacaggcagctattatgaaccaatcgcctatgctctccatgaggcgggactgtatgtcagtatcgtccacgcccaattgattcacgactttggcaataacaccattcgccgtgtcaaaaccgataaagcggatgcaatgaaaattgccgcttatggtctcgccaactggaatgtcctgcccagatataccccgcaagaggatattcgcagacagttaaaagcatatagccgtcaatacgcaaagtacactaagctgaaaaccatgctgaagaacaatttgatttcacttaccgactccacctttcccggagtaaacgaattgtttacatctcctccgcgtaaggaagacggtcatgagaaatggctggattttgccttgaaattttggcacgcagaatgtgtgtgcggtctttccgaaaaagtttttactgaccagtatcggagatggtgctcaaaagccggttatcgtttttcaaagaataaagcaacggacatttatgccgcttcttgcgggcacaccgggcttttgcccaaggatgatacaaccgagctgttaattcagcaatccgtcattcagctgaacagtatttgctcctctcttgctgttattgccgggaagatgtcttctctggctgctatgcttccggaatatccgattgttatgggctttttcggtgtcggagacaacctcggccctagaatcatggctgaaatcggcgatgtccggcgatttgcacgcaaggaatcacttgtttgttttgcagggctggaagctccgccatatcaatccggaaagtttgaatcaaccgatagaaccatctcaaagaaaggttcgcctcatcttagaaaagccttgtttcaggtaatggattgcctagtgaagaaagctccgcaagacgatccgatttttcaattcattgatcgcaagcgcgctgagggaaagcattattattcctacatgacggccggatctgctaaattccttcgcatctactatgctcgtgtaaaagaacatctgaatgccttggaacataccggttaagacgccttgctctccgcctgaataggcgaggagcgtagcgacgagactttgaaggcggagagcttttgaaaaaatctacgctcgccgctctttttgttatgcctttttccaccacaatgtacttgctcaattttttgctttttctcttgacttttattggcagg

SEQ ID NO: 8427 - DNA, 1671 bp, unidentified
  source 1..1671: mol_type = unassigned DNA; note = element_d350b1a
  misc_feature 1..3: note = core
  misc_feature 4..259: note = LE
  misc_feature 260..1570: note = CDS
  misc_feature 1571..1671: note = RE
tattacccgtctttctgcgaaagacaccaatgcgtcatgaaacacgtgcattggctttcgctatctaatttgtattccttctgatattattatgttgtaagactggcatactacagaacacgtggaggtgagtggcggggctgtatagcggcgacctcgtatatgtatatgttgtcggtcatccgttaaggcatcaatgagtggcgcataacagtagcccgtaaacttatctcttccgaagtcgactcgatctcgccggatgaccagtcactgtcagttttataactataaatttcaggaggttattttattgtcatttaaaatcttaaaatttaactgctgtgggttcgacgtccacaaaacatggatttatgcatgtatcggtatcactgactccaacaatcgtactgaatataagcaggctcgcttttcttcctttactaaaggattgaatgagctgtgtgactggcttgccaaatataactgtaaagatgtttgtatggaatcaactggaaagtactggatccctgttttcaatatcttagagcaacacaatttatgggttactctttctcatcccaaatacacaaagccaatgaaaggaaacaagaccgaccgcaaagatgcgaaatggatctgtgatctctacatgtgcggaatggtaaagccttcttttatcccacccgctgacatcagagagcttagagatcttgtaagataccgatataaactcacctgtatgatcactggcgagaagaatcgtgcccaaaattgtcttaccgtatctaatcttaagcttgatgatgtattttctgatgtatttggtaaatcatctcgttctattacagaacagattttacaacacccaggagaaaaatttgatgtagcactttttgttcacggacgctgtaaaactcctattgaagaaatacaagctgctgttgatggtgccatttcaatagaacaagcggttaaactcagacagtgccttgatcacatcgatgaactgaacaggcacatttcagaagtagaacaggaaatccttcgtctcagtgataaatatgaggctactttaaacttaataaggactgttcccggattcgataaaaatccgatgactgctgttcaagtgctttcagagattggtggtgatatgtctgtcttccccacagcgaaacacctcgtctcatgggcaggatgctgtcctcgtaacgatcaaagcaatcaaaaaatcaaatccactcggatttcccgtgctggttcctattttaaaccagttctggtacaagttgcaaatgctttaatcaaatcgaagaaacatttagaattcacaaaccgctacaagcgtatcaaagcacgccgtggtcacaagaaagccattattgctgtctgtcgtatgatcctgaccgctatctggcacatactttcagatttaaagccatatactgcagaaagttttcttgaatctcgtcctgtgaaggagaaaaaagttctttccacttcacaggcacttaatcttttgaaacaacggggctacatcataaaggatgagcctttagtagtttcctgattaggtgttgcgttaatatttaatttttcaagccacccctgggatggtttatttgttatgccctattttttcggataacctctacttctttgtttcaaact

SEQ ID NO: 8428 - DNA, 1411 bp, unidentified
  source 1..1411: mol_type = unassigned DNA; note = element_d353c5b
  misc_feature 1: note = core
  misc_feature 2..90: note = LE
  misc_feature 91..1131: note = CDS
  misc_feature 1132..1411: note = RE
  misc_feature 1183..1403: note = bridgeRNA
caatgggatggacgcccccacccgtaacggcatcgatgtgccaaagtggaagcgttgcttcaaccacttgaaccgagaagggcgtccaccatgaagattacgacagttggcatcgacttggcgaagaacgtgttccaggtccacggcattgacgagcgcggcaaggccgtgctcaagaagcaactgaggcgcgagcagatggcggcgttcttcgtcaatctgcccgcatgtctggtcggcatggaggcctgcggcagcgcgcaccattgggcgcgcaagctgcaggagctcggccacacagtacggctgatggcgccgcagttcgtcaaaccctatgtgaagaccaacaagaacgatgccgccgacgccgaggcgatctgtgaggccgtcggccgacccaacatgcgctttgtgccgatcaagaatgtcgagcagcaggcggtgctcgcattgcaccgggtacgccaaggcttcgtgaaggcgcgcactgcccaggccaaccagatcagaggactgcttggagagtttggtctcatcatcccgcagggcattggctacatcggtacacgagtgcccgagctgattgaggatgcctccaacgatttgccgggcgcgtttcgcgtactcgtgcaacgcttgcttgatcacctcaaggaactcgaccgccaggtcggcgaactcgaagcgcagatccaggcgtggcaccgccgcagcgatctcagccgcaaggtcgcgcaagtcccggggatcggacccatcaccgcgagcgcactggtggcctccatcggagacgccaggaactttgatagcggccgtcaggtggccgcatggctgggccttgttccccggcagcactcctcgggcggcaaggctaacctcctgggcatgagcaaacgcggagacagctacctacgaacgctgctgatacatggggctcgatcggtgatctatcgcgctggtcagaagccggagtcgagtgcatgtagttggatcaatggcgtggttaaccggcgcaacaagaacgtggctgcagttgcgctggcgaacaagaatgcgcgcatagtctgggcgctactggcgcacgatcggcactacgaggtcggctacgtgagcgcggtcgagacaatctaacagcgcaggcacccaagaaccaagagacgacgactgcagggggaatgaaccaccgattgctcaggcgagcatgaagtgatggcaagacaggtcagaccgtggttggcaaagcccgcgccggacgaggcacccagagtgcgtgtaagcgatcgaggcgtcaaccagcttaacccatcagggacagtggccaaaagccacactggaagtccgaatgtacgggtgcaatctttaccttcgaggcatcacgaattgagagcttggcatagggggcgtccatgta

SEQ ID NO: 8429 - DNA, 1504 bp, unidentified
  source 1..1504: mol_type = unassigned DNA; note = element_d35748c
  misc_feature 1..2: note = core
  misc_feature 3..257: note = LE
  misc_feature 258..1484: note = CDS
  misc_feature 1485..1504: note = RE
  misc_feature 7..249: note = bridgeRNA
ctaatgagagttgcgggttggtcattgggcagactcgtggtcggtgaccatcggtgggtgagcactctctccgcctgaaccccttgtgtggggagttctgtcgcaagatcgtgcccctgccggtagcccgggagaacggatcgctgatgggatgtcgtgcccaccgagtgtggtgtgagcactggttcattaggccgctgagtgttctcccgcgcgtgaccggggtatgacgagcgttgtggagggagacggacacggtgctgttcgtgggagatgactgggccgaagaccatcacgatgtcgagttgatggacacggcgggccggcggctggcgagagcccggctgccggagggggtggctgggatcgcccggttgcacgcgatgatcgccgagcacctgggcccggacaccgatcccgatcaggcgcgggtggtgatcgggatcgagaccgatcgcgggccctgggtggctgccctggtcgccgcggggtacgccgtgttcgcggtcaacccgttgcaggcggtcggataccggcggcggcatggtgtgtccggggcgaaaagcgacgctgcggacgcgcacatgctggccaacatggtacgtaccgacgcccacgagttgcgcccgatcgccggtgacagccccgaggccgaggcggtcaaggtcatcacccgggcgcacaagacgttgatttgggaacgcacccgccacacccagcggctgcgccacagcctgcgcgagtacttccccgccgcactggaggcattcgaggacctggatgcacccgaggcgctggaactgctggggaaggcacccgacccggacagcgcagcgcggctgtcgctgagccagatccgggccgcgctgcgacgtgctcgccgccgcgacatcgagggcaaagccacccggatccagtcgctgctgcgcgcccagcagctggggcagcccgcggtggtcaccgcggcctatgcagccaccacccgcgccgcggtcacggtgctggccaccctgcgcgcgcaggtcagcaccctgcagggccaggtcgagacgttttttggccagcacccggacgctgagatcgtgctgtcccagcctgggctgggaccgatcctgggcgcccgggtgctggccgagttcggcgacgaccccaaccgttacgccagcgcgaaagcacgcaagaactacgcggcgaccagtccgatcacccgcgcctcgggcaagaagaaggtcgtactggcccgcttcgtgcacaacgaccggctgatcgacgcgttgatgacccaggccttcgccgcgctcaacacctcacccggtgcgcgaacctactacgaccagcaacgagcccgcggtgtcgggcacaaccccgcgctgcgccaactggccaaccggctcgtcggcatcctgcacggctgcctgaaaacccgcaccctctacaacgagaccaccgcctggtcgcaccacgccaacaacatcgccgcttgacattcaagctcctgggatgt

SEQ ID NO: 8430 - DNA, 1517 bp, unidentified
  source 1..1517: mol_type = unassigned DNA; note = element_d368059
  misc_feature 1..2: note = core
  misc_feature 3..252: note = LE
  misc_feature 253..1479: note = CDS
  misc_feature 1480..1517: note = RE
cttatattgggagtgttgcagagattgatgttggagatcatgtatatgtgacaccgattttaagagcttgccggcatgaggaccaccttcatcccattccattttgaggatcaggggaagactgtcccggccgacgagagaacggattagaggttccatagaaagtggtcccttcgttgaggaccgatataaggcgaacattccgttcggagctactgagatgggaagtacaagaccaaggaggcagagaagttggagcgatactatttgggagtggattgggccgatgagtttcatcaggtgtgggtcagtgatcctgaaggcaacaaagtcatcgagaagaaggtcgtcgagaatgtcgagggattgactgagtttggccgctggctcgatgagactcgggcaaagggaatcgagctttgggcagctatagagaagccgcacggacggatagttgattttcttttggaccacggggtggtggtctatccggtgaaccccaaggcgttggatcgagccagggaccggtttcgcatgagccagtccaagagcgactccttcgacgcttacgtattggcggagtttgtgaggacggatcacggtcatttgcgagcgcttgagcccaactccgatccggctcaggaacttaaactgctcactcgggatcagtaccggttggtgcggcagaaaactcgactgctcaatcagctgagtcgaaccctcaaagagtactatgtgcggccgttggaggtattttctgatttggaaacgaatatagcgctggattttctccaacaatatccgactcctcaggctctggccaagctgacccgacgacagtggaaccgcttttccaagcgcgagcaccatcttggggaggatcattgtaaagagctgtgggagaagttgaatcaaccccagcttgaggtccccgagcatgtggtcagagccaaggcgcgacttttggcggtgctggtggttcagctcaagaccttgcgggatgcggttgagagctacaacaagagggtcaaaagttttttcgcctgtatgccggcggctgagctggttaggatgctgccgggagccaagacgggcacgatcgtcgccaccctgtgggctgagctcggcgatgccaagagtcgctgggaatcgtttcgtcaccttcaggctgaggcgggagtggtaccggtaaccaaggccagcggcaaaagccgtgtggtgcagtttcgtttttcttgtaacaagatcatgcggcacgccgcctactggctggcgtttgtctcgctcaatcgaagtgaatgggcgaatcagtactatcgtgaccaacgcgctaaaggacatagccatcaccaagccttgagggctttgggagccaagtggctcaagattatctttgtgatgtggagagaccataaaccgtacgatgaaaacattcacttggccaatatcacccgacagaaaatgcgccaggcggcctaaaaaaaattggggcgcacttgacaagcctcatagaaagt

SEQ ID NO: 8431 - DNA, 1241 bp, unidentified
  source 1..1241: mol_type = unassigned DNA; note = element_d368f10
  misc_feature 1..2: note = core
  misc_feature 3..263: note = LE
  misc_feature 264..1223: note = CDS
  misc_feature 1224..1241: note = RE
  misc_feature 6..219: note = bridgeRNA
cttatgtttcgattttatccaaatcccaaggtaaaatccccggctgatcaccgggcgggaagcggagaagccgagcgtaccctgaggcatcgagcctgttttgtagataacgctctccgctacccacatccgccttctaagttcgtacggtatgcgtaggcccttgcttcgtcgagagagcctgaataaacctaaggctgaaccaggcgtatgcctcacaatgatcataacttattgtttactattatttaacgtactctcagatgtctaaagttaccattggcgtagatattgccaagcataaattcgatgtggctcgcctggaaaatggaaaatacaaacataaaaaatttgacaataacgagcaaggttttgtcgacctgctcgactggttaaccaccttcggcgacgtaaagcctgccatttgcatggaggcgaccggcgcctacagcattcctcttgccgaattcttggcgcactcagactacctggtttcggtcgtcaatccagctaaaatcaaaggttttgccaagagcgagctcagccgagttaaaaccgacaaggccgatgctaagctcattgcccgttatgcgatggaaaagaaaccaccgcagtggacgccaccgcctgccaatatccgcgagctgcaagccttgttgcgccgcattgaagacctactggaaatgcagcagatggagaaaaaccgtctggacacggcggatgccacgattatcgactctatcaacaccttgttaactctcctggagaccgaacttgatgccacgcgcgcacgcgtccagctcctgatcaatcacgatcccgatctcaagcagcgtcgggatttgctggaatcaattccgggtatcggcgagtcctcttccgctcatttgttggttgccttgagcgcccactatggcttcactagcgccaaacaagcggtcgctttcgctggcctcaatccggcacttaacgaatccggtacatggaaaggccgatcccgtatttccaaaatgggcgaccccttgctacgcgctaaactctatatgcccgccgtcgttgccggcaaccacaatccggtcatccgccagttccgacaacgccttgaacataatggtaaacacggcatggcgatcgtttgcgcctcaatgcgtaaactcattcatatcgcctttgccatcttaaaatcgaacaaacctttcgatcctcatttcgcgcttgcataatgagcgataagacggtat

SEQ ID NO: 8432 - DNA, 1278 bp, unidentified
  source 1..1278: mol_type = unassigned DNA; note = element_d36d837
  misc_feature 1..2: note = core
  misc_feature 3..193: note = LE
  misc_feature 194..1072: note = CDS
  misc_feature 1073..1278: note = RE
  misc_feature 15..202: note = bridgeRNA
cttgtattatccctccagtgcagagaaaatcggccagttttctctgcctgcagtccgcatgccgtatcgggccttgggttctaacctgttgcgtagatttatgcagcggactgcctttctcccaaagtgataaaccggacagtatcatggaccggttttcccggtaatccgtatttgcaaggttggtttcactatggaacatgaacttcattatatcggtatcgacaccgctaaagagaaactggatgtcgatgtgttgcgtcctgatggtcgtcatcgcaccaaaaaattcgctaacaccactaaagggcacgatgagctggtgagctggctgaaaggtcacaagattgaccatgcgcatatctgcatcgaagcgaccggcacctatatggaacctgtcgctgagtgcctttacgatgctggctacatagtgtcagtcattaatcctgcgctgggtaaagctttcgctcagagtgaaggactgcgtaacaagactgataccgtggatgcgcgcatgctggcagagttctgtcgtcagaagcgccctgcagcctgggaagcgcctcacccgcttgaacgcgcgttgcgtgccctggtagtccgccaccaggcgctgacagatatgcacacgcaggaactgaatcgcactgaaacggcgcgggaagtccagagaccgagcattgatgctcaccttctgtggcttgaagcagagctgaagcgtcttgagaagcagataaaagacctgacagacgatgatccggatatgaaacaccgcaggaaactgctggaaagcatcccgggtatcggagagaaaacatctgcggtattgctggcttatatcggtctgaaggaccgcttcgcccatgccagacagttcgccgcttttgcgggtctgacaccacggcgttatgaatcaggtagcagtgtgagaggggcgagccggatgagtaaggccggacatgtgtcgcttcgcagggcgttgtatatgcccgcaatggtagccacagtaagactgagtggggacgggcgttccgcgaccgtctggcggctaatggcaagaaaggaaaggtgattctcggcgcgatgatgcgcaagctggcacaggtggcgtatggagtgctgaagtcaggcgtgccgttcgatgcgtcacggcataatccggtagcggcgtaaaaatcgcggaagggatgaaaaaaacagcgcctgacggcgctgtgtctggcatgcctgcaatccgggaaaccggaccaggaaaaaacttgcaggccataacagtat

SEQ ID NO: 8433 - DNA, 1378 bp, unidentified
  source 1..1378: mol_type = unassigned DNA; note = element_d36e7ae
  misc_feature 1: note = core
  misc_feature 2..86: note = LE
  misc_feature 87..1112: note = CDS
  misc_feature 1113..1378: note = RE
  misc_feature 1151..1370: note = bridgeRNA
caatggaatggacgcccccaccttaacggcatcgatgtgccagagtggaagtgcgatcaaccactcaacagatgagggcgtccaccatgaatattacgacgatcggaattgatctggcgaaaaacgttttccaagtacacggcgttgacgaacacggcaaagtggtcctccggaagcagctcaaacgggcgcagttcgccctgttcttctcgaatctgccgcactgcctgatcggcatggaggcctgcggcagcgctcatcactgggcccgcaagctgcaatcctttggccatacggtgaagctgatcgctccgcagttcgtgaagccctacgtcaagagcaacaagcacgacatcgccgatgccgaagccatctgcgaggcggtggcccgccccaacatgcgctttgtgccgatcaagaatgtagagcagcagtcgatcctgtcgctgcaccgggcgcgacagagcttcgtcaaagcccgtaccgcccaggccaatcagatccgcagcctgttggccgaatttggcttggtcattcccaagggcatcaacaacgtccccgggcagatcccgctggtgctggccgaggcagaaggcgagcttcctggcgtattccggcagttgatcgatggcctgctggcgcacttccacgagctgcaccggcaggtgaccgagatggagctgcagatcaaagcctggcaccgggacaacgaggcgagccgcaagctggcggaaattcccgggatcgggccactgggcgctactgcgctggtggcctccatcggcgatgcgaagtccttcaagaacggccggcagcttgcagcctggctcggattggtgccgcggcagcattccaccggtggcaaacagaatctcctaggcatcagtaagcggggggatgtctatttacgtaccttgatgatccatggggcccgatcggccatcctggcgacgcagcgcagacccggtaacacaagctggctcgccaagctcctcgaccgacgccatcccaatgtggctgcggccgcgctggccaacaagaatgctcgagtcgtttgggcccttctggcccatgaccgtgaatatcaacccagctatacagcagtagcgtagccgcttatttcacccagcacgtttcaggagaacgattcactgattgctcaggcattcacgcagtgatggcaagacaggtaagaccgtggttggccaaacccaaaacgtccgcagcacttagagtgcgagaaagcgatagggacccaaccagcgtattccatcagggacagcggctctgccacatccaaagtccggatgtacgactgcaatctacgccttcaaaccatcagcaactgaatgcttggcaaaccgggggcgtccatgta

SEQ ID NO: 8434 - DNA, 1396 bp, unidentified
  source 1..1396: mol_type = unassigned DNA; note = element_d3714f8
  misc_feature 1: note = core
  misc_feature 2..89: note = LE
  misc_feature 90..1124: note = CDS
  misc_feature 1125..1396: note = RE
  misc_feature 1171..1388: note = bridgeRNA
caatgggatggacgcccccactcgaaacggcgcggtcgtgccaaagtggagttgtgcgtgacttacttccacgaacaggagctcccatcatgacggcggctacggtgattggcatcgatctggcaaagaatgtcttccagcttcacggcgtcaacgagcacggcagggtggtgctacgaaagcagatcaaacggaatcagatggcgtcgttcttcgcgaacatcccacgagcgctgatcggaatggaagcctgtagcagcgcgcatttttgggctcgcaagctgcagagcatgggacatgtcgtcagactgatggcaccgcagtttgtcaaaccctatgtcaagacaaacaagaatgatgcggccgacgccgaagcgatttccgaagcggtgacacgaccgaacatgcgcttcgtgcccgtgaaaaacgtcgagcagcaggcggtgcttgccttgcatcgcgcacggcaggggttcgttcgagcccgtacggcgcaggcaaaccaaatccgcggattgctcggcgaatacggatattcgatcccgcagggcatggctcatatgccccaggtattcgacgtcattgaagatgcgtcgaacgacttgcccggcgtgttccgtcaactgattctgcgcctgatggaccatctgaaggtgctccaccaacaagtgaccgagatcgacgttcaaatcaaggcgtggcaccgcaatagcgatctggcgaaaaagttggaaaagatacctggcatcggcccggttacggccaccgccctggtggccaccatcggtgacgccaaacacttcgagaacgggcggcagctagcggcgtggctcggattggtgccgcgacagcactcgagtggcgggaaacaaaacctgctgggcatcagcaagcgaggcgattcctatttgcgaacattgctgattcactgcgcgcggtcagtgatttccgcgtccaaacgaaaaggaaattgcgagggctgggttcacgaactgattcgccgccgtaaccacaacgtagccgccgttgcgttggcaaacaaaatcgcccggactgtatgggcgctctgggcgcacgacagagagtacctggccggttacccatccgctggtgcggctgcgtaaccagtccggccgattcggtacaggaaggacaacaggagaaccaaccaccgattgctcaggcagtcatgacgtgatggcaaacaggtcagaccgtggccggtagaacccgaaaatgtccaagcacttgcgagtgcgccaaagcgacggggaaccgaccagcggaacccatcagggacagcggcatcgccgcaaccaaagtccgaatgtacggttgcaatctaccttcatgtcgtcatgaactgaatgcttggcaagccgggggcgtccatgta

SEQ ID NO: 8435 - DNA, 1360 bp, unidentified
  source 1..1360: mol_type = unassigned DNA; note = element_d383257
  misc_feature 1..2: note = core
  misc_feature 3..72: note = LE
  misc_feature 73..1107: note = CDS
  misc_feature 1108..1360: note = RE
  misc_feature 1109..1350: note = bridgeRNA
ttatggaatggcccgccccaatcccggcctcttgtatgatgccgtcgatgaaggaaggaaaggagcgagccaatgtctattgtgatcctcggcgttgatctgggcaagaactcttgtagtgtggtcggcgtgaatgcggccggtgcagtagtcgtgcgtcgaacaatgcgtcggcagacgctgatcgactatgtgacgaagctaccggcctgcgtggtggcgatggaagcgtgctgcggtgcccatcatttgggtcgcctgttcgcggtgcaagggcacgagatccggctgatgtcgcctgagtatgttcgcccctatatcaaagcccagaaaaacgatgatcgcgatgccgaggggatcgccgaggccgcgtcgcggccgacgatgcgttttattgaactcaagagccaggagcagttggacatccagacgctgcaccgggtgcgttcgcgcctggttgccgagcgaaccagtctcatcaatcaactgcgcgcgatcctgctggaacgcggagtgacatttccggcagggcgccgcaaacttgagctgggtgtcgatgacctgctggccgaggatgacggcctgttgtccccgcgcgtgcgccaactggtcgacgagctttgcgtcgaatggaaggaactcgacgcgaagatcacggcgctgaatggcgagttcgtcgaattggcgcgtcacgacgcggcggcgagaaggctgacatcgatcccgggcgtcggcgcgctcaacgcgacggccctgatcgctgcggtgggcaatgcgagtagctttgccaaggcccgcgacctgggcgcatggctcgggttggttccccggcagtacagtacgggcggcaaagctcgactgctgggcatatccaagcgcggcaacacctatctgcgcactttgctcatccacggtgcgcgtgcggcattaccgtcgctttcaaacagcgacacacccatggggcgatggctcaaggccatgatcgagcgaggcgttcaccgcaatgccgtggtggtggccctggccaacaagctggcgaggattgcctgggctaccctgcgcaaggagacgcgctttgaacgtggctacttggcagcagcagcatgatctgatcggccacgtgcaaccgcgcatgtagcccaacgaggtttgcaggaaggatcgtgaagatggcctgatcagtcgatcggcgtttggaaagcccgagtataaaaatggcattaaatgccgtcgtttttatggggctctgaacgcgcggatgtccatcttggctgtgagcgtgctcacaagaccgtatacgttgacgcagactgagatcagaacgccgtagaatcctcttgcagacggggcgggccatacg

SEQ ID NO: 8436 - DNA, 1728 bp, unidentified
  source 1..1728: mol_type = unassigned DNA; note = element_d3868d5
  misc_feature 1..2: note = core
  misc_feature 3..351: note = LE
  misc_feature 352..1584: note = CDS
  misc_feature 1585..1728: note = RE
  misc_feature 51..326: note = bridgeRNA
ctcgtataataagatttgcagacggttttaagagagtctgcttagtgcacttgtttatcagcaggctttaagatgcccgtgatataatgctgtcaggtcggcagggacaagctctgttttctcctgttgagccgcgaggctacttcatataaagtctgttcccctgagccggaagttagctgcaaactcattagctgtttgccggaggcaagaccgcccttttagcagtaagggatatcgcattggccttctccggagtgattctaatatgcgaggttgctgatgctccggttatcatgggtatcttaaagcctgccgatctgaaaatcccactgcggggaggtgagaaaattgaatccactttacgttggcattgacgtgagcagcaaaaacaatgttgcctacctcatgaaaccggacggcgccaaacacagcagtttttccgtgcagaacaatcgcggaggtgctaaactgatgtcagaaaggattgtgtcggcacttaccgcgatgcagctcagcgacgtggtgattggtcttgaagccacttccatctacggtgacagtttggtgtacgcgctccgggaagatggcggtctgggccagtttcaacgtaagattcacattctcaatccaaagcaggtcagaaagttcaaagatgcttattcggacctgcccaagaatgattttgtggatgccttcgtgattgccgaccatctcagattcggcagaattgcgtcggaggtctacatggacgattatcgttacaaagcactgcaaaccctgaccagggctcgtttttacgctgtacagaatctgacgagagaaaagcagcatttcgcaaactatctgttcatgaagtgttccgggctggcacaggaaaaagtgcttccccacaacacaagcgccaccacaatcgctctgatggagcagtttgagacggtggatgatttagcctacatagatctcaacgaactgacagcatttatcgccaaatccggtcggggaaaatttgctgatccggcggctactgcgaaggctgttcaggccgctgccagaggttcttaccgtttacctaaaaccgtgagtgactctgtgaatcaggccatgtcggtttctatcgcagccatgcgggctttggaaagccagatcaaaacgctggacaaggctatcgaacagcaatttgagatcatccccaacacgctgacctccgtccccggcattggcaaggtatactcggcgggcattatcgccgaggtcggcgatatccaccgctttcaatctcaggcatcccttgccaagtttgccggcctcgtctggtcccaacaccagtccggcgactatgaggcggaggatacccatttgatcaagtccggcaaccggttccttcggtactacctgctggaagccgccaactccatgagaagatgcgactcggagtttcgacgctattacaacctcaagtttaaagaggtcaacaagttccagcacaaacgcgcactcgctttaactgccagaaaactggttcggttggtctttcgactgctgaaagacaaccgcctgtacattccaccggaagagtattaaactctaacggtgttgttgccctgtttttgaaattgcaggggcagggcttgggtaagtgttgtcttttttacgcattcagtgcgtttacggtggcttccttatctgtttcatttgcttttaccctcttgactttgtaccattaga

SEQ ID NO: 8437 - DNA, 1305 bp, unidentified
  source 1..1305: mol_type = unassigned DNA; note = element_d38f0c2
  misc_feature 1: note = core
  misc_feature 2..265: note = LE
  misc_feature 266..1258: note = CDS
  misc_feature 1259..1305: note = RE
  misc_feature 55..251: note = bridgeRNA
cctttgatctaacaaagatagttttttaataaagttgttattgttggaaatggggggtctggggggtgttaaaaactaaaaactttgtgaataacgttctaataaaaggcgggtgaactttcctctcttctagtatggagtactttatgcggtattagttcccgccttttatgattgcccagggcctaactagaatacttgctttgctacaacaaaggtgatcggcgaaaggcaatttttttaaaacattatataaaacaaacgtatgaaaaaatggaatgttattttaggtgtcgatgtgtccaagttaacactcgatatctgctgggccgaacaagcgctgcacgtcagaatcgacaataactctaaaggatttattgcatttaaaaaatggtgcaaaacccatgctatacatttagaagaaactttgattgtgatggaatataccggaggctatgaataccggttcctacagttctgtgattcgcagtcaattcgctactgccggatacctggtttggagataaaacaatctatgggcatgataagaggtaagaatgacgaggtggattcttttcgtatcggacggtatggcgaacaaagagctgatgaactgaatccttcaaaaccgttagataaaaatattctattgcttaaacaattgctgacgtttcgtaaaagactggtccgtgataatgccggcctgcaaagcacgttgaaagaacgggagcacatgtatggacagctgaagaaagacaccatctcacgtattattttcaaaaaaataaaatcaaacaccaaagacatcaaacaggtagagcaggagattatgaaaataatcacctgtgatgaagctatcttgctaaactatcggataataaccagtatcaaaggcatcggcaaaataaatgcctggatgacgatagcttataccgaaaactttaccagctttaaagatgcgcgatcatatggggtatacgtcggcgtgatcccgttcggacacacctcgggaacgagcattaaaaaacccaaacgagtcagtcatatcgcacataaagaattaaaacaggaattgaaccaggcagctaaaacagcgattatatacgaccccgaattgcgggcttatgcagagcgtaaactcaaaaataaagcttatcgccttgtattaaacaatgtaaaattcaaactgatcctaagaatgttctctttggtcgaaagaggtgaactgtatgtggaaaactacagaagagttgcgtagaaaaagtctttttaaattaaatttggaaatatggtaaacctagaata

SEQ ID NO: 8438 - DNA, 1424 bp, unidentified
  source 1..1424: mol_type = unassigned DNA; note = element_d391fa4
  misc_feature 1: note = core
  misc_feature 2..77: note = LE
  misc_feature 78..1109: note = CDS
  misc_feature 1110..1424: note = RE
  misc_feature 1197..1418: note = bridgeRNA
taatgagatggtccgccgcttcgatcagcccgcagtgggatgatcgaggcagcagcttacactcggaggatcatcacatgcacatcgcttcggtgggaatcgatctaggcaaaaccaccttccatttggtggccttggacgatcatagcaaggtcgtcattcgcaagaagttttcccgcaaacaactgctggcttacaccgccaacctgccaagctcgctgatcggtatcgaggcttgctctggggcacatttcatcggggcggcgctacgtcgacagggccacgacgcccgactgattccggcgcagttcgtcaagcccttcgtaaaatccaacaagaacgactttctggatgccgaagcgatcgctgaagcggtgacccgcgagaacatgcgcttcgtgccgatcaagacggacgaccaactcgacctgcaggccttgcatcgcgtgcgcgaccgtctggtgcagcggcgcaccgcggtgatcaaccagattcgcgggtttctgttagaacgcggcatcaccttcggcaaagggcctgcccaactgcgcaatcacatggcggaggttttggaagacgccgacagcaacctgaccccgcgcatgcgcactctgctggagcggctctgggtggagtggcgccaactggagagcgacttggccgtcgccaccgccgacattgagcaaatctgcagcgaagatgccgcttgtcagcgcctgcgccaaatccccggcgtggggccgctggtggccagcgccacccttgcagccatcggcaacggagcggcgtttcgcaagggccgggagtttgccgcctggctgggactggtgccgcgccaacactcaaccggcggacgaacccgcctgctgggcatcagcaagcgcggcaacatctacctgcgccgcatgttcatccacggggcacgagcggtggtgtttcgcatccgctacgacactggcggattggggcagtgggtgcaacgactacagcagcgagcggctccctgcaaggtcatcgtggctgtggccaacaagctggcgcgcatcgcctgggcggtgttgttccgtggagaaccgtaccgccacgccgccgtgtgcgggctcgcttaacatgggccgtggaaaagacgctgcgcttggaaaacgctagtgcgtttcccacttttccaccgccacggtgactacgactatctttaccaaggtctgcgagaagagaactggacgagcgatcagtcaaacggcgtgccggaaaacctgcgttgaaaaatgtgttcccggtaaccgagggatttatcaggaccggcacgcgcgcatcatcatcgtgagcccggagagcaaatctccaacccgaggccggatacatttgcgtcagactgtcacttcgtccaatcattctccccttgcagtcaggcggcggaccataca

SEQ ID NO: 8439 - DNA, 1382 bp, unidentified
  source 1..1382: mol_type = unassigned DNA; note = element_d39568d
  misc_feature 1..3: note = core
  misc_feature 4..215: note = LE
  misc_feature 216..1184: note = CDS
  misc_feature 1185..1382: note = RE
  misc_feature 37..185: note = bridgeRNA
gcttgtgtcttgagggggtattagaatcaggagtgagagcggtgaatggcaagctgactgccggaggtgctgcgagcacgagtgggagcacacgctgccattcaccgttccactttggcgagagcccgaacagttggatgcggctctgatctcgaatcacaagcgtgggccaagccaaagttctctcactctgctgagtctaggagattttggtcatggtttccttcgtgggtatcgatgtttccagcacgtcattggatgtggcggtgcggcctcaaggcatcaaatgcagtgtcagcaatgatccggcaggctttgaggagctggagagttggcttcgaggattcagcatcaaacgtatcctgcttgaggctacgggcgggtacgaacgcgatatcctgcactttctgcaggacgcgagttacaaggttatccgcgtcaatcccaaacgagccaggtcgttcgctgactccatgggcatcaaagccaagaccgacgcgattgacgctgaggctctggcgcattttgctgaagtcattcccgacaaacccaccttgcaggtcagcccagacagggctttgctgcgtgaatttctgcagcaacgtgatcgcttcgttcagcagcgcgatgatgatcgccgacgcctcaaacaagcgcagtcacaggtggttgtcgaccttctgaaatcccatattcagcacctcaggctgcagatcaagctggttgaaaaggaaatcaagcaacagaccacgacgcttaatgacgaacggatcgctcagctgattcaagtcaagggcatcgggatggtgaccgccgccaagctggtggcgctgctaccagagctggggcgtgtggagtctagggagatcgcctcattggtcggagttgcgccgttcaaccacgacagtgggaaatcggtgggcaagcgctatatctcgggtggcagatcgcaagtcaggcgtgcgttgtacatggcgtgctgggtagcggtgaggcacaacccgggcatgaaggcgcgttatgacgcactgagagggcgaggaaaactcgccaaggttgctatcgtggcgtgtatgcgggtcttcatcgtgcaactcaacgcgatgatccggacgggtacgccatggcgagagcaaccgccgacaaagcctgaaagtacagcgcaagctcaaggcgcagcgtgatgtctgtaggaatgggtttgcccgcgaaggaggcaccaccttggatggcacgggcttcgcccgtgttcgcgggtaaacccgctcccacagggtcagcaactcgcttactaactttgttctctgctcgacaacgcggtccaaagggctggctgatttcccagaggatggaatgccctcagaaatttgaacaagacagtt

SEQ ID NO: 8440 - DNA, 1434 bp, unidentified
  source 1..1434: mol_type = unassigned DNA; note = element_d397af1
  misc_feature 1: note = core
  misc_feature 2..81: note = LE
  misc_feature 82..1137: note = CDS
  misc_feature 1138..1434: note = RE
  misc_feature 1196..1425: note = bridgeRNA
taatgggatggcccggtcgtgctcctacccttgtgagacgtagagtcttgcagggaatcagcagcacaaggagcacgtcccatgtctcgtcaaccaacagcaaccatcgtcgccacgattggtatcgatatcggcaagaatacgttccacctggtcggcttcgatcagcgcgggaacgtcgttttgcaattgaagacctcgcggcagcagcttgagcggcgccttgccaatgttccgcgctgtctgatcggcatggaagcctgttccggcgcccaccatatcggccgacagctcgaagcccttggtcacgacgtgcggctaatcccggcgcagtatgtgaagccgttcctcaaagggcacaagaacgactatcgcgacgccgaggcgatcgccgaggccgtgcagcggccgaccatgcgctttgtgacgatcaagacgccagagcagatggatttgctggctctgcatcgcgtgcgtgcgcgcctcgtcaggctgcgcacaggcgggatcaatcagataagaggattgctcattgagcgcggtatcacagtccggcaaggcccggcaccgttgcgcaaggcgctgtctgacatcctgagctgcaactcgggaaggctctctccacggatggtccgcctcattgtcgacttgaccgaagactggcgccgattggacgatcgcatcgcaaccgtgtcagccgatatcgaagcgctggcggagcaggacggtccctgccaacgtctgatgacggtgccgggtatcggaccgatcatctcgagcgctgtcgtggcggcgatcggcaatggcacaggtttcaggcagggacgcgacttcggcgcctggctcgggctcgttccaaagcaggagtcgactggcgatcgcacgatcctgggcaagatctccaagcgcggcaacaagtacttgagaacgctgttcgtgcaggctgcccacgtcatcctggcgcgacggccgagtgccgcgatgcgcggtctatggccttggatcgagcaagcatcgaagcgacttcaccgcaacatgctggcgatcgcactcgccaacaagctcgcccgcatcgcctgggccgttctcgcgcacggtcgcgaatatcagccgaggattatgccccatgcggcgtgacacgagccggcgccgctaacgttggaagttcggaggtcaaaggtccgctgaacaactttcctgccgaggtctgcgagatggaatgaagagatggacgaacggtctgcccggcgcaaccaagagactgggtgccatgatggcccttcgaggtctttccgctagtcagcctcggatgcgcgcggatacccatgatggcccggagcaaattgctccacttcagaggcctgatacattgatgcagctctcacgttcgttgatcttggaagtccatcttgtaccgcacggccgggccataca

SEQ ID NO: 8441 - DNA, 1455 bp, unidentified
  source 1..1455: mol_type = unassigned DNA; note = element_d398bc5
  misc_feature 1: note = core
  misc_feature 2..229: note = LE
  misc_feature 230..1441: note = CDS
  misc_feature 1442..1455: note = RE
  misc_feature 12..244: note = bridgeRNA
ctacttgacacttcctgtaggaccggtgtccggccagactcggtccaggtgcccggcgggaagcactccacgcggctgcccaccagcgagatcggtgtgactctcattcggtttgcgttcccgccgggcaccgcccgtgaggtgtggctccagaggggtctgcccagctctcagtagcactgcccacctcgcaatccctacaggtccaacggtgaggcgaggtggcggcatgacgaaggtcttcatcggggtcgatccccacaagctgtcggcaacgatcgaggtcgtcgacgaccgagagacagtgctggcgaccggccggttctctaccgacaaggccggctacgcggcgatgcgcaagcacgtcgcggcctaccgggagcgggtctgggcggtcgagggcagcaacggcgccggccggccgctggcgcagcggctgctggccgacggcgagtacgtcgtcgacgtgccggccaagctcagcgcacgagcccgagcgctcgacaccggtcacaaccgcaagaccgacgcgcatgacgcgcacgccgtcgccgtcgtcgcggtgcgcaccacggggctacgagtgctggcctacgacgtcgagctcgaggcgctgcggatgctcgtcgcccgccgtgaggagttgacccgggcccgggtgcagacgctcaaccggttgcagcggctgctgtccgagctgatcccgggcaagaccaagaaggacctgactcccttgcaggccaagcggatcctggcctcggtgcgccccagggacctggcgggcaagacccgcaaggggctcgcgctcgagcagctggccgagctcgtcgggatcgacgcgaagatcaaggagcgcaccaaggagctcaaggcgatggtcaaggcgtccggctcgaggttgatggagctgaccggtgtcgggcccgtcgtcgcggcccgggtgctggccgacgtcggggacgtggcccggttccccgaccggagcaggttcgcgtcctggaccgggaccgcgccgatcgcggcctcctccggcgagatcgtccggcaccggctctcccgggccgggaaccggcggatgaaccacatgatccacatcgccgcgaccacccagatccgtctgaacactcccggccgggcgtactacctgcggaagctcgccgccggcaagaccaaggcagaggcgatgcgctgcctcaagcgccggatctccgacgccctgtaccggcagctgctcgccgacgcccgcgccgccgccccggcggcagcggagacgggtccgggagggcaccgcggggcgtcacatgaatccagcgcggccggcttgcacccgcacaccggcacttcggatcagccacttcccggacccgcacagccgacgttaccgccgaccccgccacgccgtaaggcgaccgccaagaagacccttcagccagccggttgacaacagaggggtgc

SEQ ID NO: 8442 - DNA, 1534 bp, unidentified
  source 1..1534: mol_type = unassigned DNA; note = element_d3a114f
  misc_feature 1: note = core
  misc_feature 2..229: note = LE
  misc_feature 230..1024: note = CDS
  misc_feature 1025..1534: note = RE
  misc_feature 14..244: note = bridgeRNA
ctacttgttgtattgacctacggctgatgcctgggaaggctctgtcgaggtggttggtggggtcgttctcatcgcggctgtccacggcctggtcgtgtgactctcatctggcatgcgtcccatctaccgccgtggcgtggagaggctcgagaggggcctgttcgacccgaagtagcaatgccctcctcgcctgattgtcctatccggatggcgaggcgaggagggcattgtgggacgtgtagtgatcgggatggatccgcataagagctcggcgacgatcgagatcatcaacgatcgggagaagatcctggacaccggccgatacagcaccgacacggccgggtatcgggcgatgctggcagccggccgcaagcaccgcgaccgggtgtgggcggtggaaggctgcaacggtatcggccgccatctggcgcagcggctggtcgccgacggggaaccggtggtggatgtgccagcgaagctgtccgcccgcgcgcgggtgttctctaccgggcagggccgcaaaactgatccggtcgacgcgcattcggtggccctggtcgggctgcgcacgcaagggttgcgaacgattcaggccgatgatgcgacggtggcgttgcggttgctgatcgatcgccgtgaacaactcggcgtcacccgggtgcaggtgatcaaccggctgcatcggctgctgctggagttgctgcccggcggtgcgaagaagcacgtgtccgtcgcgcaagccaaggcgctgctgggaaaagtgcgcccgcgtgacatcgccgggaagacccggcgtcgcctggctgccgaactgatcgtcgaccttgcgtcactcgacgcgaagatcaaggccgcggacaaagaactgcatcagctgatcaccgcaaccggcagcacactgcgagatttgcacggcatcgggcccgctaacgccgcccgcttgcttggtgacgtcgccgacatcacccgtttcgccgacaaggcacggttcgcgtcctggaacggcaccgcaccacaccactagatgcatcttccggtgaccagcaccggcaccggctctcccgcgcggggaaccgacgcatcaaccgggtgctgcacatcatggccgtcgtgcagctgcgcaccgacaccgaaggacgccgctactacgaccggaaagtcgccgccggcaaaaccaacatggaagcgatgcgctgcctgaaacgacgcctgtccgacatcgtctacaaacagatgcgcgacgacgcacaacgaatagcgacaggcccgggcggacactcgggggcgactactgactccagcgcggtcgactcaaaccccgatgtcgacgcttcggagaagtcctgtcccggacccgtcaccaccaacgctacccgcgtcaaaagctcccgaccagaccgttcttcggcccgttcccgacgccccccaacagcgccggcccgcagccgccgtcaagcgcactctgcttgacgacgacgagaaccggcgcaccatcaacaggcgggaacaaccatgcattgacatagaggggtgc

SEQ ID NO: 8443 - DNA, 1436 bp, unidentified
  source 1..1436: mol_type = unassigned DNA; note = element_d3b2771
  misc_feature 1..2: note = core
  misc_feature 3..229: note = LE
  misc_feature 230..1420: note = CDS
  misc_feature 1421..1436: note = RE
  misc_feature 12..223: note = bridgeRNA
tccctacgttgtcctgcgggagacggtgagcccttcgtatggttcacccacccaggggcgccgggtgtggttgaaaaagctctgccgctcgtggctttcagtgattggccgcccagcgccccacgacgactcggctgccaattaggaattgcgaatgatcgctctgtagggaatcgacagcgaggtcgtccgtcgggaggcatcagcaccacaccgcacggaggctcacatggccgcaatctgggccggcatcgacgcaggcaaagcccaccaccactgcgtcgcgatcgacgagagcggccgtcggctgctgtcccgacgcgtcgccaacgacgagcccgaactcctccaactcctcgccgacgtactggccttgggtgatgaggtgacctggggcatcgaccaagccgacggcggagccgccctggtcatcacgattctcctcaaccacgtccagccggtgcactacatctccggccgggccatccaccgcgcttccgagagctaccgtggcgagggcaagaccgacgccaaggacgccgccgtcatcgccgaccaggtccgcgtccgccgggatctgcacccgatacgcgtcactgacgacaccgtcaccgacctcaagctcctcacaggccggcgcaccgacctggtcgccgaccgtacccgcacggtcaaccgcttgcgggcccagctcaccggcatcttccccggcccggaacgggcactggacctgaccaacaccggcccgctcaccttgctgaccggctaccagaccccagcagccgtccgccgaatcggtgccaagcggctggaaacctggctgcgcaaccgccacgtcgtgcgtcccgaccggctcgccgagatcgccgtcaaggccgctgaacgacagcgctccagcctgcccggcgagaagctgaccgctcagctggtgcacacgctggcgagggaggtgatgggcctcaaccagcaggtcgccgaactcgacaaggccatcgaggcccggtttcgcgaccaccacacgttcgacgtgatcaccagcatgcccggcctgggtgtcatcctcggcgccgagttcctggccgccaccggcggcgacatgacggccttcggcaccgccgaccgcctcgccggcttcggcggcgtcgccccggtgccccgcgattccgggaagatcagcggtaacgtgcgacgcccgcagcgatacaaccgccgccttcaacgcgtcttctacacctcggcgttgttcagcatccgacactccgaggactcacgccggttctacgaccgcaaacgctccgagggcaaacgccacacccaggccgtcctcgccctcgcccgccgccgcgtcaacgtcctctgggcactcctacgcgacgagcggtactacgaacccaccccgcccaaggccctcgcggcttgacaaaccgcattaggaa

SEQ ID NO: 8444 - DNA, 1376 bp, unidentified
  source 1..1376: mol_type = unassigned DNA; note = element_d3b3e38
  misc_feature 1: note = core
  misc_feature 2..89: note = LE
  misc_feature 90..1121: note = CDS
  misc_feature 1122..1376: note = RE
  misc_feature 1143..1368: note = bridgeRNA
caatgggatggactcctcctcccctactcggcatctaagtgccacactggtaagcgataccaccagtcaacggaaaagaggagtccacgatgaagcttagtcgcattggaattgatttggcaaaaaatgtgtttcagttacacggtgttgatcgtcatggtatggcgttatggaagcgccgcttgaagcgtgatcagtggttgaaggcggtattggacaaagcggagccgggttgtgagatcggcatggaagcatgtaccggtgcccatcactgggctcgcaagctgcagtctcgaggttataccgtcaggatgatgccaccgcagttcgtcaagccctacgtgaagagcaacaagaacgatgccaacgatgccgaggctatctgcgaagccatgaaccggccgaacatgcgttttgtcgccgtgaagagtgtcgagcaacaggacatccaggcgactcaccgcatccgagcggagctcaaggatcagcgtaatgccaaggcgaaccagatccgtggtctggttgccgagtacggcttggtcgcaccattgacgttgcgtgcactgcgtgcggcgatcccgtgttggctggaggatgccgagaacggtctaaccgatcacttccgcagcttactgcatggtgtgcaggttgaccttgttgctctggatgatcgcgtgctggagttagatcgggagatagaaaaactcgccattagcaacgagatcacgaaacgattacagcagctgcgcggtgtcggtccgatggtcgccacagcgttagtcgcaacggttggcaatgccgagcagtaccacaagggccggcagatggctgcatcgctggggctgacaccgaggcaacacagctccggtgacaagtatcgtctgctcggtatcactaaacgcggtgatgtctacctgcgaactctattgatacacggcgcacgggccgtggtctcacaggctaaacacagagatgatcgactcagtcgctgggtcaccggcattgccaagcgaagccataccaatgtcgcggcagtggcattagccaacaagaccgctcgcatggcttgggccatgctgcgcaacgaaacaaactacgatcctgacttcgccatccgctgagacaggaaaaccaaggagaacctcaataacgattgcttaagcaaactgcataatggcaaacaggtcgaaccggcgtcagtcaaacccggcaatgtccacgtactcgaagtacgaacaagcgattgggaactgacgcgcggataacccattatggcccggcatcaacgtatgccaacttaagaggccggatatacgtacgcagtcgtgccgtgtctgccatcaacagcttgcttgcaaaaaggaggagtccatata

SEQ ID NO: 8445 - DNA, 1306 bp, unidentified
  source 1..1306: mol_type = unassigned DNA; note = element_d3b89cf
  misc_feature 1..2: note = core
  misc_feature 3..226: note = LE
  misc_feature 227..1294: note = CDS
  misc_feature 1295..1306: note = RE
  misc_feature 6..188: note = bridgeRNA
agtcagtgtcagggtgacagtgccgcttcgcggtggttgggtcctgatcaccagtcgtctgactcgtagggtcgctgccttcgtggcgtgcatgggttttgtcggcgtctggtgtgacggaccggccggcgtgacttgataggagcgtggcatcgcccccactgagatgtgtccgccggccggcccaaccgtccctgcactgatcgggtggaaggaggcaaccctcatggttgtcgttggagccgatgtacacaagaagagccacacgttcgtcgcggtcgatgagcgggcccgcaagatcgggcagttcacggtcagggcgaccactcctggtcaccgggaggcgttgcggtgggcgcggcgccagttcggtgatgagctggagtgggcgatcgaggactgccgtcacctctcgacccggctggagatggatcttctcgcggctggtcaggtcgtggtgcgggttccgccgaagatgatggcgcacgcccgtgcgagcgcgcgcacccgcggcaagtccgacccgatcgacgccctggcggtggctcgtgccgcgttggcggagcccggtcttccccgggccgtgcacgatgagcaggctcgtgagctgaagctgctggtggatcggcgcgacacgctggtcaagcagcgcacggcaacgatcaacagcctgttgtggcgggtgcacgagctcgaccccgagcacgagatcccggccggggcgatggaccggatcaagcatcagcgtgcgttgcaggcgtggttggagggtcgaggcgagggtgtggtggtcgagctcgccctggatgagttgagcgacatctgcgccgtgagtgtgcggatcaaggacctggagaagcggatcgctgcgttggtgagcgttcgggctccggccctggtcgcggtgcctgggtgcgcggagctgacggccgcgaagctcgtcggggagatcggtggcatcgcacgtttcagcaccgacgcccagctcgcccgccacgccggcatcgcgccgatcccggtctggtccggaagcaccgagggcagagtccgcatgacccgtagcgggaaccgccagatcaactgtgcggtccaccgcgttgccgtcacccagatcaggctgccccgctctctcgggcgggcgtactacgacaagaagaaggcccaaggcatgtcgaaccgagaggccctgcgctgcttgaagcggcacctcatccgagtcgtgttcaccaccctcaagaccaccacccaacccctccaccagcccaccacgaccaccgtcgccgccgcggcttgacataggagaaac

SEQ ID NO: 8446 - DNA, 1486 bp, unidentified
  source 1..1486: mol_type = unassigned DNA; note = element_d3c4cae
  misc_feature 1: note = core
  misc_feature 2..95: note = LE
  misc_feature 96..947: note = CDS
  misc_feature 948..1486: note = RE
  misc_feature 1247..1484: note = bridgeRNA
taatggaatgatccgccccacttccttaacggcctcaaatgggccatgatgttagttttatagcacaaacatcaaaacaagaagcgaggcgaaccatgaacaataataccaaaaaagggccggttaccgtgttaggaattgatttagctaaacaaagttttcaactccacggtgtagataacgcgggtcaagtcgtcatcaagaagaaactaaatcgtacgcagttgagtgcctttgttgctaacttacccgtttgtttaatcggcattgaaagctgtggaggtgcccatcactggacgagactgtttactgaaatggggcatactgtccgtatgatggcgccccagtttgtcaaaccctatgttaaatcgaacaagaatgattctgcggatgcagaagctatttgcgaagccgttcaacgccctaatatgcgttttatacccgcgaaaagtattgaacaacaggatatccaaagtttacaccgcattcggagtcaactggtcgccagacgaaccgcccaagcaaaccaaattcgtgggctgttaatggaatatggcatagtcatccctcaaggtattagttacatcagaaaatcgctgcccgatattttagaggatggagagaaccggttgtcagtcctctttcgagagcaattgagtggtctctatgaggaaatggtgcatcttgacgaaaggattgaggcattagaattgagtctgaagacgattagtgcgcaaaatgaagactgcaagcggttactcaccatccctggggttgggctaatgacagccactgctctgatagccgctgtgggtgacgtcaacgtctttaagagtggtcgtgagctcgcggcttggctggggctggttccacgacaacactccacaggtggtaagccgaccttgctaggcattagcaaacgaggcgacagctaccttagaacatgactgattcatggtggacgagcggttgtcagatcggctaacaagcatgaagacaaacgtagccaatgggtggcaggtgttgagcaacggagaggaaaaaatattacagcggttgcagtcgccaataaaaatgcacggatagcttgggcgttattaactaaaaaagagaattatcaatcgtgtgcggcttaaaaatccgcatgaatttaagcgttcaacaggaggtttatctagccgtagaagaaacaaaacgagtattacagatgaattacgttaaagaacattaacatagctaagaaaatgttagcaacaaattgcgtagataaaattttaagtgatggcataacaggtaacacctgcattcctaagaacctgctggggtctaaggcttaatgaagccgatagtctgataaggtgcggaatgcgcggattccatcagggccagaggtatagacaacctcatacaaaggccggatatatgggtgcattatttctttatgtcacgaactaaattttccttgcaatacggggcggaccatata

SEQ ID NO: 8447 - DNA, 1562 bp, unidentified
  source 1..1562: mol_type = unassigned DNA; note = element_d3c5a14
  misc_feature 1..2: note = core
  misc_feature 3..242: note = LE
  misc_feature 243..1421: note = CDS
  misc_feature 1422..1562: note = RE
  misc_feature 3..221: note = bridgeRNA
ctcgtattatagtgtgtagccaatctttacctgttcttggtaaaaggctatgctgttatggatgctgtggattagtatttgtttcctaccaccagatggtttcagaaagggtctgaccacagcctcctgctactttgttgatcagtcagataccgcatgacggtttatgtggaacgaggatacgaaagcagcgagtccttgtgggtccaacagcatcaaataatcttacggaggtgatctctatgatcattgttgctgttgatgtcgcaaaggataagcacgactgctttatcaccaacacggatggcgaagtcctttatgattccttcgccattcagaacaatcaggagggctttgaagacctgtatcagaagatatgctctgtgaccgattcctcacagaatgtaaaagtaggactggaagcgaccggtcactaccatctcaacctccttggctatctccttgataaaggtttccccacctgtcttatcaacccgttacaaacaagtcttttcagaaaaagtctaagctttagaaagacgaaaacggatccggtagacgccagagcgattgcgagattgctcatgagcgatcggactttacagccctactcgctcacatcataccagaacgaagagcttaagtcactaacccgttatcgcgccgataaagtccgtgaacgagcaaagctgaaatcttctctttccaggcttgtcgtgatcctctttccggaactggagaaactcgttccgactctgcatatgcctaccgtttatgacctgctcaacgagtttcccggagcttcacacatcgcttctgctcatctgacccggttatctcatctcttttcagaagcctccaaaggtcattatggaaaagatgatgccatcaggatcagaaatgccgctcgtcgatcaatcggcttggtcttgccttctaaatctcttgaacttcaacatacgatcgcccatatccgttttctggatcgtgagatcgatgagatcgagtcgcagatctttgctcttctggataaacatccgccgaagatgctggacatcccgagcatggggccgcgtatggctgccgttatcgttgcagagatcggagacttcagacgcttctcatcaccggataagctgcttgcgtacgctggtctttctccgacgacctaccagtccggacagttgacttccacttatgccaaaatggagaagcgcggctccagatatcttcgtttcgcattgtttaatgccacgaaatatgtctgtgtctgggatccgacgtttcgtgcctatctggcgaaaaagcgagctgaaggaaagcactataacgttgcggtctcacatgcggcgaaaaagctcgtccgtctgatctatcatctggagacgaccggagaaacatacgtttcgaaagcctgctgatagtatcctgatatcctgttccagggcaccctttcggatgctctgtttgtcatgcagttttcaaggtgctgacttatgaaaaactcgcttgcgagtttttagcgattagcttctttttcaacttgactattaatagtcagt

SEQ ID NO: 8448 - DNA, 1643 bp, unidentified
  source 1..1643: mol_type = unassigned DNA; note = element_d3ccea1
  misc_feature 1..2: note = core
  misc_feature 3..272: note = LE
  misc_feature 273..1607: note = CDS
  misc_feature 1608..1643: note = RE
  misc_feature 22..246: note = bridgeRNA
ctcgtataataaatttaagggtaatttaaagagaacccctatgaaacctcttgtttatcacacagaaatgtgagataataaatctgtacagtcagagggcgctgttcgcttccttgaagcaaggcttcctttgaaagagtagcgcctctgctttacggacagatgcgaatgagctggatagcatttaagtgctgaatatctaacgaggttgtatttccgtaaaatacagaggataacctttgctgtaacaaaattttacgaggtgtatcacaatgttttattgcggaattgacatcgctaaatacaagcacgaggcttccgtcatcgacataaacggcaaaactctgcttgacagcatccccttcgccaacgacaagcaaggctgtggaaaaatccttgctgtttttgaaaaatttgaaattgctcctgacgatgttatcatcggaatggaagcaactggtcactactggctttccgtatatgcttttttccttgagcttggatatactgtcaaggttatcaaccctattcagtccgaagctttcagaaaaatgtatattcgtcagaccaagaacgactctaaggattcatatatcatcgctcagattatgcgtttcggagaatattccgcaacctcgctttctgaggaaaatatcattgcattaagacagctttcacgctatcgtcttgcacttgtggacgcctgcggcgactgcaaaagacgtgtaattgcattgcttgaccaattattccccgagtatgacaagctgttttcagatacattcggaagctcatcaaccgagttgcttctgaactgcccaacacctgaagatatgcttgcaatttccacaagaaagcttaccaatattttgaacaaagcaagtcacggtaaatttggcaaagagaaggctgaagaactcaaagctgctgctaaaaacacctttggtatcgcctttgcaaaagacgctttttcttttcagatcaagcagcttatgcagcaggttgttttccttgaaaatcagctttctgagcttaaagagaaggctgaagaactcaaagctgctgctaaaaacacctttggtatcgcctttgcaaaagacgctttttcttttcagatcaagcagcttatgcagcaggttgttttccttgaaaatcagctttctgagcttgaagaacagatttcaaatcttcttcacgaaaccaatcaatacataaccactatcaccggtatcggtgatgttcttggtgcaatcatcgtcagtgagatcggcgatatcaaccgctttgaacgtcctaatcagcttgttgcctttgcaggacttgacgttaccgttaaacaatcgggagagttttcaggaactaaaaacaaaatctccaagcgtggttcaccttatctgcgcagagctatctggcttgccgcacagcgtgccgctttctgcgaccccgttttatctgaatattatcaatctctcagagccagaggcaagcaccatctcactgctgtcggaggtgttgctcgcaagctttgtaatattatttttgttattctcaaagagaacagaccttatttgccaacccctacgaaaaatcctaaaaatttatcttgattttttcattttgggtattgactttttatagctggt

SEQ ID NO: 8449 - DNA, 1517 bp, unidentified
  source 1..1517: mol_type = unassigned DNA; note = element_d3d883e
  misc_feature 1..4: note = core
  misc_feature 5..250: note = LE
  misc_feature 251..1492: note = CDS
  misc_feature 1493..1517: note = RE
ctcactggtgcaccatcctcaggtcggcggtttcagataggccgctgatgcacccctggtccccaccgggccaccgccacgctggcgcgacctgcgaggtccagcatgagttctgcggggtccggtggcccaggacgcccagaccggctacagggctgtgcgccggagagcgccgatcagtgagcgaccggctgcggggtcccgggaccaccgggtggattcccactgctgcaacagcgaggaacccaagatgagtgtcaccgttgagagcaccgcagcgcgagtgtgcgcgggtgtcgattgggccaaggacgaccacgcggtctgcatcgtcgacgctggcggcgaggttgtcgaccggttgaccgtcgagcacaccgcggccggcttgaagcggttgatccgccggctgctgggcgcgggcgtgagcgaggtcggcatcgaacgcggcgacggtcccgtggtcgaggccctcctcgcggccgggctgatcgtgctggtcatcgcaccgaaccagctcaagaacctgcgctcccgctacgggtcggccggaaacaaggacgaccggtacgacgcctacgtgctcgccgacgtggtgcgcaccgaccgacgccgtctgacacccctgacccggtccacccccgcgaccatcgcgctgcgctccacggtgcgtgcgcgacgtgatctggtcgagcaccgcgtcgcggccgccaaccagctgcgtgcccacctgcagatcgtcctgccgggaatcgtgggcctgttcagtgacctcgaatcccaggtcagcctcagcttcctcgagcggttcaccacccaggccaaggtcgactggctcacccccgcccggctgggtgcctggctggcaaagatcggctactccggcaaggtcgcacccgaggtgctgcaccagcgtctgctggctgccccacgcggaaccaccaccgtcgatgcccaggcccacgcgggcaccactgtggctttcgtcgcggtgctgcgcaccctcaacaaccagatcgctgcactggccgagtccatcgccgaacagttcgacgcccatcccgacgcacccatcgtgaagtcgctgcccagggccggcaccctgcgcgccgcaagactgctcgctgagatcggcgacgcccgcggcaggttccccaccgctgactcgctggcctgcctggccggcgtcgcaccctcgacccgacaatccggcaaagtcaaggccgtcaccttccgctggtcggccgacaaggaactccgcgacgccctgtgcgacttcgccggcgactgccgccgagccaacccctgggccgaagacctctaccaacgcgccagagctcgcggccacgaccatccacacgccgtccgcatcctcggacgagcctgggcgagcatcatctggcgctgctggcaagacggcctcccctacgaccccgcccggcacaacgcactccaacggttcctccacgaacacatcgcggagtccgcctaacgcaacgcacgttgacacagggcaa

SEQ ID NO: 8450 - DNA, 1351 bp, unidentified
  source 1..1351: mol_type = unassigned DNA; note = element_d3e0fb0
  misc_feature 1..2: note = core
  misc_feature 3..211: note = LE
  misc_feature 212..1210: note = CDS
  misc_feature 1211..1351: note = RE
  misc_feature 13..194: note = bridgeRNA
cttgtatgtaatagtgaggtgatggttagctaccaccacatgaagcggagtgagcttgtgtccatcctgaatgtctagaaccttgagcgtcagctaaagccctctgcttcgcctttcacgccagcattaacattgaacggttgccaagagcgatgactctgcatgtacaagggtaataggcgtgatggtcaagtgaagggaggaaacggctatgtttcagttaggtattgatgttagcaaaaacaccctggatttatgcctgcttcgggacggtgtaaaaggcagggtgaaaacgcgcaagcttaaaaacgacataagtgctaccagtgctttaatcaactggctccataagcaacactgtgaaccggttgaggttcatatcatcatggaagctaccggggtctaccacgaatcattagcatatggccttcataaagccggtgccagggtgtcgcttgccaacccacaccgtagcagagaatttgctcgtggcatgggaatgctgacgaaaaatgaccaggttgatgcttatatgctcgcctgctacggtgcgctcagagagccaatgccgtggactccaccacctgaaaacgtccgctatcttagctcacttctgcgtcgccgtgatgcgcttgtcgcagacagtacccgtgaaaaaaacaggctggagaaatcccgggccacggactgtccctcagttgttagtgaatccatcgaaagtatgctacagagcctgagttcagagattgggcatctggataaactgattcaggaacatctggagcaacaccctgaattaaagaaggattttgacctgctgacgtcgataaaatccgtaggttttcagttaggtctgaatatgctggtaatcctgcggagccatcgtttcgataccgcagagcaggcagcagcctttttgggcgtggttcctgtagaaaagacctccggtacctcggtcagtgggaagccgcggttgtctaaaatcggtccgccggaaatccgggcaaagttgtatctggcttcgttgtgtggactgagattcaatccggtgatgaaggcgatgtacgaacggctatgccagcgcggcaagcccaaaatgtgtgcgattggcgcactgatgcgaaaacttgttcactggtgctacggcgttttgaatacacagcaaccatttagcgctgagtacctgctcagtacatgtaaggccgcttgatgctggcataagctctttgaactccgttagcacggcgtagcctcggtgttatggtgacttaggtgctggcagctttctggcagcacttagggatctgtatcactaaaattaggacgattttttattgacgcaacacggtag

SEQ ID NO: 8451 - DNA, 1450 bp, unidentified
  source 1..1450: mol_type = unassigned DNA; note = element_d3ed602
  misc_feature 1..2: note = core
  misc_feature 3..215: note = LE
  misc_feature 216..1430: note = CDS
  misc_feature 1431..1450: note = RE
  misc_feature 7..217: note = bridgeRNA
ctaatgggattgcatcggtcgcaataggctgatgacaccgagccggtggcggtcgagccctgtcactcccagagatatgaatctctaggaaaagagcgggccgccgctgcctggcgagggggccaaccactagtgggatgacgtgcctgggagcactgaaccattaggtcgtggggaacctcctccggctcgagtaaataggtcaggaggtggcggtggtcttcttgggtgttgactgggcagaagagcatcacgacgtctgcctgctggatgagcagggcgaggtgctcggcagagcacaggtggcaaacagcttggaaggcgttggccacatccatgcccttgtcgccgaacattccgaagagtcgggtgaagtcgtggttggaatcgagaccgaccgaggtcttctggtgcaggccctgctggcggccggctaccagatctacgccatcaaccctttggccgtcgaccgttaccgggatcggcatgcggtctcgggagcgaagtcggatgcgggggacgcaaaggtgctggccgacctggtccgcaccgaccgcaacaaccaccgaccggtggcgggcgattctgaacaagtcgaggctgtgaagctcttggcacgcgctcatcagggcttggtccactcgcgccaacgtcaggtcaatcagctacgaagtgcgctgcgcgagttttatccagctgccctcgaggccttcaaagatgatctcggtgggcgcgatgcaatggccatcctggagtacgcgccgactccgagcagaggcagatctgtctcccaggcaaagctcatctcggcacttcggaaagcaggacgtgagcgcaacctggaagcgcgggcaggggagttgcagaaaatcctgcagcagcctcacctggagctgccggcgaccctggtcgcggcgtatgcagtcatcgtcaagtcttgcgtccgcatcattcgtgagctcaatgctcagacgacggcgctggaagaagagctgacgaagtcttttgagttgcacccggacgccgagctctacctcagcctgccaggactcggttttgtcctcggcgcccgggttatcggcgagttcggggatgacccgaaccgttactcagatgctaagggccgccgagcctattcggggatggcccccatcaccagagcctctggcacccgacacgtggttctcgcccgttatgcccgcaaccgccagctcgccgacgcttgctacctctgggccttctcctcgttgaaacgctctgctggagcccaccagtactaccgagctttacgcgcccgagggaagtcacacgcccaagcactaagggcgcttggcaatcgctgggtcagcatcctgcatggatgtcttcgccgtcgccagctttactcggaggaggtggcctggagggcgccggtcaccgtcgccgcttgacatttagaaccgtgggatgt

SEQ ID NO: 8452 - DNA, 1375 bp, unidentified
  source 1..1375: mol_type = unassigned DNA; note = element_d3efe78
  misc_feature 1: note = core
  misc_feature 2..90: note = LE
  misc_feature 91..1122: note = CDS
  misc_feature 1123..1375: note = RE
  misc_feature 1147..1370: note = bridgeRNA
caatgggatggactcctccccgctttcggcatctaagagtgccagactggagttgcgacacaaccagtcacagcgaagaggagtccacttatgaagcttacgcgcattggggtcgacatcgccaagcaagtattccagttgcacggcacggatcgaaccgaacatacggtatggcgtcgccgcgtgccacgcgagcgctggattcaggcgctgtgcgaggtggctgagccaggctgcgaggtcggcatggaagcgtgtggcggcgcccatcattgggctcgccagctccaagcgttggggtatcgcgtcaagttgatcgcgccgcagttcgtaaaaccgtacgtgaagagcaacaaaaacgacgccaacgacgccgaggccatctgtgaagcgatgagtcggcccaccatgcgcttcgtctcggtgaagacggttccgcaacaagatatccaagcgatgcatcgcattcgccgtggactgattgaacaacgaacggccaaaggcaatcagatacgcgggctggtcgccgaatatgggctggtagctccgaaggaattgtcgtcgctgcgccgtgcgattccatgctggatggaagatgccgacaacggattgagcgccagctttcgaccattgctcgatggcctgtggcgcgacttgtgtgtcgccgacgatcgcatcgaagaattagaccgtacgatcgcaaacctcgcgcataccgatccagacacacgtcggcttcaacatttgcgtggcgttggcccgctggtcgccacggcgttgattgccctcgtcggtgacgccacgcaatttgaaaatggccgtcatatggccgcttcgttgggactgacaccacgacaacacagctctggcggcaaggagcggttgcttggcataagcaaacgcggtgatgcgtacgtgcgtgccttactggtgcatggcgcgcgatctgcgttgcgaacggcggcgaataaagacgacccgttgagtcggtgggccgtacggctctcgcaacgcgcgcatcccaacatagcctgcgtggcgctcgccaataaaaccgcccgactcgcatgggcactcttgcgttaccaacgtgactaccaacccgccatggcggccgcctgaaaggacctccgtatcacatctatccacgattgctagcccaccgcacgatggcgaaccggtcgaaccggcgtcggcagaaccctgaaatgtccaagtgcactcaagcacgagaaagcgattgggagccggcgcgcgactagcccatcatggcccagcaccgcaaagcggtgcggttctcagaggccggatatacgtgtgcagtcgacacggacgccaaagcacgggaggcttgcaatggggaggagtccatata

SEQ ID NO: 8453 - DNA, 1620 bp, unidentified
  source 1..1620: mol_type = unassigned DNA; note = element_d3f05cb
  misc_feature 1..2: note = core
  misc_feature 3..279: note = LE
  misc_feature 280..1497: note = CDS
  misc_feature 1498..1620: note = RE
  misc_feature 15..299: note = bridgeRNA
tctactacaatgtatttatggttgagatacccatcagcccgatgggttctttaccttcttgttgcttaagctgttagaatgaaggagtgacggtatggcggctccctttcctggacttcgcgtccgtaaaacagactgccagccagctcctcattcgcagcattcgttttatgcaggttgaattgcccttgcggtacattcgtgtcacaccacagtagatagaacaggcaatgagtaaagctgacatttaccgtgtcatatcatttcaggaggtggacaatgaacgcagtaggtattgatgtttccaaaggcaaaagcatggtgactattcttcgtcctttcggagaagttgtttccatccctcatgagattcggcacacatccgatcagatcgatagtctcatcagtgagatccgttcccttgatggcgacacccgtatcgtcatggagtacaccggccgctatcacgagccgatggcccgctggctttcggatgccggactttttgtcagtatcgtaaatccgaagctgatcaaagactttgacaacgactcccttcgcaaagtcaaaaccgacaaagccgactccataaaaattgcccgctatacgcttgacaaatggcataagctcagtcagtatggagccatggatgaattaagagaacaactcaagaccatgaatcgtcagttcgggtattacatgaggctcaagactgcgatgaagaacaatctcatcagcctgcttgaccagacatttcccagtgccaatgccttctttgacagtccagcaaggagcgacggctctcaaaagtgggtagattttgtcgatacctactggcatgtggatcgcatccgcagcatgtcccttgctgcatttactgaacactatcagaaatggtgcaaacgcaagggctacaacttccagccaggcaaaccagcggaaatctatgcgtcggtccgcaacatcattccgttgctccccaaagacgaagcgacaaagcttatcgttcgtcaggccgtgaaccaggtaaacaccgcctcggctgctgttgaagaactgcgtacccgtatgaacgatatcgcatcccggcttccggaatacccggttgtccttgccatgaagggtgttggcacgtcccttggtcctcagctgatggctgagatcggagatgtgaccagatttacacacaagggtgcgcttaccgcttttgccggggttgatcccggaaagaatgactccggttcctattcccagaagagtgttcgcacatcaaagcgtggttctgcaccgcttcgcaaaacactgttccagatcatggactgtctgataaagaccgcacctcaggatgatccggtctatgcattcatggtcaaaaagcgatctcaggggaagccttactacgtctatatgaccgcaggtgcaaacaagttccttcgtgtctactatggtcgcgtaatggaatacctgacaacactttctgaggcgtccgaaaactaatctcgttgcattgaccaatctagctggctggcatctatggcagccttctttttgtgcctttattcaacctgtataaaaattttcaaagttcttctttacagccttgactttttatttgcaggc

SEQ ID NO: 8454 - DNA, 1330 bp, unidentified
  source 1..1330: mol_type = unassigned DNA; note = element_d3f1d1f
  misc_feature 1..2: note = core
  misc_feature 3..64: note = LE
  misc_feature 65..1069: note = CDS
  misc_feature 1070..1330: note = RE
  misc_feature 1096..1329: note = bridgeRNA
atgagatggtcactccctcctcttggacactatgctgataacaggcttaattcggagaatcaccatggaaaatattgcgcttattggtatcgatctgggtaaaaattcctttcacatccattgtcagaatcggcatggtaaagcgatttatcggaaaaaattcacccggcaaaaactgtatgaatttcttgcaacatgcccggcgacaaccattgtaatggaggcctgtggtggcgctcacttcatggtgcgcaaactgtccgagctggggcacacgccaaagctgatatccccacagtttgttcgcccatttgtcaaaacgaacaaaaatgactttattgatgcagaagccatctgtgaagcggcatcgcgaccgtccatgcgatttgtgaagccccgcacggagtctcagcaggcaatgcatgccttacaccgggtcagagaatcacttgtcagcgacagggtcaaaaccacaaaccagatacaggcatttttactggagtttggtgtcagcgcccgaaaaggtccgacgctgataaagggtctggcagaaatcatggagacaaacaatctcccgccttatatgaccagtttgctgcaaaagctacgcgaacattacgattatcttgttgctcaaattaaagacctggagatccaactgcaactatcccttgacgaagacgaagcaggtcagcatttgctctccataccctgcgtcggcccgttaaccgcaagcctgctctccacacagttgggagacggaaaacagtacggcagcagccgggattttgcggcctcaacaggtctggttccacgccagtacagcacaggggggcggactaccctgcagggtatcagcaagcggggaaataaaagactgcgggcattgctggtccagtgtgcccgagtatatctgaggacgctggagcaccggacaggcaaacttgccgactgggtcagagaattattgctgcgaaaaaataattttgtagtgacctgcgctctggcaaacaagctggccagaatcgcctgggcactgacagcccgacaacaatcatttgaggcgtaattagctgatgtatttatatatttcaaccgtgtgacttatctggttttgcgaatactgattattgatggtatcaacggctaaccggcctgatgaaaaacctgtggttaggaatggcagacagaatgccgctcaagtttataaggttcaacaggcgcggagctcatcgaggcgcaggctaaaggcctatgaagacgccggatagattcatgcaagccaaccatattgtcaaaatcggtgttgcaaaaacgggagtgaccatag

SEQ ID NO: 8455 - DNA, 1366 bp, unidentified
  source 1..1366: mol_type = unassigned DNA; note = element_d3f5808
  misc_feature 1..2: note = core
  misc_feature 3..86: note = LE
  misc_feature 87..1097: note = CDS
  misc_feature 1098..1366: note = RE
  misc_feature 1068..1352: note = bridgeRNA
agatggggtggttgccgtcctcccctaacggcatcgcaatgtgccaaagtgatgtggcgtaagccacagaacagagaggacggcggatgaaggatatgttgatcggagtggatctggcaaaaaatgttttccagctacacggggcgtcgatgacaggcgatgtgaagtatcgcaagaaactgtctcgcgggcagttcttcaggttcatgtcagagcagccatcggcacttgttgttatggaagcctgggcgcgcgagttggtgaagctgggccatgcagtcaagctgatcgcgccgcaatatgtgcgcccgttcgtgaagcggcagaagaacgacgcgaccgatgccgaggcaatcgtcattgcggcccgtcagcctgaaatgcgctttgtcgagcctaagaccgctgatcagcaagcgcgggcggttctgtttcgggcgcgcgagcgtattgttcatcagcgaacggaattggtgaacgctctgcgcgccgttctctacgaatatgggcaggtcattccgcaggggattggtcacatcaagcgcattgaggcgattgtcgagaatgctgagatcggcctgcctgagcttgtgcaggaggaatgccgcgaccttctggctcagatcggcgagaagacggcccggatcgaaaaaaaggccaagaagctcgcggaactgtcccggcagagtgaaaccgcgcgccggcttcagaccatgccaggtgtggggccgctgatcgcactggccgtcgaagctttcgcgccagcgatgcagagcttccgatgcggtcgggactttgccgcttggctcggcctcgttccacgacagttctcttctggcgggaaagaaaggctcggccgggtgtcgaaggctggtcaggccgacatccgcaggctcctgattctcggggcaatggcccgcgtgagttgggcgggtcgcaaaccgccagcgcaaggatcgtggctttcgcggatgctcgcgaagaagccgcgcatgctggtggcgatcgcactggcgaacaagatggctcggaaaatatgggccatgctgacgaagcaggaagattatcgagacccggctctggctgtggcggcgtgacaagaaaccacgcggataaccaggactggcaagcaggtgtgagaagtcgatgacctgaatgggcgcatgatcgaacagatctggaccgggaaaaccagaagttaactgagggcatagagctcgtttggcagatttggacccgatccgcagatcaccataccggccagcggcttctgaaagtgccgcaaataaggcctgacagaagaccgcactcgatcacacgtcaaaaagggtcagacactacttgcgcaacggacggcaaccacaga

SEQ ID NO: 8456 - DNA, 1186 bp, unidentified
  source 1..1186: mol_type = unassigned DNA; note = element_d3f991c
  misc_feature 1..2: note = core
  misc_feature 3..208: note = LE
  misc_feature 209..1171: note = CDS
  misc_feature 1172..1186: note = RE
  misc_feature 6..213: note = bridgeRNA
cttgtatctttaaaccagaccagcgcggtagagtctggacgccgttgagacggccagaccggaccgtgcagcctggtacgcgcttgggctttgaagcccgtttctgagtacatggcgcacgtgcgccgcgctggtcttcgtgaagcccgaacggttacgcgcaccggatgttccgagagcgcatgcacaagcaagggatctgaagatcatgtctgttacctcagtggtagtaggcatcgacgtggcgaaggcccacgtggatgtctcggtgctgggcgtcaagctcgacgtgcagcgattcgacaacgatgccgacggccattcggcgctggtggcggctctgcagccgttcgccgtgagcctggtcgtcatggaggccacgggtggctacgaagctgccatcgcctgcgctttgcaggctgcaggcttgtctgtggcggtggtcaatccgcggcaggctcgcgacttcgcaaagtcgatgggacaactcgcgaagaccgacgccgtcgatgctcggctgctggccgagttcgccagcgtgctggttcgacgtgaagacttggccagcttcattcgtcctctgcccgacgacaagcaacaaacgcttgccgccctggtcacccgccgtcggcaactgttgacgatgcttggcgcggagcgccagcggctgcaactggcgatcgccaaggttcgtccgagcatcgaagccatgatcaaggccatccgcgcccagctcgacgacgtggaggcccagatggtgggccacgtcaaagagcactacgaggaactcgacaagctcctgcgctcggccagcggcatcggtcccgtggccagcgccaccctcattgccgagttgcccgagctcggtagattgaatcgccgtgagattgccgcgctcgttggcgtcgcccccatggccaacgactccggcacgactcgcggccggcgtcgtatccagggcggccgcttcgagatacgcagagtgctgtacatggccgcgctcgtcgcggccaagcacaaccctcccatcaaggccttctaccaacgcttgctcgctgccggcaagcttcccaaagtggcgttggtggcttgcatgcgcaagcttctgaccacgctcaatgccatggtcaaaaccaacacaccttgggacgccgagttcgatcacgcttgactttgaagacggtta

SEQ ID NO: 8457 - DNA, 1458 bp, unidentified
  source 1..1458: mol_type = unassigned DNA; note = element_d3fe464
  misc_feature 1..2: note = core
  misc_feature 3..222: note = LE
  misc_feature 223..1437: note = CDS
  misc_feature 1438..1458: note = RE
  misc_feature 7..222: note = bridgeRNA
ctaatggcactggatcagtctcgtcactgaaggcaggctgatctccgagccacctgtcggtgagcactccgttgccccgagcctcgagctctagaactagatcgtgccccgacagctcggcgaggaggatgacggctggtggggtgtcgtgcctcgagcactgaaccattaggtcgccgcagccctcctcgggctcaggtccatcagtcgagaggaggagcggtgatctttgtgggagtggattgggccgaggaccatcacgatgtctgcgtgatgaacctgaacgggactgtgctcggcaaacggcgggtccccgacagcgtggccggcattcgtgagctccacgagctcgtcgccgagcacacggcagacgacgaggtggtcgtcgtcggcatcgagatcgatcgcggcctggtggtgacctcgctggtggccgcgggctacgaggtctttgccatcaacccgatggcctcgtcccgctatcgggagcgccacggaacctcgggtgccaagtccgatcccggcgacgccaaagtgctggccgatctcgtccgcaccgaccgccacaaccaccggccggtggccggcgacaccgacctggtcgagggggtgaagctcctggcccgggtccaccagtcggccatctgggggcgtcagcgccagctgaatgcgctccgctcggcgctgcgggagtactacccggccgccctggtggccttcgggactgatctctcccacggcgatgccaccgcggtcctctcgctcgccccgacgcccgagctgggccggacactgtcacggtccaagatcgcctcagccctgcgccggggcgggcggatccgcaacgtggaacggcggaccgacgagatccaggcggctttgcgggcggactatctcgaagcccccgaggtgatcgccaacgcttacgggacgatcacccgctcggcgctgcggctgatcgagacctacacggccgagatcacctctttggaaggggcactctcggagcattttgagcagcacccggacgccaagatcgtccactccctgccaggaatggggacggtcctcggcgcccgggtgctgggcgagttcggtgatgaccagactcgtttctccagtccccagtctcgcaagaactacgccggcacgtcgcccatcaccaaggcctcggggagaagccgggtggtgctggcccgcttcgcccgcaaccggcgactgggtgacgcctgcgaccagtgggcgttctgctcgatcacccgctcaccgggatcacgtcgctactacgacgagctgcgagcccgaggcaagacccatcgccaggccctccgacagctggcgaaccgactagtcggcatcctgcacgcctgtctcgaggacggcagcctctacgacgagaccatcgcttggcgtgaggtggaacagcccgccgcttgacggcttcgagacgtggggtgt

SEQ ID NO: 8458 - DNA, 1212 bp, unidentified
  source 1..1212: mol_type = unassigned DNA; note = element_d40940d
  misc_feature 1..2: note = core
  misc_feature 3..222: note = LE
  misc_feature 223..1197: note = CDS
  misc_feature 1198..1212: note = RE
  misc_feature 6..200: note = bridgeRNA
cttgtatctcgacttgagcctcctcagaggcgatagtccccgactgatcatcgggggaggaaccgcaagccgtgtccaccctaaagcctcgagcttgtaacgtagattgcgctgcgctcctccgcactcatccagtaagtccgaacggtatccagagctttgagctcgcatcaacaaggtaggacggatgcagtgacgatcagcccttcacaggaggacatgatgggagttgttgtcggcattgatattgccaagcacacattcgatatcgccaccttgcaagccaacggcaagtaccgcaccaaggccaagctgggcaatgaccagggcggcttcgaagttttgcagcagtggttgagcaagtacgcagagccgcaggcctgggtcgtgatggaagcgacaggtatttaccacgaggcccttgcccaatggctgtacgaacggggttacaaggtctgcgtgctaaaccctagccagacggcgcgttacgccagtagccagttgcagcgcgtgaagaccgacaaggtcgatgccaagatgattgcagagtacggccgcaggcatcaggacaagctgcgtgcctgggagcctgaaaagccgaagattcgccgcctcagagcacttacgcaccgcctgaaagatcttcaggagctggagcagatggagcaaaaccgtctggatgtgacgcatgatgacaaagctattgaattgattcagtcgatgctcaagcacatccgccaacagatccaggacacgctggcggcgatcgaaaaacacttcgacgacaacgatgatctcaaggggcaacggaacctgctcaagagcatcgatggcattgcagaccgaaccgcgggactcttgctggccgagcttggcgatatccagcgctttgaggacagtcgagcggtcaccgcctttgcaggactgaacccgaagttgcaagactcaggcacgctcaagggccatgttcgtatctcgcggatgggctctgccaggttgcgcgcaggactctatctgccagccgtcgtatccctgacctacaacccagctatccgcgcgctggccgagcgcatgcgcagcgccggtaaggccggcaaacagatcgtctgcgcagccatgcgcaagctgctatgcatcgcttatggcgtgcttaaatcaggcgagccgtttgatcccaaactggctattgcgaagtaaaaaacaagacggtat

SEQ ID NO: 8459 - DNA, 1410 bp, unidentified
  source 1..1410: mol_type = unassigned DNA; note = element_d40c2c7
  misc_feature 1: note = core
  misc_feature 2..77: note = LE
  misc_feature 78..1109: note = CDS
  misc_feature 1110..1410: note = RE
  misc_feature 1184..1401: note = bridgeRNA
taatgagatggtccgccgctgtaaccctccgctgaggcggaggatggtagcagcggtttcagaggaggatcatcgacatgcagattcgttcggtaggcatcgacctgggcaaaacgacgtttcaccttgtggcgcttggagcagctagcaaggttctgatcaagaagaagttctcacagaagcagcttctggcgttcacggcgaacatgcagacgtcgttgatcggtctcgaagcttgctcaggagcgcatttcctcggacgagccttgaggcaacagggccacgacgtgcgattgattccagcgcagttcgtgaagccgtttgtgaagtccaacaagaacgacttcgttgacgccgaagccatagctgaagccgtcgagcgcaagaacatgcgcttcgtgcccatcaagacggacgaccagctcgatctgcaggcgatacaccggattcgtaatcggctggtgtcgcgacgcacagccgttatcaaccagatccgagctttcctgctggaacgtggcatggtgtttgcgcagaagcctgcgaagctgaaggccgggatggccgacgttcttgagaacgcagacaacgcgctgacgccgatgatgcgcaagctaatcggtctcctgtatgaggagtggaagagcgttgaagagcagatcgatgagctcaccgacagcctcgaacagatcgctgccaacgatgcggggtgctgccgcatacagaagatcccaggcatcggcccggttgttgctacagccatcgtcgccgcgataggcaacggcgctgcgtttcgcaaaggccgagacttcgcagcatggcttggcctggtgccgcggcagtactcgactggaggcaaggcgaggttgttgggcatcagcaagcggggcaacatctacctccgcaagattctgattcacggagcacgcgctgccgcgatgcgcataaagcgcgatcgctactcgatagaagcatggatgaacgcgctcgaagccagagccccacgcaacgtactggtggttgccatggcgaacaagcttgcccgcatcgcatgggccgtgctctccagcggagaagactatcggcctgtagcgagtctcgcagcggcatgaaatagagcggaaaagacgcctgcggcttggaagcgctgacgcgctcccactttcccgctctacgacgacggctttcccaccgaggtctgcataggaacagcaaagacgaaagaacagtcacaacggcgcatctgaaacctgttgacgataagggcctcaacgaccgatcggcttgttaggacaaatgcgcagcggaactcatcctggccaggagcacgcggctccaccaaaggccgaatacattgccgcagacttgtctctcgaccaaactcaaccttgcagtcacgcggcggaccataca

SEQ ID NO: 8460 - DNA, 1803 bp, unidentified
  source 1..1803: mol_type = unassigned DNA; note = element_d4124eb
  misc_feature 1: note = core
  misc_feature 2..404: note = LE
  misc_feature 405..1700: note = CDS
  misc_feature 1701..1803: note = RE
tcgtataataagtgtatagccagtagaaacgatggttatgcacttattctttctatagatttatagatgatctgagacacctgggataatccctttccatctcatctactttggttattagttacataggttattctgtggtatgatatcagcagagtctgatgtctagaggctctgctttgtctcctttcagcccgatctcggtgcctgcttagaaagcttgcagcctgattcatatgtcatattccgcttacacagatgtttcatcctctggcgtacagcaccagcaaaagagctgccagagtgtatgcttattacgcgaggtttcggtcagcatatgattcccaggataaaccttttacttcagattccaagaatactcaatcggaaaggcgggtgatatcatgttaaagattaaccctttatctacgctttacgtcggtattgacgtcagctcaaaatccaactatgtttgtgctttggattttttcaaaaataaatacataaactcttcttttgccaacaatcagcccggggctgaggaattagctttgaagatacttgagtgtttaaatcaacaccccgacttaactatggttgttgctgctttagaatcaacttctgtttacagcatccatatcgctaattatctttcttcttgcgaagaattgatgcggtttaagccttatgtttttgtcctgaaccctaaatgtactgcaaactacaagaaaagctatataggacttggtaaatctgatcctattgatgcctttgttattgcagactatgcaagagctggaaacattgaatccgagccttggcgcggcagccagtttcttgctttgaaacgtctcacacggcatcgtcttcaccttgttgaatgcatgaccagggagaaaacttatcttatctccaatctttatctgaaattcagcgaattgcagatgcttgaaggagatgaccagcctttctgcgatatatatggcgctacatcttccagtgtattaatggaatacctttccccggaagaaattttagcttcttccgaagaaaatctgattgcattccttgctgaaaaaagccgcaaccgcattaaggatataagcaagaccgcagatttattaaagaaagctgccagagattcttatcgtctggataaagctctttatgagcctttaaatgtgtctattgccagttctttcaactgcattgaaacctttaaaagagaaatcaaagtcattgacaatgctatcgaaaaggaaatcaaaggtttgaacccaaatgcctttattattcttcaatctattgatggcatcggtcctgtctttgctggtggcataattgctgaaataggcgatataaccgcttttcattcatctgatgctcttgccaagtatgccggtctcacatggaaatccaaccagtccggtgatttctacggagaagatactcccatgataaaagccggtaatcgttatctgcgatactatcttggcgaagccgccaacagtatgagaaaacacaacgttgagtacggagcgtactatcggaagaagtacaatgaagttccgaaacatcaacacaaaagagcactcgcgctgacttcacgtaaattcgttcgtttggtttatggattgctggccagaaaccaactgtactccggcgtatcgctggatacatcaattaaagattctaactagtcgaacctatgttttgcttgaatcataggtctattaaagttacccttttttctgaaatacatatcaaaattatttcaaaaattagcttgacatatcaccagat

SEQ ID NO: 8461 - DNA, 1122 bp, unidentified
  source 1..1122: mol_type = unassigned DNA; note = element_d4133d3
  misc_feature 1..2: note = core
  misc_feature 3..156: note = LE
  misc_feature 157..1107: note = CDS
  misc_feature 1108..1122: note = RE
  misc_feature 12..154: note = bridgeRNA
cttgtatcttggagttgtggtacatgagacggatggagcgtgacagatcgatacgcctccggtccgaagagaccgtggccgagctaggtcgtcacgttcctcccccccaccgaagcccgcatcatcacaaggtcgggctacaccaaggaggcggcgatgcagaccccattggtttttgttgggattgatgtctcgaaagtccggctggacgtagccgtccggccgtccggcgagcagaatagtatgacgtatgacgccaccgggatcacgaccctgatcgcacagctgacccaggggcagccgatacggattgtcgtggaggcgacgggcggcttggagcgcccgctgttgcgtgcgctggtcgccgctgccttgcccgtgatcgtggtgaatccgcgccaagttcgggactttgccaaggcgacggggcagttggccaagacggacacgctcgatgcccaggtgttggcccgctttgcggaggtcatccagccggccctgcgcgtgatccccgatgcccagacgcaggagttggcggctctgctggcgcggcgtcgccaagtgctggcgatgcagggagccgaacagcatcgcctgaatcgcgcccccgatcgagtgcggaagcggattgaggctcacctgcgctggttgcgcgccgaacgggtccggctcgatgaggacctggatgatctgatccagcagagtccggtgtggcgtgcgcgggaagggctgctgcagagtgtgcctggtgttgggccggtgatgagccgcaccgtattggccgaactgccggagttgggccggctcaatcgcgagcagattgtggccttggtgggcgtggctccgttcaatcgcgacagtgggcggctgcggggacaccggaccatctggggcggtcgagcgcccgttcgccgagcgctgtacatggctgcgttggtcgccacgcggtggaatcccgtgatccatcgcttctaccaacgcttgcgtgcggccggcaaagccccgaaggttgcgctcgtggccgccatgcgtaagctgctgacgatgctcaatgggatggtgcatgcggggactccctggcagccggtcgtggcacgggaagcgtaatcgtcaagacagttg

SEQ ID NO: 8462 - DNA, 1185 bp, unidentified
  source 1..1185: mol_type = unassigned DNA; note = element_d416370
  misc_feature 1: note = core
  misc_feature 2..139: note = LE
  misc_feature 140..904: note = CDS
  misc_feature 905..1185: note = RE
  misc_feature 924..1183: note = bridgeRNA
atggtatggacgcctcccacctcagataagtgatggcgggtccgcaaggaatacagaaatgaaggggggcctcgcaatcaacggcatcaatgtgccaaagtggagtttctaatcaaccacttaaagacggaggccccaaatgaatattacgacatttggcttggatatagcgaaaaacgtgatgcaagtgcactgggtcgatgagcaaacgggtgaagttgggcggcgggcgctgaagcgcgcgcagctggcgccgttttttgcccgtcagccacagtgccggatcgtgctcgaagcctgcggcagcggccattactgggggcgcacgctatcggcgctgggccatgaggtgcggctgatccatgcgcggcacgtgcgcccttttgtgcgcggcaacaagaacgatgccgctgatgcgcaagcgatctggagtgcggcgcagcagccggacatgcgctgggtgccgttaaagagcgagcagcagcaggccgtgctgtccttgcaccgggtgcgccagatccccggagtcggactgctgggggccacggtcttggcggcggtgctgggcgaggatgcccagggctaccgcaacgcgagggagtttgcagcctgcctggggctggtgccttgccaccggggcaccggtggcaaggtcgccatagggcacttgagcaagcgcggtgatccgtacctgcgcacactgctcatgcacggggcgcgtgcggtgatcttccatgcgaagaccaagagcgcgtggctgcaacaactaccggcgcgtcggccgctgaatgtggtggtggcggcgctggccaacaagatggcacgcacggcctgggcgctggtggcccatggacgtgagtatcaggcgggcggattcgccaaggcgagttcacccaatacataactatccacttcaaggaggggatgccgcaaagagtgcgtaactcgaatcgatgaaatgatggcaaacgcggtcggtccgcgggtcggtcaagctgaatttgtgtccgggacaggcgcaagccaagtccgccaaggagatgagctccgaccctgcacatacccatcagggccagcagctggtttatccggaactgcgcaaacaggccggatataagactgcaaccgttctcgcctagccacacatttcaaaaattcgattgccacacgggaggcgtccatata

SEQ ID NO: 8463 - DNA, 1587 bp, unidentified
  source 1..1587: mol_type = unassigned DNA; note = element_d41b4cf
  misc_feature 1..3: note = core
  misc_feature 4..271: note = LE
  misc_feature 272..1450: note = CDS
  misc_feature 1451..1587: note = RE
cttatattattattcgtaggtagctcctacatgctctgagtatatttcttatacttagactatgattgatacgccgtgaattagtttcttacccccaacagcactatctgatagtgactggttctgaaaggctctaatcacggctttttgtcacattggtaattagtttgataacgctttgacgttttatttcgtgtaaggttacattctcaatttgtccgtgttgatcatggcgtgtcattcgcatcttatcttataggaggaactttttatgattttcgttgggattgatgtggccaaatcacatcatgatattgctatgattgatgattctggtacaatcattcttcaacacctaaaaatccaaaataacttttctggatttgcaacacttcaatcaaagttgaatgaacttgccattgatcaatcaatttacattgccatggaagccactggacattatagtttaaatattttgatgttcttacagtctcttggttatccaactattgcttataatccttttttaattaaagaattcattaaagccacgtcgctgcgtaaaacgaaaactgatcgcgcagacgccatctccattgccaaaaaattagctagtgatactgctcctgaagtgtttaccatctctaaagaaatgcaagaacttaaatttctttctcgtcatcgtaatcgtttaactgctagaagagccgaactcaaaggacaatacgttcgtttgttagatatttcctttcctgaactcgtctccattattggaaaaaataatttacatgctcactatgtctctgatttactaatcaaatatccgtcacacactaaattagctcgttgtaaaattacctcactcatcaatatcattcatatcaaacatggtaatcaatttgaatatgctcaaaaaattaaaacgttagccaagcattctataggcctagaatcaaaagccaatgaattagagttgatacaaactattaatatgattcaacttttatcaacacaaattctggaagtagatcaagaaattaatcgtttaatgattacgatggaggacgcccatattattacttccatcgccggtatttctaatcgtcttggtagtgttattttggctgaaatcaataatattcataattttaaatccgccgagcaattattagcttttgctggtttagaaccatctatttaccaatccggtcaggtcaatgctacaggaaaaatggttaaacgaggttcagctgcgttgcgttgggctttaattcaagcagccgaatatgccacacgttggtcaccgactatgcgcgcatacttgcataaaaagagagatgaaggaaaacattattttgtagcaatatcacacgttgctaaaaagcttgtccgaattatttttcatctgctcactaatcatttaacctacaacgagtcgaagttgctataatccgtttcctgcttaaaacataatcatgtcaattattgcgacgtttcaaatcaattaatatggaacgtttatttgtcatggcatcacaaattttaatactagttatctaccgttacttgacttttatgatagtttgt

SEQ ID NO: 8464 - DNA, 1693 bp, unidentified
  source 1..1693: mol_type = unassigned DNA; note = element_d422812
  misc_feature 1..4: note = core
  misc_feature 5..387: note = LE
  misc_feature 388..1554: note = CDS
  misc_feature 1555..1693: note = RE
tcacgtataatcaatcttaaggaattattaatcctttagattgatttttcctttctcatatctttattacttatttatgattttatatatttgatttataaatcaaatatataaaatcgcggcttcgtcgatatgtaacgaagtactcttattattataattttatgttataataatctctgcactgtggatttgtcgtttcatttttacagccatttatttggactggttcgaggtgactcaaaccacaaatttttaatttaattgttaattagttagttaacacgttagtttttactaatcgatgttttattagattacgtgattacataattagaaaccttgtggcaaacattcagtgcaaaaaaaacaattaaggaggtgcttatgatgatatattatattggaattgatatatcaaagtacaaacacgatttctgtattatttcaaatacaggtgaagtaattgttgaaaatttattttttgaaaacaacaaaaaaggatttcaagaactattggaaaagttgaaaccctataataaatctgatgtccatattgcttttgaagcaacaggacattattctaagaatttggaactgtttttaattgatcaaggctattcatttatgaaaatgaatcctcttgtcattcatcagtttttaaaagctcgaagcttacgtagaaccaagacagataaagccgatagtttggctatagctaattatctaatgtcagttccatacaaaccaaattcagatttattatacaacatttttacattaaagtcactatgtagagcaagagaacaattaattaaggaaagaagtaagtatcaagtattattaacaaatcagctagatcttacttttcctgaattaaagcagttattaaataatagaatttcagcaacactattatttattttagaaaaatatactaacaccaatcatatatctttaatgagagattatgattcgataaagaatatttctcgtggtaaatttagttatgcaaaatttgctaaacttaaagaacttgctaaaaactctataggtcatcatgatgaaaataatgatttacttatttctacatatgtttctatcattaagactttaaatgataaaattgatccaatagagaaacaaatttcaacaattatcaaagaactaaatcctagaatgttaaccattcctggattaggtgaaatatctgcggcaacaatattagctgaatatggagatattaataatttttcttctcctaataagatgttagcatttgctggacttgagccgagtataattcaatctggtaccattgaaaacaatggtaagatggttaaacatggttctggtcatcttagatattcaattatgaatgctgcgatgattatattaagatattcaccaacattttatgattattaccttaaaaaacgttccgaaggtaaatgtcatagagttgcactatcccatgtgtgcaaaaaactattaagagtgatttatacactagagaaaaacaacattgattttgattcatctttattaaagtaatattctttactatgttatttttctttaccttcaaaaattttaaaaaatgtcatttttgaaggcttttggcgtgggataaattccaatttataacaaactatcaaaaatttcaattttactattgacttttaatagttag

SEQ ID NO: 8465 - DNA, 1408 bp, unidentified
  source 1..1408: mol_type = unassigned DNA; note = element_d42bf61
  misc_feature 1..2: note = core
  misc_feature 3..206: note = LE
  misc_feature 207..1397: note = CDS
  misc_feature 1398..1408: note = RE
  misc_feature 3..193: note = bridgeRNA
gaggccataacaatggggtggtggtccaaaggggccgggtgtggcttatgtgaagctgccgttgatggcttgagaggcaaggccgcccgccccctggacgcttcggccactgattgagagctgcggatcatcgctgtttatggcttcgtcggcggggcgttccttggaccacagaggcatagcctgacgtgggaaggaaccccctgttgagagtccagcgagtctgggtcggagtcgatgtcgccaaggcccaccactgggcggtggccgtcgaccacgagggtcggcgactgctgtcccgaaaggtcgccaacgacgaagaagcgatcctggccatgatcgccgcagcttgcgaatgggccggcgaggtccggtgggcggtcgacatctcaagtcggttgtcggcgctgctcttggccctgctggtgagccatggccagcaggtggtgtacgtgcccggccggacggtgaaccgcatggcaggggcgttcgcgggcgagggcaagaccgacgccaaagacgcccaggtcatcgccgacgtcgcccggatgcggtccgggttccggctgatcacgacctcgccagagacgattcacgagctcgcactcctcacctcctgccgtcgcgacctggccagccatcgggtccgcatgatcaaccgtctccgtgaactgctggtcggcatctgcccggccctggaacgcgaattcgagtacaagtcccggaccggcctggtgctgttgaccggcttccagacgcctgccgcgttgcgccgcatcggggtgaagcggctgaccgactggttggtgcgccgcaaggtacgctccgcggccgatatcgccgaacgcgcggtcatggccggtcgtgcgcagcagacgatcctgcccggcgaggctcgggccgccaggctcgtcgcggacctcgcccagcagatcctcgacctggacgaacgcgtcaagcagctcgacgcggagatcactgaggtcctcgctggagacgagaccgccgagatcatccagtcgttgccgggcatgggaccacttctgaccgccgagttcatcgcgcggaccggggacctgtcgagctatcgcaacgcagggcacctcgcggcccacgccgggatcgcccccgtgcccaacgactcggggcggcggctcaacaacctgcaccgccccgctcactacgaccgacgtctgtgcaggatcttctacctatcagcccagacggccatgtccagacccggcccctcacaggagtactaccgcaggaaacgagacgaagggaaatcccacgtccaggccgttctcagcctcgcacgccgccgagtcgatgtcctctgggccatgtcgagagaccgccgccgctacacagcagtcccaccgacagtggccgcttgacaggacattga

SEQ ID NO: 8466 - DNA, 1529 bp, unidentified
  source 1..1529: mol_type = unassigned DNA; note = element_d451c4c
  misc_feature 1..3: note = core
  misc_feature 4..267: note = LE
  misc_feature 268..1431: note = CDS
  misc_feature 1432..1529: note = RE
  misc_feature 4..251: note = bridgeRNA
tcttgtatgatgttttatgtcctgagggacataatctcatactctcctttcagcccttataatgaaattgacctgtgaaagtattgatacaccttacagcttagtttctgaccaagactgttcaaaggagactatactccactgtctgttccattgttgataggttggatgttccgatacgacgagtattgagttcttatgtcacgcaaggatacagggacagatcatctgtggagacctcaggtctagaaaggtggtctgttttttatgaccgtttacgttggcgtcgatatcgccaaagaacttcattacgctgccatcatggatgatgatggtgtcgtatccaatccattttctttcgagaataatgacaagggcttccagtcattgctctcacatcttgctcctttcaagaaggagtctgtcctggtgggctatgagtccactgcccattaccaggagaatcttgcctatttcctgaagcaggagggctatcgaactgcagaactgaaccctctgcagacctctgctctaagaaaggccaatatacggaacactaagactgatagtgttgacgccaaactgatatgcctcgcactggcacagcacaatgtcactgccaatgagagggatgcttcatgcatggacgatctttacagcctgtgcaggatgcgcatggatcttgttaccaaacgttctcaatgtaagatccagctcgttgccatcatggaccgcatcttcccagagcttgccaagttctttaaaggcaacctgcacatcaatactgcttatcgcctgatagagagatatccgcttccttctcagataaagaaaacccgaattgatgtgctcacgagtctcttccgaaaagcttccaaaggccactatcgcagagacaatgctgctgcactgaagaaacttgcggccgtatcagtaggtattccttctgatgtgttcgccttccaggctcagcagctggtccatcaaatcgagttctattcagatcagattgccgctgtagatcagaagatcgattctgatccgatcgtcaccagctcgctgctcatgacgatccctggcataagttcttatgcctgtgcgtgcattctgtctgtcataaagaatattaacgattttgatgagccttgtaaaatacttgcctatgctggactggatccagtcatccgccagtctggcaaattcaatgccaggagcacacgcatgtccaagcgtggaaacagccttctccgctattcgctggtctggacagctggaaatgttgttctgaacaatgcgacatttgcggcttactacgccaagaagacatcggaaggaaagagccattaccaggcccttggacattgtgccaagaaactggtgaattcaatcttccacattttgaaatacaacgaagcttttaatcttgcctgatctataattcaaaatcacttccttcacggagatgtttttgtcatgccttggtcatcaatcaaattttgtttgatttgtccttgacacttcatagttgg

SEQ ID NO: 8467 - DNA, 1441 bp, unidentified
  source 1..1441: mol_type = unassigned DNA; note = element_d451d30
  misc_feature 1: note = core
  misc_feature 2..227: note = LE
  misc_feature 228..1427: note = CDS
  misc_feature 1428..1441: note = RE
  misc_feature 12..242: note = bridgeRNA
ctactagacgattcacgtaggaccggcgtccggccagactcggtccaggtgatcggcgggcagctctccatgcggctgcccaccagcgtcgtcggtgtggctcactatcggtctgcgtcccgtcggtcaccgtgacgaggcgtggctcaagaagggactgccctgctcgtagtagcactgcccacctcgccgtccacatcggaacgagtgcaggcaggagcaagcacatggatcacgttgtgatcggggtcgatccccacaagctctccgcgacgatcgaggtcgtcgacgagaaggaacgccggctcggccagggtcggttcacgaccgacaaggccggctacgcggcgatgctgaagtacgccaaggcctggccggaccgggtgtgggcggtcgagggcgccaacggtgtcgggcgtccgctggcgcagcgactgctggcatccggcgagcaggtcgtggacgtcccggcgaagctggctgctcgggtccggctctttgacaccggccacaaccgcaagaccgacgcccacgacgcacactcgatcgcgatggtggccgtgcgcaccacgggcctgcgggtgctggcgatggacggtgagctcgaggcgttacggatgctggtcgagcgccgtgaggcactgagccgccgacgcgtccagaccgtcgaccggttgcaggccctgttggccgaactccttccaggacaggcgaagaaggacctcaccaccggtcaggccaagcgaatgctcgcctgcgtgcggccccgcgacatcgcaggcaggacccgtcggcggatcgcggtcgaggagctcgccgagctggtcgcggtcgaggcgaagatgaagaaggccaccgccgagctgaagaccatcgtgctgtcccggggttcgcacctgatggacctgcacggtgtcggaccggtggtcgccgcccggatcctggccgacgtcggggacgtctcccggttcgccgaccgcaaccggttcgcgtcctggaccggcaccgcaccgttggacgcgtcctccggtgaacggagccggcaccggctctcccgggccgggaaccgtcgggtcaaccacatgatccacatcgcggcgatcagccagatccggctcgacaccgatggccgggcctactaccggcgtaagcgcgccgagggcaaacggcccctggaggcgatccggtgcctgaagcgcaggatctccgacgccatttatcgacagcttgtcgacgatgcccacgttgccgcggtcgagggcgcaaacgcgggcccgggagggcactgcggggcgtctcttgcatccagcgcggccggcttaaacccgcacaccggcgcttcggatcagccacttcccggacccgcaccaacgacgctacgcccagccatcgagacgcggaagtcccacctcgaagcaaccggttgacaacagaagggagc

SEQ ID NO: 8468 - DNA, 1631 bp, unidentified
  source 1..1631: mol_type = unassigned DNA; note = element_d461da6
  misc_feature 1..2: note = core
  misc_feature 3..119: note = LE
  misc_feature 120..1154: note = CDS
  misc_feature 1155..1631: note = RE
  misc_feature 1375..1581: note = bridgeRNA
agatggggtatcggggctggtcgccgcggttagcggaccgttaggtggctgcgcttcagactgatggtgaaacgaggtccgcatgaggcggcctcaagcatcagaggagaagcgcagccatgcaatactatgccggattggacgtctcagtgaaagagaccagcgtgtgcatcgtcgacaaggcaggcaaggtggtcggcgaagtcaaggtcgcaacccagccggcggcgatcctcgcggccctgacgcaggacgcgcttgcggttgagcgcattggccttgaggcggggccgttgtcgcagtggctgtaccgcgccttagcggaagcgggtttgccggtgatctgtgttgagacccggcacatgaaggcagcgctgtcggcgcagatcaacaagagcgaccgcaatgatgcgcgcggcattgcccagatgatgcgtgttggcctgtaccgaccggtgcatgtgaagacgctggccagccagaagcagcgcatgctgttgaccagccgccggcttttgcagtgcaaagcgctcgacatcgagaacgacctgcgtggcacgctgcgcaatttcggcctcaagctgggcatggtgggcgcggtcaaattggaggatcgcgttcgtgagctgctggcggaccatgcggatttggctgtgatcgtcgaaccattgctgattgcccgcagggtcctgcgtgagcagctcggcgtgcttcaccggcaactgcttgagatcgtgcgccatgatgaggtctgtcgcaggctgatgaccacgcctggggtcggaccggtggtcgcgctgacctttcgcgccacggtcgatgtgcccacccggttcacccactcgaaggcggtgggcgccgcctttggcctgacgccgcgccggcagcagtcgggcgagatcgaccggatggggcgcatctcgaaatgcggagacggcttgatgcgcgagacgttgtttgaggcggccctggtgctgatgacccacagccgcaagtggtcatggctcaaggcctggggcatgaagattgcccgccatcgtgggatgaagcgcgcgatcgtggctgtggcgcgacgcctggcggtcatcatgcatcgcatgtgggtagatggcagcgagtttcgctggagcggtaaagaagctgctgcggcgtgagcgtgagggtcagatggtgtgcatcgcgaccgcacggatgatcgctcggtcggcgcgttcgccgtcaagccccgcgcctatggcgcgccgcaatgcggctttggggcttgactgctcagcgcgaccgagcagacaagagcggccgtgccgtcgatgcacacttgtgacgttcaccatctcgcatcgcattaggcgcaatagaacacgataggagaaaacctgagttccgctgatcggtggaagcgatgtccccgcagggacgatggatgaggtgagtccgtttcgaatcctgctcctgccgcacgtcttgcggcaagcacgcctcgagagattggtccgccgcatcctcctgatcccatcatgggagggccacagtgccgatcccgaagagaagcgagtgaccctgcgagggacatcgaacccagcaatcgccggagcagtctgaaagtgcttgacaccaacccgccccgatagaga

SEQ ID NO: 8469 - DNA, 1394 bp, unidentified
  source 1..1394: mol_type = unassigned DNA; note = element_d4644ea
  misc_feature 1..2: note = core
  misc_feature 3..200: note = LE
  misc_feature 201..1127: note = CDS
  misc_feature 1128..1394: note = RE
  misc_feature 1131..1381: note = bridgeRNA
tgatggtgtggacggccccctacggcattagtgtgccagaatgaggttgtcagaaactcattcgcaggagccgtccgtgaaccagattatccgcattgggatggatacgtcgaagtatatttttcagctgcatggcgttgatgcctcggagcaggtcgtgctgcgcaagcggcttggccgcaaggcgatgctggagttttttgccaaagctgccgccgacggtggtggtgatcgaggcgtgcggggcggctcacgtcctggcgcgagagctgggcaagctgggacacacagccaagctgatcgcgccgcaactggtgaaaccctacgtaacgcgcaacaagaacgacgggcgcgatgcggaggggctgtgcgaggcggcgagccggccgcggatgcgctatgtcccggtgaagactgccgagcaacaggcggccctgatgctgctgggcctccgcgaacaactggtcgtgcggcgtacgcaactttccaacatgatccgcggctatgcggccgagttcggtctgatcgaggccaaggggctggacaagctcatctcgtttctggccgcaatcaagcacgatgaaagcgtgccgacgctggcccgcgagctgtttgcgacgcttgcccgccaatatgaccaggtgcaggtcgagctgaaggcgctggaggcgaagcttctggcctggcatcgtgccaatgccttgagccgtcgtttggctcagatccccgggatcggtccggtcaccgccgcagcgctggtgatgaaggcgcccgatcctcacgccttccgctcggggcggctgtttgccgcctggctcggcctgaccccaaaggaccattccaccgcgggaaagaccaggctcggcaagataacccgtgcaggcgatgagaccttgcgtcagctgctggtggttggggcgacctcagtggtcaagatagccaaatcgaaagctcgtgggccgagctggctgatcgagcttttgaagcgcaaaacaccgaagctggcggcagtggcgttggccaacaaaatggcgcgcatcgcctggaagctgatgacgacgggagagcaatacgagagcacgcggcttgaggtgcgaaccgaggcccaaatggccgctgccgtgtgatcgagagattcggccgaccggcggggtagccccaccggccgaaccggagctgcaagagcagaggagatcgtgcgatcgatcgttcgagatgcgagtaaatccgtgggacccattggccgaacaaggtcgcgtgggtgattggaactcgtgtcgcgaaaaccatcttggctagcggtctaacaagccgcatcaacaggccggacatatggatgcaagcgatccgatcaaacctcacaaagctcttgtgccacgggggccgtccacata

SEQ ID NO: 8470 - DNA, 1362 bp, unidentified
  source 1..1362: mol_type = unassigned DNA; note = element_d468f00
  misc_feature 1..2: note = core
  misc_feature 3..70: note = LE
  misc_feature 71..1105: note = CDS
  misc_feature 1106..1362: note = RE
  misc_feature 1078..1350: note = bridgeRNA
tgatggggtggacgccccccgatggcatcgatgcactatagttgtcgaacgctagacgagggagatttttatgtcagaggttaccacgatcggtctcgatatcgccaagtccgtgttccatgcgcacggcgccgacgaacacggccagacagtcttcagccgtaagattgcccggaccaagctgctaggttttttcgcgaaattgcccgtgtgcctggttgcgctggaggcatgtggtggcgcccatcattgggcacgtgagctgatgcgcctcgggcatgatgttcgcctgattccgcctgcctatgtcaaaccgttcgtgaagcggcagaagaatgacgctgccgatgcggaagcgatctgcgaggcggcgcgtcgaccgaacatgcgcttcgtcgccgtgaagagcgaagagcagcaggccgccgggctcgcgttccgcacgcgcgatctgctggtccggcaacggacccaactggccaacgcgcttcgcggccatttgacggagtttggttgggttgcgccgcgcggcttggcgcatgcgacgaagctggcggcgctgctcaaggaggaagagatggcatcgtcgctaccgaccgccgcccgaaaaatgctcagggtgatgatccagatgctcgcgaagctagaagaccggatcagctacctcgacagggaggttgctcggcgtgctcgcgaggatgaagtcgttcgccgcctgatgacgataccgggcatcgggccgatcacggccacggcgatcgtcgcactcgcgccgccggccgaaaccttccgcaaaggtcgcgacttcgcagcatggcttggtcttacgccaaagcagctatccagtggtggaaaacaaaagctcggccggatatcgaaaatgggcgaacgtacgatacgtcggctgttgatcatcggcggcagttcgctcgtgcgaaaagcgacacggcatggcgcaccagccggctcttggctcgagcgtatgctcatgcggaagccgcgcatgcttgtgtcggtggcgcttgccaacaagaccgcgcgtatcgcctgggcgttgatgaccaggcaagaagcttacaaggctccggtcaccgcgacggcgtaagcccgagcaactgaccagaggtcgtcggaggcgtagtcggtcgaaggagagtatggcacaacagtcggcgagacgggatcggaagaaccagagacagaccaagcgctatccaagcgcgaataactgatgtggatccgatcagcgaactcccatacgggccccagccaaaaggctgatttacgaggccggacagatggcagcatccgactacgtgtcacacgatatcgacccattgcgcctgtaggggcgtccacaga

SEQ ID NO: 8471 - DNA, 1400 bp, unidentified
  source 1..1400: mol_type = unassigned DNA; note = element_d46f21b
  misc_feature 1..2: note = core
  misc_feature 3..211: note = LE
  misc_feature 212..1195: note = CDS
  misc_feature 1196..1400: note = RE
  misc_feature 41..217: note = bridgeRNA
cttgtattagcgggctggtttatcctgagatcgttccatgaggaatggcccagcccgggcggccgcccaggctgggccgccgattgatcggatcgatgcccaccgaagccgcaagggctgtcttccgtagcaagatcgcgatcggcacttcaccgggacccgcatggttgaaggaactaagggttcgcatcacaagggagggtcgatgaagatggccaagcgtaccacgatctgtgccgggatcgataccggcaaacggaagctcgatgtggcgctcgacggcagctcggagcagctgcagatcgacaatgcgcctgagggttacaaggtgttgttggattggctgcgatgccatcgggtcaaacgcatcgggattgaggcgagtggcggctatgagcaggccgttgtcgccgaactgcggcgcaagagggttgtcgtggtggtgttccagccggcgcaagtgcgcgcctatgccaggttccaccttcagcgagccaagaacgacaagatcgatgctgctctgatcgcggcctgcaccgccgcggtcaagaagatccaccctccgccggatgcgcgactgctgccgtttgccgagcatctgacaatgatcgatcagatcggcgaggatatcgcgctgctcaagaaccggctcgagacctgccgcaacccgcgtattcagcaggtctggaaggaagatctcgcccgcctcgccaagcgtgagaggatcgagttcaaggccctggtggcggcgatccgcgagcatcgcgatctcgccgagcggctcgatctgatctacagcgtctcaggcgccgggctgccgaccgcagtcgccatcctggtgcgcatgcccgagatcggccagctcacccgtgagcaagccgccgcactcgccgggctcgctccctatgacgacgacagcggtaagcatgttggcgtccgtcacatcgacggcgggcgcgaacggctgcgccgcgcgctttataccgcggccctgccggcatccttccgctggaatccgcagctcattaccctttacaaacggctgatcgccgccggaaaggggcacaagcgcgcgctcatcgcctgtgccagaaagctgcttattttcgtcaacgccgtcgtggcacgcgggatcccgtgggaccatgagcgtccgccgaccgttgcagcgaccgcgctcccgcaaaccggctgatcccggacgtttctttgttcgaccagacaccgtttcttcgtcccgacctgccgtcacaacgacgtcgcgcgcagacgccgtcaaggatggtcgtcgctccgatcacccaccgcattccgctgttgccagaccacgccttgacggcggcgagcacggcgtcattctgccaattgtcggggccgataagcccccaatctaatggttg

SEQ ID NO: 8472 - DNA, 1389 bp, unidentified
  source 1..1389: mol_type = unassigned DNA; note = element_d46f78a
  misc_feature 1: note = core
  misc_feature 2..88: note = LE
  misc_feature 89..1129: note = CDS
  misc_feature 1130..1389: note = RE
  misc_feature 1153..1387: note = bridgeRNA
taatggaatggtccgccccactcccaatacggcttcgaatgagccatgatgtgtgtgcgaacagacatcaaaaagagtggagcagaccatgagtaatcataccctaaaaaatgacgtggcggtgttaggcattgacctggcaaagcaaagcttccagcttcacggcgtggataccggtggaaaaactgtattgaaaaagaggttatccaggaaagatctttacagctttatcgctcaactcccagcttgcaccattggcatagaggcctgtggtggcgcaaaccactgggttcgggtatttgagaaattcggccacactgtgcatatgattgccccacaatttgtaaagccttatgtgaagtccaataaaaatgatgctgccgatgccgaagcaatatgtgaggcggtgcagaggccgtcgatgcgttttgtgcctgcgaaaagtcttgagcagcaagacatccaaagcttgcaccgcatcaggagccaagctgttgctcgacgaaccgcgcaagccaaccagatccgcggcttactgatggagtacggccttatcattccgcaggggattgcttacgttagaaagtcgataccgctgatactagaagatgccgataatgaattaaccgttatgtttcgagagcttctggccaatctctacgatgaaatggttcatctggatgcgcggattaaaaccctagaaatcaagcttgaatcgctctgtgtccagaatgaagactgccaacgtcttttgggtattccgggtgtggggctgcttagcgcaacggcgatggtggcatccatcggcgacattagcgtctttaaaaatggtcgggaattagcggcctggctggggttagtgcctcggcagcactccactggaggcaagcccacgttactaggtattagtaagcgcggagacacttatttacgaacgctgctcatacacggcggacgcacagtggttagagtggcaaacaagcatgaagataagcgtagtacatgggtgacgcagctagaagggcggcgaggcaaaaacatatcagccgttgcggtcgccaacaaaaatgcacgagtggcctgggcattacttagcaagaaatctacatatcaggccagcgcagcatagtgcaaagaatttaacagcaagctgttatcaacgagttgcgtagatacagttcaagtgatggcaaaaaaggtaatacctgtctatcagtaagtctgctggggtctcgggctcattagaagccgaagacttgatgagacagataggcgcgaattccatcagggccagaggtttaaataacctcatccaaaggccggatatatggaagcaacctttttacgattacgagacattttatcttgcaatacggggcggaccatata

SEQ ID NO: 8473 - DNA, 1588 bp, unidentified
  source 1..1588: mol_type = unassigned DNA; note = element_d4773fc
  misc_feature 1..3: note = core
  misc_feature 4..516: note = LE
  misc_feature 517..1362: note = CDS
  misc_feature 1363..1588: note = RE
  misc_feature 27..285: note = bridgeRNA
tttggtacaaaataagcatagcacccgaagcggatatgaagcctcggagactatgcttatttttgttataatgggaggcaatggatggacggtttctttggtgagccaagcgctcgagctgtaaacagtcctccgccctcttgttataaagattcgattgagcaggttgctccggctatgccgcgtgcgcgtcacgaaccaaattgaatcgtaataagccggtgcggaagcattgcaatattttatcaggaaggaaggaatgcccatgctcagtatcgggatcgatgtgtccaaaggaaaaagtaccgtgtgcggaatgaagccagggggagagatcgtgtacgctccgtttgaagttcagcacacgagggaaggaatgttggagcttgtatcgctgctgcgcagcagcggcgaagaggttcgtgccgttttggaagcaccggcagctaccattgcccggtggtggctgctttgttggagaacggaatattcgtctccgtcgtcaattcgctgcggatgaagcggttttgctcacaaagtatccgcaaggtgaagaccgaccgaatcgacgctatgcagatcgctttgtacggtctggcctattggcaagagcttcaaccggccagactgccggaggatacatatcgggagcttcagcttctggcgcggcagtattaccagatgacctcccttctgatcaaggcgaaggtcgattttaacgccctctgtgaccaggttttgcccggtatgcaggagctcatgagcgaccatgccgggcggcacaagctttcggactttgtcctgcggtattgtcacaccactcacatcctcgaaatgggagaaacgcgcttccggaaggattattgcaaatgggcggaaaaaaagggataccgcaattgcgaacgtatggcagcactcatctttgccacagctcaaaacggtatccctgtgcttcccaatgcaccatccacgcagatcgtcattacggaagcgatacgagtcctccacacagtggaggcgtcccgtgacgctattttaacacagatgcaagctctcgccaagactctgccggaatattctctcgtgcgcgaaatgccctgcatcggggacacgctggctccgcgcctgattgcggagatcggagatgtccgacgctttcacagcaagcgggctctcatcgcatacgccggcatcgatgcgccgccgtaccagtccggcaaattccgcgcgaataaccggcatatttccaagcggggaaatcgctatctgcgtaagaccgggtacgaagtcatgcagagctatgtgatgcacaaaccggcaaacgatccgatttttacgttcattgagaaaaaaacgcagtgaaggaaaatgcggtaaacttgctatggtggcaggcctgaataagttcctccgagtctattatggcaaggtcacagagctctaccgcagcttgccggcaatagaatgagctgagatctccaacactttatttgaggcggccaagcgatccgctttgccgcctctgctttgctatactcttttcctgccgataacttttctttgaattaggacttgactttttagcagg

SEQ ID NO: 8474 - DNA, 1428 bp, unidentified
  source 1..1428: mol_type = unassigned DNA; note = element_d4843b4
  misc_feature 1..2: note = core
  misc_feature 3..96: note = LE
  misc_feature 97..1143: note = CDS
  misc_feature 1144..1428: note = RE
  misc_feature 1196..1423: note = bridgeRNA
taatgagatggactccaccctcccgacgacggcatcatagtgtgccaagcgtgccagatcggctggcaggcgagaatcaaagaggaggagtccaagatgaatgctaccgcaaaagtaatcggtttggatattgccaagaacgtgtttgttgctgcgggccgtgatgcgcatgggaaagtggttttgaagcgcacgctctcgcgtggcgacgtactgagcaccttcgccaatatgccggcgaccacgattggcattgaaagctgtgccggttcgcactattgggcacgcaaattgatcgagctggggcatgatgtgaagctgattgctgcacaacatacccgtgcctacgtcactggcaacaagaatgacggcaacgatgcggcagcgatcgccgaagcaagatcgagggcgtcgacaaagtacgtgccgatcaatagcgaagcacagcaggatttgcaaatgatgcaccgtgccagacgtgcactgatggtcgaacgcaacgccatgatttatcgtattcgtgcctttgcgggagaatacggccaagtatttccggtcggcgttgcgaggttccgcgctgcgtttgccgcatggatagccgatgcacggaatggtttgtccggctctgccatcagcaccttcggagatttgacggcccagttggacgacaaggaagcgcgcattgccacgtatgaccagcggctcttgcaagccgccaagtcagatgaacgcgccaagcgcttgcaggaagtaccagggattgggccgctcacggccaccgccgtcattgccagcgtcgccgacgcacaccactttggcagtggccgcgattttgctgctaatctgggcttggttccgcgtgagcatagtagtggaggcaagcagcgtctgtatggcattaccaagcgcggtgatgtttacttacgcaccttgctcattcacggcgcacgtagtgccctgcgctgcgccggtgagaagccggatcgattgctgcgctgggccgtcaagctcgctgaaaagcgtgggatgaatgtagcggcagtggcgctagccaacaagcttgcccgagtaatctgggcattgctggcacatggcagggagtatgttccggcttggtcaaaaagcatgaccaaaccggcttgaagaaaaaattgtagatagtcgatgcaccgatcaacaagattcggagggtagccccaccaaggttgcgtaggtgaaaaaaactgatgccaacaggtcggaccggcatcgggtgaatccgtagactagtatggcccttgaggccgtcaccctatccggatcccgatgcgcgtattgcattatggccagagcaataaatcgctcaacttttaggccgcatagatacttgcaatctcttccttatggcaaaggttcattttttccttgcaattgggtggagtccataga

SEQ ID NO: 8475 - DNA, 1377 bp, unidentified
  source 1..1377: mol_type = unassigned DNA; note = element_d485c6e
  misc_feature 1..2: note = core
  misc_feature 3..252: note = LE
  misc_feature 253..1302: note = CDS
  misc_feature 1303..1377: note = RE
ctcctatgtttgtaaaagaagttaaaccaaatataaatttagtaataataaagtgaaaaaagtgagagtacgcacgcaactaaataactctagaagtatattgttggttagaaatcacctcactttttttatatcttttagagtttgaacagaatgtaaggaataattataaatagttatatccagaatatccaactaggagaaaaaacgaggaaagatactcactttatatgctattaaaaatcatgtaaaatgaaacaaatcttaaaacaagttttgggtgttgacgtagctcaaaaagaattagtcgtaactctaggaaaaatgtataatgatttcacgttagatctttatgcttacaaagtctttaaaaataataaaacaggttttgctgccttacttaaatggctaaagccaattatagataaagatataaaactacagtttgtaatggaagcaacaggtgtatatcatcaaaaatttgcctattatttagatgaaaaaggatgcaatttaacgattgtattacccaacaagattagtaattatatgagaactctagaggtaagaaccattaccgacaaaacagcctcacaagccatttgtcaatttggtttagaacgaaaattagagtgttggataaaaccaaaaaaagtgtacaaagagctacagcagcttacaagagaacgcagccaaatagtagatcaacgcgtaattgttaagaaccaactgcatgcagaaaacactgaagcagaacctaataaaagtagtttaaagcgaataaaagcaagaattaaattccttaatcaacaagaaaaggagattaaggtagaaattcaaaatatagtaaataaggatgctgaattaaaaaaagaattagaaaatatttgtacaattcctggtgtaggaatactaacagcggtaatcgttatagcagaaacaaatggatttgaactgattagaaataaaaagcaaatcacaagttatgcaggtttagatgtaaaggaaaaacaatctggaacctctataagatctaaacctaggatatcaaaaaagggaaatcgtaatttgcgaaaagcgatgcatttaccatcattatctgcagtaaaatataataaaaaccataaagaattatatgtaagattaattgctaaaagtggtataaaaatgaaagggttgattgctgttcaaagaaaactattagaattaatttatatcgtttataaaaataaaaaaggttttattcaaaattatgagcaacaaaaaagagcaaccccattagaaatggaaactgccctttagaaactagctcaaagccgttttgaaaaacaaaaatataaaaaaatatcaattttttgttgtaagttaatacagaat

SEQ ID NO: 8476 - DNA, 1177 bp, unidentified
  source 1..1177: mol_type = unassigned DNA; note = element_d487a0d
  misc_feature 1..2: note = core
  misc_feature 3..206: note = LE
  misc_feature 207..1154: note = CDS
  misc_feature 1155..1177: note = RE
  misc_feature 3..181: note = bridgeRNA
cttgtatggtaggacttgaagggaggaggagggacaaagcccgattctgactgttagcgcagtacagatccgtgggagatttcgcccctcctcctttcacccaagcgccgataaagaatgcatctggctagaccgacgataggaacaagcctgcgcctctgggtgagcccttcaagtgctcaaaaccatatcccggaggaaatttaatggcaatgccggtttctgtctcaaagccgatcgtaggcgtggatgtcgccaagaatgaactggtgatttatcacgccgagcttgaccggcttgaagagattcccaacaacaaggcggcgatcaagcagtggttgaagggcttgccggggacagtggccatcgccattgagtcgaccaatatctatcacctggagttcgccgatctggcctacgaggccggctgcgtgatttacatggtgggtggctatgaactgagccattaccgcaaaggggtgaatgtccgcgccaaaaccgacgcgctggatgcccggctgctcgctcgctacctgaagaacgaaggtgacgatcttcatccctggaccccgccatcaccgctgtaccgccagctcttgagcctttttcgccgccgggcggctttggttcaggcacgagtgggtctggtgcaaagctgggcgaatgaaccactgttgaagaccgcgtttgccgagcaagtgaaatccatgcaacagcttgaggcgctggtcgaaaagacgattaaggatcatctgaaagaagccggtttgctcggtcagttgaagcgctgcctgaaagttgaaggcatcggatttttgaccggagcccgcttgatcgcagcattccagcgcggtgacttccgaaacgcagatgccttcatcgcctttctgggcatggatttgcgggtggcgaagtcaggacaaaaagacggtcgccgaagcttgaccaagcgaggtgatccggaagctcgccggcttctgcacaacgccgccatgtcggccagtcgtacgcccgcctggaaaggtttttacgaggcacaaagagctcgcgggttcagcaccactcaggcactggtgatactggctcgcaaactggctcgggtcgtattcgccttgctgaaggggcaaagtgaataccagccaaaagtcggttgagggcttcccctcaaccatagaat

SEQ ID NO: 8477 - DNA, 1556 bp, unidentified
  source 1..1556: mol_type = unassigned DNA; note = element_d488d05
  misc_feature 1..2: note = core
  misc_feature 3..200: note = LE
  misc_feature 201..1421: note = CDS
  misc_feature 1422..1556: note = RE
  misc_feature 3..223: note = bridgeRNA
ctcgtattatatagtcatagcttaatttttgattttttcgatattttaagctatgctgttttagatactgtggattagttttatcatcctaccactagtttttgaaaggctctaaccacagtctctttgtttatttgttaatcagttagataccgcatgacggtttatgtagaacgaggttacaatcgcaaggagtacccgtggttctaaaacagtatcaaattatttctaatgaggtgcttcctatgattttagttggtattgatgtcgcaaaagacaagcacgactgctttattatgaattcagatggtgaaattctcgctaaagcattcaccttctctaatacccttgaaggttttaattttctttacgagaaaatctgctctgtgtcttctcatcaggacaaaataaaagtagggcttgaagctacaggacactacagctataacattcttggtttcctacttgataaaggtctccccacctttgtcattaatccattgcatactaatctctacagaaaaagcctgtctctgagaaagactaagacggataaagtggattccagaactatagctatgatgttgttgtccgatgtagacttaaagccctactctgaaacatcttaccataatgaacagttaaagtcactatctcgttacaggtttaccaaagtaaaggaacgcgctaaacttaaaacttcggtttcacgcttagtacaaatcctttttccagagctcggacaacttgtttccacccttcatatggcttctgtttaccgtttattagaagaatatcctggagcgtcttatatagcttctgctcatcttagcaggcttaccaatatcatttttgagtcttcgaaaggcaaatacaatcgtgatactgcaattacattcagagaagttgcccgtaaatctattggctcagttatacctgctaaattgcttgaattaaagcatactattaagcttattcgtgaacttagtagtgagattgatgaaatagatgctgagattaaaataatgatggaagaaattgcttctcctattactactattcctggtattggttacaatatgggagctatgattatttctgaaataggtgatttcagccgtttttcgtctcccgataaaattcttgcttacgcaggagtatctccatctacctatcaatctggaaagattgacaactgttattcacacatggaaaaacggggctcacgatatttaagatatgctttatttattgctgcacaaaaagtttgtcattgggataataccttttcagaatacttatctaagaagcgatcagaaggcaaacattattatgtggcaatatctcatgctgtaaagaagttagtacgtgttatttttcatttagaaagaaccaggcagccttatctaaaagccgcttaaatataataaatttaatactgttttttagagcaccagcaatgatgctctttttctcatgcagttttttgattaactgtattatttatatattttttcaaaaacagcttatttatatcttgactctttatagttagt

SEQ ID NO: 8478 - DNA, 1462 bp, unidentified
  source 1..1462: mol_type = unassigned DNA; note = element_d48a236
  misc_feature 1..2: note = core
  misc_feature 3..239: note = LE
  misc_feature 240..1445: note = CDS
  misc_feature 1446..1462: note = RE
tctaccattggatttcgtgcggagacgggaacacctccgttgatgtagactgactgcgacgggggtgtggctcatggggtcggcggtctctgaccgctcggttctgaaatgccgcccccgtcttgtattgggtcatccagggtgcctgtcggaatgatgccagcaactcggctaagttgacgtggccctgcgcagtagacgaggcacctggatgagatctcctgcaaggaggcacgcgtatggatccccacctctgtgttggcgttgacgtcggctgccgagtacatcgagtcggcattgcacgtcctgatggctccatcctcgaggagttcgatatctcccacgaccaaacagggttcgaggagttcttccaccgagtggaagaccatcgagagcggacagctttgccggtcgctgtagcgatggaaggctacaacggctacgcacgtcccctcgatcgtctcgtccaagagaagggctaccggttgttcaacgtcaacaacctcaagctggcgcgcttcaaggaagtctttcctggcgcagccaagaccgatccgatcgacacccgcaagatcctggagttgtttcgtctcaaggaccaactcccgcttgccaaggacgccatccaagaagtggcgagggcgcccgcagtaaacgagaggctcaagcgactcagccggcgcagacggcacctggtgatcgagaagatgcgcgttctgaatcggatgcaagccgatctccaagctgtgtgtccggagctgctggccgcgacgaacgatgcggacaacctgtggtttctccgcttcctcacctgtcgtgaggatctccgacagctggcgcgtctgcgtcagtccaccgtgctgcagatccgcggcatcgggcagaagtacgcagcgatcatcgcagagtggcaacagcacgccaggttctccgacgaggtcgagtacgtcggcccgatgatcatccaagatgcgagacggatcttggagctacacgtgcagatccacgtgctggacgaagcaatggccgatctagcggagcagtcggagatcgcccgacggatctcgacgatggcgggcttcggcaagacctcgatcgcggagctggcaggggagatcggaacggtgaagcggttcgcatccgaggcgagcctggcgctgtacctggggatgtgtccgttgacacgtcagtccggccagatgtgcacagcaagagcgcctcggcaggtgaacacccgctgcaaggccgcgatgatgacggccgtcgccagacacatggcatgtgtaccccagtcgagagcctactacgaccgcaagcgtgccgaaggcaagacccacaaccaagcgatccggtcgttgggacgccacttggtgcgcgtcatctgggccatgctacgagatggacgggactacgagattcgggaggaccgccaccccaccccttgacaatccaagggggatgt

SEQ ID NO: 8479 - DNA, 1994 bp, unidentified
  source 1..1994: mol_type = unassigned DNA; note = element_d498aaa
  misc_feature 1..2: note = core
  misc_feature 3..278: note = LE
  misc_feature 279..1475: note = CDS
  misc_feature 1476..1994: note = RE
  misc_feature 12..298: note = bridgeRNA
ctgttacaatatatttgtcgggtaattcccctgcatccagcaaggggttacacgcattcgttacttaagctataatggaagcagtaattggactgatgttcacctccttgagccaaagcgctcgtacgaaagactgtcatccatgcttccattgcagcgttcgttttgtgcaggttgtgccaccgtagccggtgcgttcgtgtcaccaaacagattgaataggtaatgataaaaagcgtggtctatccgattacaaatactgtttaggagcgatgaaaatgaacgcagttggaattgatgtatcgaaaggaaaaagtatggttgcaatactcagaccattcggcgaagtggtggcagtgccctacgaggtatctcacacagacagcgagctcgatcagcttgcgaaggttatcaagaagctgcccggcgagacgagagtcgtcatggaagcaacgggcgtatattttgaacccatcgctcgccgcctccatgaacatggtatatttgtttccgtagtcaatccgatgcttatcagtgacttcagcgaaaacacattgcgaaaagctaagacggataagaaggacgctgtcaagatcgcaaattatgcgcttagctcttggcttgatcttgtcgaatacaagccggaggaagacctcagaagatctctgaaagcgttgaacagacaactcaaaaaggtcgccaaggtcaacaccatattaaaaaacaacttgatctctcttacagacacgacatttcccggagtcaacaagctgttctcttcgcccgaaagggagtcggacggtcatctgaagtgggtcgattttgttgcgaaattcccgcatcgtgataccgttgccaagctgactttaagtgctttcaagaagaagtacaagagctggtgcgaaaagaatgggtattattatcgtgaaaaggaagcggaacagatccattcttttgctcgaagctgtgttgccggaatgcctgccgaggatactttttgcttgttgattacaaaggctgcggaatttgtcaatgctgctattgaaaacgcaaacgatctgaaaaatgaaatgaatcgagttgcgtctatgctgccccaatacgatgttgtaatgaatctgtacggtgtcggaaaatctgtgggaccacagctcatggcggagatcggagatactcgccgttttcacaacagacgcgccattacagcatacttcggttatgataccgtgcccaatgactcgggacagcatatctccaaatctcgcccgatcactaaaaagggctcgtcatcacttcgaaggactttgtttataatcatgaaagtattgcttgttactcaaccgaccgacaatcctgtctatgaatttatcgacaagaagcgttccgaaggtaagaattattactcctacatgaccgccgcatcggcaaaatttctgcgaaaaatcccgacttgcaggtgggtcataaacaattaaaaaacgacgtatttacgtgatacgatttgcttaaaacgagttttttggaaattgaaaatgtcatttccgttaattatatcgatttttgttgcatagacacaatgtttctatgacccttgtgcaagtcgggattttctgcgaatatactacgcaaaggtcaacgaagtgctgaacgaaaaaggtgttcccttgaatacataatgtctattcatagattccgaaccggaggcgatatgcaggcacggcgcagccgcttgaccttgatgggttatcataaaaatgctacaatgggcagcccgacggtcaacgatttgtctattcatgagttcctcaccgtcggcacttttccgagagcatttttatgatgttctgtcaaggttgccggacggtttttacaagctatcgtttttttcagaccgccacggcggtcttattgtcgtacctgtttttaaatatgaattgtgtgaatattttttcactctgtttttttatttttctacttgacttttatttgcaggt

SEQ ID NO: 8480 - DNA, 1389 bp, unidentified
  source 1..1389: mol_type = unassigned DNA; note = element_d4a47c8
  misc_feature 1..2: note = core
  misc_feature 3..89: note = LE
  misc_feature 90..1121: note = CDS
  misc_feature 1122..1389: note = RE
  misc_feature 1099..1372: note = bridgeRNA
agatggggtggatgccgctctctccccaacggcgtcgaaatgcgccaagcttgtgatgctgaagtcacaagagaaacgagagggcagccatgaaggaaattagcatcatcggggtcgatctggcaaagaacgtgttccagctgcatggcgcggccgcggacgggacggtcgttttccgcaaaaagctgtcgcgcccgcagttccagcgattcatgacggagcatccgcagtgcctcgtcgtgatggaggcctgcggcggggcgcatcactgggcgcgggaactggtgcgggtcggccatgaggtgaaactgatcgcaccgcgctacgtcaagccgttcatcaagcggcagaaaaacgacgcggcggacgcggaggcgattgtggaagcggcgctgcgcccgaccatgcgctacgtcgagccgaagaccggggaacaacaggcgcgttccatcctgttccgcacccgtgagcagttcgtgaaacagcgcaccgaagcggtcaatgcgctgcggtcgcacctgtacgaattcggcttcaccgcgcccgaggggatcggctatctcccgcgcctcggagccgtcctggaagatccgagctcgaatttgccaccgctcgcccgggaaatctgtcgcgagatgctggagcagatcgcgaacctgagcgaccggatcaatgccatgaaaaagaggctcgacgcgatcgccagggagggcgagacatcgcgccgcctgcagacgatgccgggcgtgggcccgatcagcgccctggccgtcgagacatttgcccctcccatggagcagttcaaacgagggcgcgactttgcggcctggctggggctggtaccgcgacaggcgtcgaccggcggcaagcagcggcttgggaaaacctcgaagatgggccagcgcgacatccggagactgctcgtcaccggtgcgatggccgtgatccgctgggccctgcgcaggggcgcgcccggcaatccctggctggcacgcctgctcgaacgcaagccgccgatggtcgccgccttcgcgctggccaacaagatggtgcgcggcatctgggcgatgatgacgcgcggcgaagactatcgcggcccggagatcggaagcgcagcctgatccggcagcgcagttcgaaccggaccgccgagttgtgaggaagacatgaaccgaatgggcaaatgatcgacatgatccgggttgggcgaaccagaaaccttctccgagcctcgagctcgctctcagagatctggccccggtccgcgcatcaccatctcggccagcggcatctatcgggccgcaagaacaggcctgacaagagtccgcactcgatcacatgcctaaggttgagaaattccttgcaaatgagagcggcatccacaagaga

SEQ ID NO: 8481 - DNA, 1361 bp, unidentified
  source 1..1361: mol_type = unassigned DNA; note = element_d4ab020
  misc_feature 1..2: note = core
  misc_feature 3..75: note = LE
  misc_feature 76..1098: note = CDS
  misc_feature 1099..1361: note = RE
  misc_feature 1074..1349: note = bridgeRNA
tgatggggtggacgccccccgacggcattagtgtgccataatggaggtgttgaacatcattagaaggaggcgtccatgtcgcaagttagcattattgggttggatatcgcaaagtctgtttttcaggtgcatggcgctgatgcgtcgggccgcgccctgctccgcaagaaggtcagcagggcgaagctgttgccgttttttgcggcgttaccaagctgccgtgttgtgttggaggcatgtggcggtgcgcatcactgggcgcgcgagttggcgaagttgggccataacgtccagttgatcgcacctgcttacgtaaagccgtttgtgaagcgccagaagaatgatgctgcagatgccgaagctatctgtgaggcagcccagcggcctagcatgcgttttgtgccagtgaagactgaggaacagcaagccgcagcggtggtatttcgtgggcgggatttgctggtccgccaacgtacccagatcagtaactcgattcgcggtcatatgacagaatatggctggatagcaccgaaaggcctggcccatttgtcgaagctgtccgcgctgctcgatgacccgcacgccattcctcagggcgcaagaccgatattgatgatattattggaccagattaaggttctggaccgtcagatcgcaatactcgataaagagatcgctcggcgcgccagagaagatgagaccgcgcgacggttgatgaccatccctggaataggcccgataacggcaaccgcgattaccgcgcttgcaccgccgcccggcacctttgccaagggccgcgactttgccgcctgggtcgggcttacgccgaggcagcactcgaccggaggcaagcagaagctcggcgcgatatcaaagatgggcgaacgcacccttcgaaggcttctgatcatcggcagcagcgcggttgtgctccaggcatgcaagcgcggtgcgccccaaggatcgtggctggaacagatgctggtgcgcaagccgcgcatgctggtcacagtcgcgctcgccaacaagaccgcccgcattgtctgggcgctgttgacaggagaagaggtttacaaggctccggtcgcagcggcatagccgtttgcgaaccagaggtcgtcagaagacgtagtcggtcgaaggagggtatggcaaaacagtcggcgagacgggatcggaagaaccagggcttcccaccgtgcttcatcagcacgcttagggtgatgtggttccgatccgcgaactcccatacgggcccgcagtcatcatcactgcatcaagaggccggacagatggcagcatccgacgaaccgccaaaccatcccaaaaataccgcttgcgttttttggggcgtccacaga

SEQ ID NO: 8482 - DNA, 1453 bp, unidentified
  source 1..1453: mol_type = unassigned DNA; note = element_d4af53a
  misc_feature 1: note = core
  misc_feature 2..240: note = LE
  misc_feature 241..1440: note = CDS
  misc_feature 1441..1453: note = RE
  misc_feature 14..255: note = bridgeRNA
ctgcttgttccattgacccaggaccggttgcctggcgaggctcggtccaggcgcccgggtcgtcgctctcacatcggctgcccacgctgctcagtgatgggttcgtgtggctctcttttggcctgcgtgacccgggcgtcgccagggccaggagaggctcaagaggggattgcccggctctaagcagcgttgccctcccggctcgacaacccagtgatggagcgagcatcggaggagcagatgatcgacgcatttggcggcggcagccgtgtggtgattgggatggacccgcacaagcggtcggtgacgatcgaggtgatgacggccgacgagtccttcctcgggggcggccggtacgccaccgacgaggccgggttcgccgcgatggggcgctatgtcagccagttcccggaccgtgtctgggcgatcgagggctgctcggggatcgggcaccacgtcgcgatgaggatcctcgctaccggtgaggaggtcctcgacgtgccaccgaagctgtcggcgcggatccgggcgttctcaaccgggcaaggacgcaagaccgacgccaccgacgcccactccatcgcgctggtcgggacccggatggccgggctacgaccggtggtcaatgacgagcagctcgcggtgctgcgactgctggtcgaccgccgccgctcgctgggtgatgagcacacccgcaagacctcccagctgcaccagctgctgctcgagctgatccccggcggggcgaagaaggacctctccgcagcccaggccaaggcgctgctggcaaaggtccgaccccgcgatgtcgtcgggaagacccgccgtcgggtcgctgccgagctggtcaccgaccttgaacggatctatgcgcggaagaaggccgcgaacaaggagctgaccgagctggtcgaggcgaccggcaccaacctgttggatctgcacggcatcggaccgtcaggtgctgcccggctgctcgtcgaggtcggcgacatcaccaggttccctgaccgcgaccacttcgcgtcctggaacggaaccgcacccatcgatgcatcctcgggtgaccaggtccggcaccggctgtcgcggaaggggaaccgtcagatcaaccgggttgtgcacatcatggcgaccgttcaactgcgcaacgcgaccgagggccgggcctattacgaccgccgcaaagccgaagggaagacgtcgatggaggcgatgcgggcgttgaagcggcggctgtcgaacatcgtctacaagaccatgctcgacgacacgatcacccatgccgcggcgggttcgaggacgggcccgggagggcaacggggcaacgactctgactccagcgcggccggctcacagccccacaccaactcttcggacaagccacttcccggacccgccagaacccaccctaagacaccgctcccggcagcttcttgacacagaggggtgc

SEQ ID NO: 8483 - DNA, 1825 bp, unidentified
  source 1..1825: mol_type = unassigned DNA; note = element_d4b3cf9
  misc_feature 1: note = core
  misc_feature 2..333: note = LE
  misc_feature 334..1692: note = CDS
  misc_feature 1693..1825: note = RE
  misc_feature 113..292: note = bridgeRNA
tagtataataatggtgtagtcaataatgactacgggttaatagttacatcatctaaatgaataactgaaggagggattccctctccatcagaagttattaaaaatatttaccatgtctgaggtttccttcatgcaccagacaaaatatagaggtataatcactgaaggcaggatcattgatgtttcctccttgggagccagcagtccttgttggtcatacctcttagaaagtctgtctgtccattcggtggtgatttatgttttggctggttgggaagccccaggctatacctgtataagccgctaggttgtgtatccgccttttggaaatggatgcctgccggaaaggataaatacatgaaataccaaaaagtacttacgatgcttgaaagcattccttacctctcagtcgggcttgatgtcggtgctgacttcacctggatgtctatcatgctccctaacggctcccttaccgggaagcccttcaaaatcctgcactctgatcctgcttccagggatctcgcagtaacaaaaataaaagaagcacaggagatgtattcccttgaaagccgatgcttccttgagtccaccgggatctaccacatcccactcctgtacttccttcgtgataagggttttgactgctcggtcattaatcctatcatcactaagaatagcacaaacatgaacataaggaaactccataatgataaatttgattccaaaaaggctgccaaagtagggctggacgcatccctcaagacttccatcgtccctgacgatagcgtgatcgacctgcgcaacctcgtccgggactactactactttaaagacctgcagtctgcagttgtgcttaagctgaatgcggaactaaaagtatctttccctgcatacctcaaggttttcagcaagattaccacacagtgttccctaaaactgctggaagcctatccccttgccgcggacatgcttgccgcaaaggatgagattgtggaaacaatcaaatcaactgctcgtttcggggaaaagtatgctctttccaagtacgatgccatatacgccgccgcagaggatgccgccgtgttcgggcgtgccctgaaaagcaatgctgtcaggatccggctgtacattagcatctataaggaataccagaagcatctggatgaccttctggtggcactccacgaatccgtggacaagttgcaggggacatctgtttatgggcgcatcgacctgctccagtccctccggggtgtcggcttcctcagcgccgttgtgctgatagcggagatgggcaatttcgacctcttttcctccccgaaaaagctttatgcatacttcggcctggatcccgctgtaaagcagtccggaaaatttaacggtgataaagtgcatatgtccaaacgtggatcaagccttgcccggcgcatcctgcatatggtgtctcttaataacctcaaagtggataaagggacgaaagcaccagtaaacccggtcatttatgactactacactgataaatgcaaaagcaaaaagaaaaatgtagccgtcggagccgtcatgcataagatctgcaacatcatctttgccatactccgggataataagccttttgaaataatcacccagcaggagcactgtaaacgctacgcagcgaaacatcctgataaagcgggaatgaacgcagcctaaaaaaatcttatgtaatttataatttttccacatatgtgggcttgttaaagttacccttttttcaggaagcgttaccgattaaacatttttcaactttttttcagatcacctcttgacatttcttagctggact

SEQ ID NO: 8484 - DNA, 1552 bp, unidentified
  source 1..1552: mol_type = unassigned DNA; note = element_d4b5a54
  misc_feature 1..4: note = core
  misc_feature 5..280: note = LE
  misc_feature 281..1444: note = CDS
  misc_feature 1445..1552: note = RE
  misc_feature 46..263: note = bridgeRNA
tcacgtataattaaaaccatctcgaaaggggtggtttttattatttctcctttcctcaaaaggttatattgcaggagtagctacctgctttataatcagtacaagcactgtggatttgtatttcatttgatacagcttgactggttggaggtgactcaaaccacagtgacttgtctgaattggtaatcagttggttaacgcttgacgtttcatttttgcgtgaatacataggcaagtcttctgtggaaacagcagtgcaaatttcaaaaggaggaaacccatgtactttgtaggaatcgacatttcaaaatttaagcacgactgcgccatcgttgatgagcttggcgatgtcatcacaccctcgtggtcgttccagaataactgcgagggattttctttactcagagagttgcttgatgccctcgatggagaaaagaagatagggttcgaagctaccggtcattatgggcaaaacctgaagctgttccttgaatccaacggcttctcgtttatggagatcaatcctcttctgatttcaagatttgttcgtagcaaatccctcagaaacacgaaaacggactccatcgacgctcttgctatcgcccagtatttgatgacggtagaatacaaaccctatccgccgtcattttaccacttggacaagctgaagtcattaacaagattcagagattctcttgttcgccaaagatccaggcagcttgtagaactcaccaacatcctggacaaggtattcccggagttcaagcctttctttggcggacgtttttctgttactgccctctatattcttgccaactatcagtctccggagagaattgccaatataaacgccaaatcctatgaagctttgcgcaagaaatccaaagggaagttcaccatggctaagtttgttcaactcaaatcgctggcaaagaacaccgtcggcagatcagatgacttccttctgcagcagatggaaatgactctcgacatttactctcagatggattccaaagttgacgaggttgaagttcagatccaagagtgtatcaccggtattaatccgccgatcatgaccattccgggcgttggttacttgtctgccgccgtaatcctctctgagttcggagacttcagcaagtttgaaaatccatccaaaatgctgtcctttgctggtttgaagccaggttatttccaatcaggacagtctgaacataccgggcgcatggttaagcacggttcgtctcatttgcgctacgctcttatgaatacgtgccttccgctaatcaccaatgagccggtattcgctgagtactacgccaagaagcgagcagaaggaaaaccgtatcgtgttgcactcacccatgttgccaaaaaactgttgcgagtgatctacacgcttcaaacaaagaacattccttatgacgcaaatttgatccgctaaacctgttcaacatttttattttctgcgctcgaaagagggcttgattttgtgcacccttttttagctggcaaaattttctccttcataggcttgacatctaatagttgg

SEQ ID NO: 8485 - DNA, 1157 bp, unidentified
  source 1..1157: mol_type = unassigned DNA; note = element_d4bc75f
  misc_feature 1..2: note = core
  misc_feature 3..206: note = LE
  misc_feature 207..971: note = CDS
  misc_feature 972..1157: note = RE
  misc_feature 13..212: note = bridgeRNA
cttgtcttatgattttccagggttcctgtgcgatgaaggagccactgcacgccacgccatttatggcgtgcagtggcgtggggtggatcgatataggcttggtcttgatggaccgttttagagtgtgatcgctccacgtcttcgcatgaggcctgaatggatacacggtgtctggcaccgcatgacaagcaaaggacatgacgaagatgagtgactatacgataggggtggatatttccaaagcactattggatgtgcatcggatgcctgaaggcgaatgtgcgcagttttccaatgacaagaaggggcacaaagccctgatccgctggctgaatgaccttgttgtgacgcgcgtgatctatgagcccaccggcgcataccatcgtggatttgagaaacgattagcagaggtgggattgccgttaatcaaggttaatccactgcaagcgcggcgattttcccaagcacggggacagcgggccaagacggacaaggtggatgcaaaaatgctggcagaaatggggcttgccttcgaccttcaggccgacccggtgacaccgcagatcatccatggcctcaaggagttgcaagtcgcccgcatggcccttgtcaaggaccggacccgcaccaagaaccggatgcaccggctgaccctcgcactgcttgagacccagcacaaagcacgtctgcgccagatcgaaaaacagttaacggctttggaagccgagatgcagcgcctgattgccaccgagccgcagctggcgcgaaaatccgccattctcagctcgatcaaaggcatctctcggatcaccgccgccgcgctgatcgcggaaatcccagaactgggctctcttgaggcgaaacaagccgcaagcctcgcgggcctcgccccgatcgcgcgcgattctggtacctggaaaggtaaaagattcatccagggcggccgcaagttcctgcgtgaagccctctaaatgcccgccctggttgccagtcgcttcaatccagacctagccgcaaaatatcaggctttgaaagcagcaggaaaaccatccaaagtcgcactcacagcaatcatgcgaaagctcgtcatcttagcaaatgtcctcatccaagaggacagaatgtggcaggaacaacgaccttgaccaatacggata

SEQ ID NO: 8486 - DNA, 1385 bp, unidentified
  source 1..1385: mol_type = unassigned DNA; note = element_d4bcdbd
  misc_feature 1..2: note = core
  misc_feature 3..88: note = LE
  misc_feature 89..1117: note = CDS
  misc_feature 1118..1385: note = RE
  misc_feature 1088..1372: note = bridgeRNA
agatggggtggttgccgccctccccagcggccaggcctgtgtgtcaggatgacgtggggcagcaaccttcatacggagaggacgaagaatgttggaaacgatgatcggtgtggatttggcgaaatcagtctttcaggtgcatggagcttcgatgacgggagtcgtgaagtttcgcaagcggttgaccagaagccagttccgccggtttcttgcagctgagcctagggccgtcttcgtgatggaagcttgcggcagcgcgcactactgggcccgcgagatggtcaagacaggccacgaggtgaagctgattgccccgcagtatgtgcgccctttcgtcaggcgacagaaaaacgacgcggccgacgcggaagcgattgtgatcgcagctcagcgtccagagatgacgttcgtaggcacgaaggacgaagatcagcaggcaggcgcggtcctgtttcggtcaagggagcgcttgatccagcagcgcactgtcgcggtcaacgcgctgcggtcgatcctctacgagttcgggcatgtcgtgccttcgggcattcgcaatattcagcggatcgaggaaattctcgcagatgaaaacagcgatctgccatctctggttcagagcgagtgcctggatatcatcgcacagatccgggaacagacggcccggatcgaggcgaagacaaagacagccaaagagctcgcctcgaaggatgatgtcgcgcggcgacttcagaccataccgggtgttggtcccctgacggcactcgctgttgagacctttgctcccgaaatgtcgacattcaagggcggtcgaaactttgccgcttggctcgggctcgtcccgcgccagttttcgtcgggaggccgcgaaaagctgggccgcatctccaaggctggacaagcggacatacggcggctcctgattgtcggtgctatgtcacgtttgaactggatgggcaggaagacggtccccgaagggtcatggcttgcccgcatgattgcgaagaagccgcggatgctggtggcaattgcgcttgcaaacaagatggcccggacgatttgggcgatgctgacgaagcaagaggattaccgagagtcagcaactggcttggcgacgtaagagaatctggcgccagttgttgctggcgacagaggtgtaggaagtcgacgacctgaatgggcaaaatgatcgaaaagatctgggtcaggaaaaccagcgaagcgctcggagcgaaaaagcccgtcaacgagttctggacctgatccgcagatcaccataccggcctgcagccaacgacacggctacaacagaaggcctgacacaagaccgcactcgatctgatccgtttaggctgaaaactccttgcatcacgggcggcaaccacaca

SEQ ID NO: 8487 - DNA, 1560 bp, unidentified
  source 1..1560: mol_type = unassigned DNA; note = element_d4c0efe
  misc_feature 1: note = core
  misc_feature 2..278: note = LE
  misc_feature 279..1442: note = CDS
  misc_feature 1443..1560: note = RE
  misc_feature 6..222: note = bridgeRNA
tcgtattatgaggtcagccaattaatttggttggccattttttataggctccagtatgatggcggtagccgggagaacgtggcgctattagggggaaaaccccgacataaaaactgttctcccactacccccgacaaccatgtttgagctggtagggacgaaatgatctcgtataacaagcgaagctatggaattggaaccatcgtgggagtttccgttctaatccataaacggagggagaataatgaaccctgttgtaggagttgatgtagcgaaaggtgaaagtcagatccaagcctttatggacaaaggagaacctttcggtagaagcggaaaaggtgtctcattcgctgaagggattagataggctaggccagatccttattcgactaaaagaagagactggagaaacacctgcaatcatcttagaagcaacaggacattatcaccgtgtgctggtgttgtatttggaacgagaaggttatcctgtcatagtggttaatccgttgcaggcgcagaagtttagaaatactcaattgcgaaaggttaaaacagatgcccgcgatgcctggtatttggctgaaatgtattaccgagaagaatggagtccgagccgttcacaggagactaacctagcggatttacaacacttaacaaggcagcatgagtttataacaggtatgtatgtacaggctaaattgaacatgcgctcattgttagatcaggtgtttccgaactatacgagcgtattctaccatctgtattgtaaggcatcactgcgagtattaagctcttgcttatctgagaactggtcatccgaacgcaatatgggggagattgaggaacgaatcggggaaggtgtctgcaattccaaatcggcatcttggataagagataaagccgagcgccttgcactggaacttgatcgtaatcccataaaggaaacgagcatagggcagctagtggcgttacaaagcattatatcgttagtccttcattttcaagaacagttggaactcttggaagaaaggattaaagatatcgcagaatctattccggcagtagacttagttaaatctatgccaggaataggtgacaagctcgctgcaagcattatagctgagatcggagatgccaagcaatttagcaatgctaagcagctagtagcctttgcagggttagatcctagcgtatactcgtcagggaagtttgtagcgactagcagtaggattacaaaacggggctccaaacgcctgcgaagggctctatatttagctgtacaatgcggtatacgtggtagtaggaatcctagaatacgtgagtattttgataagaagaggggcgaaggcaagccctacaaggtagttgtgattgcttgcgccaataagttactacatcacatctacgccatgttgacacggggccagccttacaacggataaaacaataatgacataaactcccataaatatagggggttatttgttatacccaaatttaaggatagcttacgactttatattgtatcaacaaaattatattgacaagtattagctggtt

SEQ ID NO: 8488 - DNA, 1321 bp, unidentified
  source 1..1321: mol_type = unassigned DNA; note = element_d4c3533
  misc_feature 1: note = core
  misc_feature 2..250: note = LE
  misc_feature 251..1315: note = CDS
  misc_feature 1316..1321: note = RE
  misc_feature 14..236: note = bridgeRNA
ctattggtgcacagtgttgatgccggaacgcttcgacgggagtcgaccggcgggctgctgggtgactcggaaaacacgtgccgcagatggctttccgttgatttgtccacggcaacccagggcgagagccctgaccgggagtgacttgatagaagcctgctgagccgtcaactcgcaataggtctgtccgcccgggcagagccctcgctgtcgtcccgtcatcgaccgaaggtgaagaagggacgtttcgatggtgacagtagggatcgacccgcacaagcgcgtccacgtcgcagtggcagtagatgctggcggccgacgcatcggcaagccgctgaccgtgaaaaatgacgggcaactgatcatcaccctgctgaagtggattcgatcgatgatcgataccacggcggtgacttgggccatcgaagatgggcgtggcttcgctcgtcgtttggccgatgaactcctgcttgccggtcaggaggtggtgtgggtgcccagccggctcacggtcgcccaccgcaagctgcacgcagccacgggcgccaagtccgatgtcatcgacgccatcgcggctgcgcatgcggcgatcgccacaccaagtctgagccgtcatcagatcgatgagcgggtccgcgaactccgagtgctcagcgactaccgctccgacctggtcaaacgacggacaacactgatcaaccagatcaagacgcacgcgcatttatggctcgactacaccccgggcgatcttgcccgcgccaagaccatatcgctgctcagtgctcggcttgatgccgcatcgatgagtgctcacgtccggcacgtgttcaccgagatggtcaccgagctcgtcgacgtcaaccgacgcatccacgatctcgacgagatgatcaagaatctcgtgagccccctggcacccaacctcttgcagatcaccgggatcagtcatatctcggccgcggtgctggtcaccgaaatcggcgatatcactaggttttccagctcagccaagctcgcccgctacaccggctgcgcaccgatcccggtctactcatccgaccacgaacgtcatcgcctccaccgaggaggaaaccgccgcctcaatagcgtcctttacacagcagcgatcgtgcagaaccggttcaactccgcggcccaacaactcaccgcacgccacctaccaacaaaaggggcccgaggcgcccgacgtattctcaaacgccacctcgtcgacgtcatccatagagccatgcagctcgatcaagccaactggcagcaccacatcgccagatacgaaccagcggcgttgacatagaagcat

SEQ ID NO: 8489 - DNA, 1351 bp, unidentified
  source 1..1351: mol_type = unassigned DNA; note = element_d4e92fb
  misc_feature 1: note = core
  misc_feature 2..68: note = LE
  misc_feature 69..1073: note = CDS
  misc_feature 1074..1351: note = RE
  misc_feature 1118..1349: note = bridgeRNA
taatgagatggtctcccccacccatgagtcctactcttatagggtattttctttctggagagtccatcatgcgaaacgttacacttattggtatcgatctcggcaagcattctttccacatccactgtcaggacaaattcggtaaggcaattttgcgtaaaaaattcacccgcacaaaattaatggaatttttagccgggagttcattcgctaccgtcgtgatggaagcgtgtgctgacgcacactttatggctcgccgggttgctgatttaggtcatgaggcaaagctgatatctccgcaatttgttcgtccttttgtcaaaagtaacaaaaacgattgtgttgatgcagaggcgatatgcgaggcggcttcacgaccctccatgcgttttgtccagccgagaacagagactcaacaggcgatgagagcactgcatcgtgtcagagaatcactcgtcagagacagagtcaaaaccactaaccagatgcatgcctttttgctggagtttggtatcagcctgccaaaaggtgaagcggtcattaaacggttatctctggtgctggctgaacatgacattcccggttatctgagccgtttgctgatgaaattacatgcccattatctttatctcgttgagcaaataacggcgctggaatcagaattaaaccagtccattaaatctgacgagacagctcaacgtataatgacaattccgggtgtgggaccaattacggcccgcttactctcatctcagctcggtgatggcaaacaattttcatgcagcagagattttgctgcttcaatgggactggtgccccgacaatacagtacgggaggaaagcctaccctgctgggcatcagcaagcgaggcaacaaaaatttacgtcgattgctggttcagtgtgcccgcgcgttcatgatgcggctcgagcatcaaaagggcaggcttgccgagtgggttcaggaacaactcagcagaaaacattcgaacgtggttgcctgtgcactggctaacaagctggcacgaatagtttgggcaatcaccactcggcaaaatgaatatcaggcctgataaatgctgactgactcaataaattgatgattaaacagtgaaatacatgttacccatctggttttgcgaaggctgattattgatgacatgaatggccaatcggcctgatgaataccctgaaagaaaaaatggctcactgaagccgagttgatttttaggttcatcaggtgcggaactcatcgtggcgcgggtatccatactcatagagacgccggatagatttaagcaagcccatcatacatcaaaatgagtgttgcaaaagcgggggagaccataga

SEQ ID NO: 8490 - DNA, 1372 bp, unidentified
  source 1..1372: mol_type = unassigned DNA; note = element_d50722e
  misc_feature 1..4: note = core
  misc_feature 5..83: note = LE
  misc_feature 84..1121: note = CDS
  misc_feature 1122..1372: note = RE
  misc_feature 1110..1360: note = bridgeRNA
atgatggggtggacggcccccgacggcatctatgtgccaaactggtggatgtaagtcgacaccaggcaaaggagccgtccgctatgaagactatcatgattggtctggaccttgcgaagagcgttttccaggttcacggggttgatggcgctgggcaggtcgttgtgcgtaagcagctgaagcgggttcaggtggagaggttcttcaccaagctggagccagcggtgattgggatggaggcgtgcagtggcgcgcaccattgggggcgggttttgcagacgatggggcacgaggtgcggctgatgccggcggcctatgtgaagccctatgtaaagcgcaacaagaccgatggacgggacgcggaagcgatctgcgaggcaatgcagcggccgagcatgcggtttgtggcggtgaagcggcccgagcagcaggcgatgatgacggtgcatcgcacgcgagccgtgttcgtgcgccagcggaccatgctggccaacgcgctgcgggcgatctttgcggagttcgggctggtggcgccaggagggctgaagggcttgcagtcgctgatggcccaactaccggcgccagtcggagtgccggaggccagccacgaggcgctgacgatgctggctcggcaatggcaggcgctcgatgccaacatcaaggctttggagcagcagatcgtgcggagcgtgcgcgccgatgaggccgcgcgccggatcatggcgatccccggcgtgggtccgatcaccgccagcgccgttgtggcggcggtgccggacatgaagcagttccgctccggccgcggctttgccgcctggctcgggctgacaccgcggcagaacaacagcgcctttacccggcgatcaggcggcatctccaagcagggtcagcgcgatatccgctgcctgctgatcctcggggccagctcacacttgcgtcaggaacaggcgcgcaggcgcatgaaggcagcctccgatccctggatcagcgggctgttggcacgccgcccggtcaaggtcgcggccgtggcacgcgccgccaagaccgcccgcatcatctgggccctgctcgccaaggatcggtgctatcgcgcaccggcctacctgcaacacgccgcctgacgcaacaaaccgctaggcggcaccagtcggaaagggcaactgcagcgtgacggcaaacggtcaggaaccgggatcgggatactccgctctgtcatcgcaccacgagtgcgacgggatgattggaacccgatcagcgaatcccctcagggccagcggtcatggaaccgcacacaaaggccggatacatgaccgctcccgacgcgattgcctcactcgcaaaattgcccttgccgagagggggccgtccatac

SEQ ID NO: 8491 - DNA, 1415 bp, unidentified
  source 1..1415: mol_type = unassigned DNA; note = element_d508af7
  misc_feature 1..2: note = core
  misc_feature 3..78: note = LE
  misc_feature 79..1131: note = CDS
  misc_feature 1132..1415: note = RE
  misc_feature 1130..1403: note = bridgeRNA
tgttgaagtggacggctcccaacggcatcgaatgtgccagaatgagttcgttgaaagctcaatcgagggagaccgtccgtggaacagattactcgaattggtatggatacgtcaaagaacgttttccaattgcatggtgtgaatgcgagcgagctgccggtgcttcgcaagaaactgtcacgcagggaaatggtgaagttcttcgagaagatgccgccgaccactgttgcgcttgaggcgtgcggcggttcgcatcactgggcgagattgctaagctcgttcgggcacgaagtgaagctgatcgcgccgcaactggcaaaaccctatgtcaagcgcggcaagaacgatgcgtcagatgcagaggcattgtgtgaggcgatgagccggccgaccatgcgcttcgtgccggtgaagaccgccgatcagcaggcagccttgatgctggtcggagtgagggaaagattgatccgcaatcgcacccagcttgctaatgctatccgcggctttgcgatggagttcggtgtcatcgccgccaagggcatctgccggatcgaaccattgctggagcggatcgccaccgatcagtctctaccggaactggcacgcgagctattcgccatgcagggtgaggaatatcgcgagctgcttgccgagatcaaaaccgtcgatggacagctgatggccctgcatcgcgctgatgaatgcagcaaacggctggcggaaatccctggtgtcggaccgatcggcgcctcgcttctgatgatgaaaacccccgacccggcgatgtttgaatccggacgtgattttgccgcctggatcggcctgacgccaagagatcattcgacggcgggcaaagtcaggctcggtgtgatcacccgcgccggtgatgagatgttacgaagtgtgctggtggcgggtgcaaccgctgttcttcagccggttcgcactggtcggagtaagaatgcttctccctggctccttgagctcctccaacgcaagaagccaaaactcgttgcggtggcgctggccaacaagatcgcccggatcgcctggaagctgatggtcagcggggaagcgtaccgaagacaaccccaagatatcccgcaggaggccgcagcgctggcggcatgacagatcggccatcacgatgagcagagaatgaccgctgctgtattgagttgatgcgtgaacttgcaagaaggaagcagatggtgtgatcgatcgatccaagacgcgtgatgctccgtttgtcccaatggccgttaaaggtcgaaatactgcttggaactcgcgtcgcggaaaccatcttggccagtggtcatgtgcggccacacccaaaggccgcacatatggaagcaagcgatccgatcaaaattatctgcagaaaacacttgcaaatgggagccgtccacata

SEQ ID NO: 8492 - DNA, 1452 bp, unidentified
  source 1..1452: mol_type = unassigned DNA; note = element_d510288
  misc_feature 1: note = core
  misc_feature 2..135: note = LE
  misc_feature 136..1437: note = CDS
  misc_feature 1438..1452: note = RE
cccattacctttttggtggtcccgcaatggggctcccggccttcgggcccggcatgacttcccccccttgttaaccatgatccagggggtggtgccaccgggcccggaggcactgacagaccgctgattaggggcatgaccaccagcctgttcgcaggccgggaggctcttcgtaatgtggatgtggcgatcggtgccgtggacggccgggtggagcacgaccggaggacgcacgtgatcgagaccggcggcatcgacgtcttcctcggcctggacgtcggcaagggcgaacaccacgccaccgccgtcaccccggccgggaagaaggcgttcgacaagcggctgcccaacaccgagcccaagctcagggagctgttcgcgaaactccaggccaagcacgggacggtgctggtcgtcgtcgaccagccggcctcgatcggcgccctgccgctggcggtggcccgggacatgggctgccccgtcgcctacctgcccggcctgacgatgcggcggatcgccgacctctacccgggcgaggccaagaccgacgcgagggacgcgttcatcatcgcggatgccgcccgcgcgatgcctcacaccctgcgctcggtcgacctcgaagacgagacgatcgccgagctggagatgatcgtcgggttcgacgacgacctgaccggtgaggccacccgggtcgcgaaccggctccacggcctgctggccaagatccacccgtcgctggagcgggtcctgggcccgcgactgcagcacccggccgtcctggccctgctggaacggttcggatcccccgcccagatacgcaaggccggccgccggcggctggtcacgctgctgcggcccaaggcaccacgcatggccgagcgcctggtcgaggacatcttcaccgcgctggacgaacagaccgtggtggtccccggcaccgacgcggccgcgctgatcgtcccgagcctggccatctcgctccaggccgtcctcgaccagcgcaaactcctggccgggcggatcgaggaactgctggaggcccaccctctttcccaggtcctgatctcgatgccgggcgtcgggatcaggaccggagccaggatcctcatcgaggtcggcgacggcagcagcttcccctccgccgcccacctcgccgcctacgccggactcgccccggcgacccgcaactcgggctcctcgatccgcggcgaacagccctcccgcagagggaacaagcagctcaaacgggccttcttcctctccgcgttcgcagccctcggcgaccccgcatcccgcgcctactacgacaagaagatcgcccagggcaaacaccacacccaagccctcctctgcctcgccagacgacgagccgacgtcctcttcgcgatgctccgcgacggcaccttctacgaaccccaacccgcccgaacagcttgaccaaacccatagggg

SEQ ID NO: 8493 - DNA, 1553 bp, unidentified
  source 1..1553: mol_type = unassigned DNA; note = element_d51cd95
  misc_feature 1: note = core
  misc_feature 2..81: note = LE
  misc_feature 82..1143: note = CDS
  misc_feature 1144..1553: note = RE
  misc_feature 1314..1544: note = bridgeRNA
taatgggatggcccggccgcgctcagcggcctaaaccaccgttgatcgggctgggaggcatcaaagctcaaggagcctgcgatgcacacccatcagagttcgtcgaatccggtcgccacgatcggcatcgacatcggtaagaacacgttccacctggtcggtctcgacaagcgcggggctattgtcctgcggatcaaggtatcacgcagccaactcgagcgccggcttgtcaacgtgccgtgttgccttgtcggcctcgaagccggctgcggcgcgcatcatatcgctcggcagctccgagcactcgggcataatgtccgcctcatcccggctcaatacgtgaagccgttcttgaaggggcacaagaacgactatcgcgacgccgaggcaatcgcggaagcagtgcagcggccaaccatgaacttcgttgccattaagaccccggagcaaagcgatctgctgtctctgcatcgcgtgcgctcgcgcctcgtcggccagcgcacggctgtgatcaaccagatccgcggctttctcatcgagcgcggcatcacggtgcggcaaggtccggcacccttgcgcaaggcgctgccggcgatcttgagctcgccgatagacgtgctctcgccgcgtatggtgcgtctcatcgccgacctcagccaggactggcgtcgtctcgacgagcgcatccaagcggtgtcaaccgagatcgagaccgtcgccgagaacgacggcagctgccaacgcttgatgacggtcccgggtatcggcccgattatctcgagcgccgtggtggcggcgatcggcaatggctccggattcaaccagggccgtgacttcggcgcctggctgggcctggtgccgaagcaggagtcgaccggcgatcgcaccaagctcggcaaaatctcaaagcgcggcaacaaatacctcaggacgctgttcgttcaggctgcccacgtcgtgctggtgcggcggcctgcagcagcgacgcgaggtctatggccgtggatcgaacgagctgccaagcgcctcgctcatcgcaatctgctggcgatcgcgctcgccaacaagctcgcccgcatcgcctgggcagtgcttgcccgaggtcgtgactacgagccgaggatcacaacccatgccgcgtgagatcggctcgctcaggttcaccaagaggatggacgccacccctctccgccaccgtcgctcgccaatcctatcggatcgggcaagcgagcggcggtggctccgaggggatggcttcacctgacctctatgaatgtagaaagtgaaataaggatcagacggttcaacagcttccccactgaggtctgcgagatggaatgacgagatggacgaacggtctgcccggcgtaaccatgagacagggtgccatgatggtccgttgaggcctttctcttagcgcagtcttggatgcgcgcggatatccatgctggcccggagcggcatgctccacacgcgaggcctaatacattgatgcagcatctcacgttcgtcgtcttggaagtctgtcttgcgacgcgcggccgggccataca

SEQ ID NO: 8494 - DNA, 1328 bp, unidentified
  source 1..1328: mol_type = unassigned DNA; note = element_d524864
  misc_feature 1..2: note = core
  misc_feature 3..68: note = LE
  misc_feature 69..1073: note = CDS
  misc_feature 1074..1328: note = RE
  misc_feature 1095..1326: note = bridgeRNA
ttaatgagatggtcactccctccttcccggtactatgctgaggacaggctttcattcggagaactatcatggaaaacattgcgctcattggtatcgatctgggtaaaaactctttccatattcattgccaggatcgtcgcgggaaggctgtttaccgtaaaaaatttacccggccaaagttgatcgaatttttggcgacatgccccgctacaaccatcgcaatggaagcctgtggcggttctcactttatggcacgcaagttggaagagttggggcattccccaaagctgatatcaccacaatttgtccgcccgttcgttaaaagcaataaaaacgactttgtcgacgccgaagctatttgtgaagctgcatcgcgtccgtctatgcgttttgtgcagcccagaacggaatctcagcaggcaatgcgggctctgcatcgtgtccgtgaatccctggttcaggataaggtaaaaacaaccaatcaaatgcatgcttttctgctggaatttggcattagcgttccccgaggagctgccgttattagccgactgagtaccattcttgaggataatagtttgcctctttacctcagccagttattgctgaaattacaacagcattatcactatcttgttgagcagattaaagatttggaatcccagttgaaacgaaagttggacgaagatgaggttggacagcgcttgctgagcattccctgcgtcggaacactgacagcgagtactatttcaactgagattggcgacgggaagcagtacgccagcagccgtgactttgcggcggcaacagggcttgtacctcggcagtacagcacgggaggtaggacgacattgctgggaattagtaagcgaggtaataaaaagatccgaactttgttggttcaatgtgccagggtattcatacaaaaactggaacaccagtctggcaaattggccgattgggtcagggatttactgtgccggaaaagcaactttgtcgtcacctgtgctctggcaaacaagctggccagaatagcctgggcactgacggcgcgacagcaaacttacgaagcataaaggcagaaatacaccagtttaaacaatcattcatctggttttgcgaatactgatattgatgatacaaacggcccaccggcctgttgaggaacctgtaaaacggaaaggctcgctgaagccgtatattttctggaggttcatcaggcgcggaactcatcgaggcgcgggaataaaatcccattcagacgccggatagattcaagcaagccaacttatcgtcaaaatcggtgttgcaaaaacgggagtgaccataga

SEQ ID NO: 8495 - DNA, 1281 bp, unidentified
  source 1..1281: mol_type = unassigned DNA; note = element_d526b78
  misc_feature 1..4: note = core
  misc_feature 5..412: note = LE
  misc_feature 413..1264: note = CDS
  misc_feature 1265..1281: note = RE
  misc_feature 1..232: note = bridgeRNA
ccccgttacctttctggtggccccgatggtggggttgcggtcgccgggtccggcatgactgagtgtgcccctgtctcttgcatgatccggggggtgttgtcaccgggtctggtggcgtcaggttgaccgctgatagggacacggcctcaacacaggtctcttcgtaacgtgggtgccggcagctgacgcgtcaccacacccgacgaccgtcgattcgatggaaggatggtggccgtcatgaacaacgacctgggcttcgacatctggtgcgggctcgacgtgggcaaacaagcccaccatgcctgcgcgctcgacaccgccgggaagaaggtggtcgacagacccttgccgcaggaccaggccaaactcgaagagctgttcgaacggctccaagcccttgggcgaggtgttggtgatcgtggaccagccgaacacgatcggcgccctgccgatcgcggtcgcccgcagcatgggtatcgatgtggcgtatctacccgggttagcgatgcggcgggcagccgacctatacccaggttccgcgaagactgatgcccgggatgcgttcgtgatcgccgacaccgcccgcactatgccccacacactccgcagggtcgacgggggcgaagagaccgccgccgagttgaaagtcctggtcgggttcgatgaagacctcgccgccgaagcaacccggctgacaaaccggatccgcggcctgttcacccagatccatcccgccctggaacgcgtgattggcccccgactcgccaccaaacagggcctggccgtgatcgaacacttcggcggcccccaacacctgaccaaggccggacgggcccggctccagcgggtgatcgcgaaagcgaatccacgcggtgccgccgagttcaccgaacacatctgggccgcactcggtgaacagaccgtgaccgtggccggaaccgtcgcggccgagcaagtcctgccgaaacttgctgcgcccctgcgcgacacggtggatcagcgtgccgaactggccgctcagatcgagaaggtcctcgatgtccaccctcttgcccccgtcctgacctcgatgcccggtgtcggagtcaggacagccgccagaatcctcctcgacgtcggtgacgccagtggcttcccgaccccaggacacttggccgcctacgcaggcctcgcccgccgacgctgcgacgtcctccacgccatgctccgcaaccacgagccctaccgaacaccggctccacacccgcaacccctcgccgcttgacgaagaacatagggaca

SEQ ID NO: 8496 - DNA, 1558 bp, unidentified
  source 1..1558: mol_type = unassigned DNA; note = element_d52e48d
  misc_feature 1..2: note = core
  misc_feature 3..260: note = LE
  misc_feature 261..1436: note = CDS
  misc_feature 1437..1558: note = RE
  misc_feature 3..239: note = bridgeRNA
ctcgtataattaaatagtagtagtttttaacgttcctctccaagaacggcaaaaatgtgctatactgttagaagatactgtggatcagttttaatcacctaccgcacgacggttttcaggaggctctgaccacagtctctttgtgcatttgttaatcggttagtttccgctcagacggattatcatcagcgaggttacaacggcaaagagattagtggtatcttcacacagtgtcaattttttactaaggagtattacttatgatttgcgttggtatcgacgtttctaaagacaagcacgattgctgcattttttcctcggacggtcaacttcttttaaaacccttctccgtccccaacaaccgcgacggcttcgattccctctattccgccatccgctctttcgagaatgatccggacaaagtaaaagtaggtcttgaagccaccggacattacagtttcaacattctggggcacctgttggaaaagggaattcattgctttgtctttaaccctttgcacaccaatctctaccgcaaatctctcaccctgagaaagaccaaaacggataaggttgactccaaaattattgcgaaaatgcttttgtctgaggtggacctcaagccctactctaaaacattataccacaatgaacaattaaagtcactctctcgttacaggttttctaaaattcgtgaaagaggaaatttgaaacaacaactcgcaagattggtgaatattctcttccctgaacttgaaaatcttgttccgtctctgcatttatcttccgtttacgctcttttggaagagttcccaggtgcttcttacgttgcgaaagcacacattacaaggctttctaatcttctctgcgcttcttccaaaggacactacaagaaagataaagccgttgagatccgtaatgccgcatcttcttccgtcggctcggttatgcccgccaaatccttggaactgaaacataccattcaactcatccgtatcctttccgaagaaattgacgagatcgaatcacaaattcaagagattatggagaaaatacagtctcctattacctctattcccggattaggtttccgcatggcggctatgattctttccgagataggcgacttttccaagttcgattccccggataaaatccttgccttcgcaggtatctctccttctacttaccaatccggtaaattggacaacgcttatgcgcacatggaaaagcggggttcccgatatctgcgatatgcgctatacaatgccgccatttacgtttgccattgggacaaaactttctctgtctacctgcaaaagaaacgtgccgagggtaagcattattacgttgctttatctcatgcgattaagaaacttgtgagagttatttaccgtttgcaactgacgggtgagccttacagaccggctgtttaagcctttcgttaccaaacatttttcagagcagcccgaggggtgctctttttgccgtcccgttttttctaaccgataaatttttttaaatcttgctcttttttgcttgatttttaatagttagt

SEQ ID NO: 8497 - DNA, 1494 bp, unidentified
  source 1..1494: mol_type = unassigned DNA; note = element_d5312e9
  misc_feature 1..2: note = core
  misc_feature 3..253: note = LE
  misc_feature 254..1474: note = CDS
  misc_feature 1475..1494: note = RE
  misc_feature 7..244: note = bridgeRNA
ctaatgagtgttagcgggtcggccatccggcagactcgcatccggtagcggccggtgggtgagcactcagtcgacctggacttcgagtcctggtgcgagatcgtcgcccccgccggtcgccgggaggatggatcgctgatgggatgtcgtgcccgctcgctggttggcgtgagcactgcttcattaggtcgctgatggttctcccgcacgctgccaggctgtgaccgtaaaccgtgcagatgggagaaccgaattgctgttcgttggagacgattggtcggaggatcatcacgatgtcgagctgattgactcggccgggcgcacgctggccaaggcccgcctgcccgagggcgtggccggggtggctcggttgcacgcgatggtcggtgcccagctcggcgaggacgccgaagtcgccgaggtgctggtcgggatcgagaccgaccgcggcccgtgggtggcggctctggtcgcggccgggtacgcggtgtacgcggtgaatccgttgcaggcggcccggtatcgggaacggcacagcgtctccggcgccaagagcgatgcggccgacgcgcatatcctggccgacatggtgcgcaccgactcgcatcagctgcggcaggtcgccgcagacagtcccgaagcggaagcagtgaaagtcgttgcccgcgtgcataagacgctgatctgggaacgcacccgccacacccagcggctgcggcacgcgctgcgcgagtacttccccgccgcgttggaggcgttcgaggacctcgacgccgccgacacgctggaactgctcggcaaggctcccgaccccgcgtcggcggcgaagctgacgctgggccagatccgggcggccctcaaacgcgcgcgccgccgcgacatcgacgtcaaggcgacccggatccaggccgtgctgcgggccgagcacctgggccgggccgccgtgatcaccgccgcgtactcggtgaccacgcgctccgccgtcgcggtcctggccaccctcgacgagcaggtcaagaccctggaaaagcaggtcgatgcgcattttggccggcacccagacgctgagatcctcctgtcccagcccgggatcggcgtggtgctcggcgcccgggtgctcgccgagttcggcgacgccccgggacgctacgccgacgcgaagtcccgcaagaactacgccgccaccagcccgatcacccgtgcctccggcaagaagaaggtcgtgctggcccggttcgtgcacaacgaccgactcgtcgacgctctcatgtcccaggcattctcgtcgctgcaggcctcgcccggagcccgcgcctactacgaccagcttcgcgcacgcgaggtcggccatcccgccgcgctgcgccagctcgccaaccggctcgtcggcatcttgcacggatgcctcaaaacccgcacgccttacgacgaagcgaccgcctggtcgcatcgcaccgaaaagtccgctgcttgacatttaagctcctgggatgt

SEQ ID NO: 8498 - DNA, 1476 bp, unidentified
  source 1..1476: mol_type = unassigned DNA; note = element_d53244e
  misc_feature 1..2: note = core
  misc_feature 3..229: note = LE
  misc_feature 230..1456: note = CDS
  misc_feature 1457..1476: note = RE
  misc_feature 59..228: note = bridgeRNA
agccccgcacccgtgcgcggatccgctgcgcatgaaacgcggacgacgtaaagtacatctcgcgtgtcagcacagaggtcggtttatcagtggtgccctgagcccgaatatcagtcggacccggagccccgcgagcaccccagactgttgccaccggtcgcagaccggagagcacgccttctagacttcgatgatgcgggctcctcgctgacacgatgaggaggtcacgatggaggttctatacgcgcgctgtgcgggactcgacgtgcatcaacaaaccgtcgtcgcctgtgcccgcgtcgcgtccggcacgacggtcgaacaggacgtgcgcacgttcggcacggcgacgggcgatctgttggcgctcgccgactggctggcggcccacgggtgtacgcacgtcgcgatggaatcgacgggcgtctactggaagccgatctggcacgtcctcgacggtcacttcgagttgattctcgcgaacgccctccagatccgcagtgtcccggggcgcaagactgacgtgaatgacgccatgtggattgccgacttgctggcccacgggctgatccgcggcagcttcgtcccaccggccgcgatccacgaactgcgggatctcacgcgcacgcgcaagcaattggtgcgtgaagtcagccaacacacgctgcgcattcagaaggtccttgaggacgccaacctgaagctcaccagcgtcctcagcgacgtgatgggcatgagcggtcgcgcgatgatcgaggccatcatccgcggcgaagcggacgcggaacggctggccgatctcagcgtcgggcgcctgaaggcgtcccgtcctgcggtggtggccgcgttgcagggccgcgtcaccgcgcaccatcgctttctgcttcagctgcacttaaaccagattgacgcgctcgaggtcgccgtgcgtgacgtggaggcgcgcctgggtgacgccctggcgccctttcaggccgccatcgaccgcctcatgaccatccccgcggtcgggcgtacggtggcgcgcgtgatcgtggccgaaatcggcgtcgacatgcaccgattcccgaccgccgcccatttggtgtcgtgggccggcctctgtccgcggcaagcggagagcgccgggaagcgtctctcgacgcgcacccgtcccggcaatccgtggctcaaaaccaccttggtccaagtcgcgtgggtcgccgctcgtacccggaacacgtacctgcgcgcgcagtttctgcggctcaagagtcgccgcggaccgaaaaaagcgattctcgccgtcgccgcctcgatcctgaccgcggcgtaccacatcctcaacgacggcacgacgtatcgggacctcggcgccgattacttcgaacgccgcagcaaagaccacctcacccgtcgtctgatccatcgcctcaaagaactcggcctcacggtggaggtgaagcctgctgcgtaacatcagagccgtttctttct

SEQ ID NO: 8499 - DNA, 1110 bp, unidentified
  source 1..1110: mol_type = unassigned DNA; note = element_d543779
  misc_feature 1..2: note = core
  misc_feature 3..162: note = LE
  misc_feature 163..1104: note = CDS
  misc_feature 1105..1110: note = RE
  misc_feature 1..164: note = bridgeRNA
ccctgtgtcttggaagtctgtcaggatgtggtgggcgggaagccgttgggtccttggcgcttgacgccgtgagccggctcggtctcccgcccgttccatctatcaacctgaacagttgcacgaggctgcaccaacagacctcgcatcacagggacaggcaccgtgatcatagctcttcgttacgtcggaatcgacatctccaagaaacacctcgatatctttgatgaggctgacggcgtgccgaggcgcattgccaacgcgacacaggccatcacacagcaggtggcgcgttggcaatgcgcctcgctggtggtcttcgaggcgacgggtatctatgacctcgcgcttcgcgaggcgctgcgtcaggccgggatccagttcgcacggatcaacccggcccgtgcccgcgactttgcacgggccagcggcctactcgccaagaccgatccgatcgatgcgcggatgctggcggcctttgcgcgggccatgcagcccgcccccgagcaggtcgccgatcctgcacggggcgccttggcgaggcttgcaaaacggcgggatcagctggtcctcatgcgcgcccaggagaagaaccggcgcagcgaggccgacgatcgcgccatggccgaacgcatcggccgcctcatcgaggtcctcgacagcgagatcgccgagatcgaggccgacatcagcgcattgattaaagccgaagcgcagatcgcggacgatgcgaagttaatgcgttcgctgcccggcgtgggtcccgtggcctgcatgcagctcatcgcgcagatgccggaactcgggcgggtcggaccgaaacaactcgcagcgctcgctggccttgctcccttcaacgtcgacagcggcaccttccgcggcaagcgcaagattgcgggcggccgaaagcgcgttcgtgacgccctttatatggcggccctcaacgcagttcgcagagctgatccgttcaaggccttctatgcacgactgcgacaggccggaaaaccagccaaactcgccctcatcgccgtcgccaggaagctgctcacggtcctcaatgccatgatgcgagaccgaaagccgtacctgcagaccaaaccaacataacagttg

SEQ ID NO: 8500 - DNA, 1277 bp, unidentified
  source 1..1277: mol_type = unassigned DNA; note = element_d544a66
  misc_feature 1..2: note = core
  misc_feature 3..68: note = LE
  misc_feature 69..1022: note = CDS
  misc_feature 1023..1277: note = RE
  misc_feature 1044..1275: note = bridgeRNA
ttaatgagatggtcactccctccttcccggtactatgctgaggacaggctttcattcggagaactatcatggaaaacattgcgctcattggtatcgatctgggtaaaaactctttccatattcattgccaggatcgtcgcgggaaggctgtttaccgtaaaaaatttacccggccaaagttgatcgaatttttggcgacatgccccgctacaaccatcgcaatggaagcctgtggcggttctcactttatggcacgcaagttggaagagttggggcattccccaaagctgatatcaccacaatttgtccgcccgttcgttaaaagcaataaaaacgactttgtcgacgccgaagctatttgtgaagctgcatcgcgtccgtctatgcgttttgtgcagcccagaacggaatctcagcaggcaatgcgggctctgcatcgtgtccgtgaatccctggttcaggataaggtaaaaacaaccaatcaaatgcatgcttttctgctggaatttggcattagcgttccccgaggagctgccgttattagccgactgagtaccattcttgaggataatagtttgcctctttacctcagccagttattgctgaaattacaacagcattatcactatcttgttgagcagattaaagatttggaatcccagttgaaacgaaagttggacgaagatgaggttggacagcgcttgctgagcattccctgcgtcggaacactgacagcgagtactatttcaactgagattggcgacgggaggcagtacagcacgggaggtaggacgacattgctgggaattagtaagcgaggtaataaaaagatccgaactttgttggttcaatgtgccagggtattcatacaaaaactggaacaccagtctggcaaattggccgattgggtcagggagttgttgtgtcggaaaagcaactttgtcgtcacctgtgctctggcaaacaagctggccagaatagcctgggcactgacggcgcgacagcaaacttacgaagcataaaggcagaaatacaccagtttaaacaatcattcatctggttttgcgaatactgatattgatgatactaacggcccaccggcctgttgaggaacctgtaaaacggaaaggctcattgaagccgtatattttctggaggttcatcaggcgcggaactcatcgaggcgcgggaataaaatcccattcagacgccggatagattcaagcaagccaacttgtcgtcaaaatcggtgttgcaaaaacgggagtgaccataga

SEQ ID NO: 8501 - DNA, 1354 bp, unidentified
  source 1..1354: mol_type = unassigned DNA; note = element_d546cbf
  misc_feature 1..2: note = core
  misc_feature 3..81: note = LE
  misc_feature 82..1104: note = CDS
  misc_feature 1105..1354: note = RE
  misc_feature 1087..1341: note = bridgeRNA
tgatggggtggacggctcccgctcccggcatctaggtgccatactgtggctgtcaaaggtcacaacattggagagccatccatgaaagaggttaccacgatcggtcttgatattgccaagcatgttttccaagcccatgggatagcggccgatggggcggttgtttttcgacgaaagttacgtcgaaacgaggttggagcctttttcgcagggcttccatcctgcctaatcggtattgaagcgtgcgctacagctcatttctgggcgcggcaactgattgatttgggccaccaagtcaaactcattccggcagcttatgtgaagccttacgtgaagcgacaaaagaatgatgccgctgatgccgaagccatatgcgaggcagtcactcggccgacgatgcgctttgtgccggtgaagaccgaggaacagcaaagcgtgctgatgcttcaccgcgtccgcgaactcctcattcggcaacggactatgcttgtaaacgcccttagggggcaccttgccgaacttgggctcgtgacccagctgggtgcccgcggcgttgatatgctgttagccttagtggaagacgaagaccacgacatgatcaccacagtcgctcgtacagccttactcccgatcgcccaacaattgcgggacctggacctgcaggttggcgaggtggataagcagatattggcttggcaccggtcgaatgatctcagccaaaggcttgagactatacccgggattggcccgattacggccagcgctatcgccgctacggtagctgatgcatctttgttcaaatcgggccggcagcttgccgcctggcttggccttgtgccgcgtcaaaactcgtctggaggaaaagagcggcttggcaaaatcaccaagcagggcgatccctatatccgacgattgctggtcgtgggtgcggccgctgtcttgcgatttagcaaaagcgcaaaatcgacgacagcggcgtggggtgctggaatgttgtctcgaaaaccgtacaccgtagtggccgttgctatggccaacaagatggcgcgcattgcctgggcgctcatggtgaacggaacacgctttaacggaatgaccgcgtaggccacctgcgcaggttcagcgaattggtgaggtgctgatggtgtgatgaatgcggtcgataccgagattggaaaaacccgtcgttgggagctggcgcaaaaaaagcgcgatgacgtgtctgggatccaatctgcggaatacatcagggccagcggcaatgaacggccgcatcaaaaggccggacacatgcctgcacccgaccgatatcaatacaccaaaatcttcttgccaatagggagccgtccacaca

SEQ ID NO: 8502 - DNA, 1170 bp, unidentified
  source 1..1170: mol_type = unassigned DNA; note = element_d54b98e
  misc_feature 1..2: note = core
  misc_feature 3..209: note = LE
  misc_feature 210..1157: note = CDS
  misc_feature 1158..1170: note = RE
  misc_feature 22..215: note = bridgeRNA
cttgtaatagcgcgatcagttattctcgacctgttccgtgaggaatggcctgccgcggtttgcaccccgcgacaggccgctgatgatcggatcgagcccacccagagcagtttgtggctgccccgtagcgtgatcgcgtcagcaccttcatcggacccggatggttgccggaacaacttggttcgcttcacaaggcagggtcgacgaagatgacacagactaacataacgacggccgggatcgatacgtccaaggccaagctggacgtcgcggttcatggtcgaaccgagcgctggcaggtcgccaatgctttgccgggttggcgcgctctggcagcaaacctggccaaggccggcgtcacacggatcgggatcgaggccactggcggctatgaacgtggcgtggtggagcatttgcgatcggccggctttaccgtgctgttgctgcagccgcttcaggtcaaggcgttcgccaaggtccatttgcgccgggccaagaatgatgcgctcgacgccgtattgatcgctgcctgtgctgcggcgctcgatccccctgagatcgcgccggatccgcgattgacggaattggccgactatctgacctttcttgagcagatcgaggaagacatccggcgcttcaagacccgtctcgagcacatcgacgagcctgcgttgcgacgcatcgtcgacagcgacatcacccggttgaaggcacgcagggcggcgcagatccgggacattgccaagcgccttcgtgcctacgacgatctggccaagcggctcaagctggtgctgagcgttcccggcatcggcgagcggacggcgctggcgatcgtcatccgcatgcccgagctcggtcgcgtcagccgggagcaagccgcagccctggccgggttggctcccttcgatgctgacagcggacagcacagagggcagcgcaaaatcgccggaggccgcagccgcctgcggcgctccctattcgccgccgcccttccagctgccttccgttggaacaaggctctgatcgcgctgtatgcccgcctcatggcaaacggcaaagtccataacgcagcgctcatcgcctgcgcccgcaagctcctgatctacgccaatactgtcgtgcaacggggcacgccctggatcgaaaaagccgcctagcctttaatggttg

SEQ ID NO: 8503 - DNA, 1381 bp, unidentified
  source 1..1381: mol_type = unassigned DNA; note = element_d558dae
  misc_feature 1..2: note = core
  misc_feature 3..336: note = LE
  misc_feature 337..1119: note = CDS
  misc_feature 1120..1381: note = RE
  misc_feature 1150..1369: note = bridgeRNA
tgatgctgtggacggctcctccaccggcgcatgagcgccatggatgtgggtgctgttgaggcccccacgattcggaggagccaggtcatgcaagcggtcacgacaatcggtctcgacatcgcgaaatcggtctttcaggttcatggcgttgacgcggaaggaacggtgatcatccgccgtaagctgaagcgtcgttatgtgctcgcattttttcagaagctaccgccgtgcctggtcggcatcgaagcttgcgcctcgtcacatcattggtcgcgcgaactccaggcgctcggccacactgttcgcttgatgccgccggcttatgtgaagccctaggtgaagcggcagaagaacgatgttgctgacgcagaggcgatctgcgaagccgttggccggccaaccatgcggttcgtggagaccaagacgcctgaacaacaagggtgcctgacgcttcatcgcacccggcatttgctcattcgccagcagacctcggtcatcaacgcgatccgtgcgcatctcgccgagtttggcatcgtcgcacccgtcggacgcaggggagtggatcaactgctcgctgtcgtcgcagatgcaagcgataagcggctgcccgaggttgcccgcgcctgtgttgcagctctcggcgcccatctgcagctgctgaaggcaccgattcttgaattcgatcgaatgatcagagcctggcatcgctcgaatgaaacgagtaggcggctcgacgcaatccccggcattggtcctgcactagccacggcgctggtcgccagtgtcgctgacccacaggccttccgatcaggaagggacttctcggcctggatcgggctcgttccgaagcagagttcgagcgggggcaaggagcggctcggcaatatcagcaagcgaggcgaccgctatctgcgcagcctgtttacggccggtgcgctcgccgtcatccgctatgccaagatccacggtaccacccatcgtccgtggctcacggctttgctggcgcggcgtccgaccaaggtcgcggccatcgcgctcgctaacaagctcgccaggatggcctgggccatgatggctaggggcgagcgctacagggaacctgtggcgctcgcggcttgaacgagatcgcgccggacatccggcgtgatgtgacggttgggagggcgaacagcacgtaatgcagagccggtcgatccggcgatcaggacaacccacaatgtgccagcgcatgatcgaatgcgaggttttgaccgggacctgatccgcggagggcattatggccagcggtcatgtgaaccgcactaacaggccgaacacatggctgcaccgaccaagcctgcgacgtgaagattccccttgccaacccggagccgtccacaca

SEQ ID NO: 8504 - DNA, 1354 bp, unidentified
  source 1..1354: mol_type = unassigned DNA; note = element_d561c05
  misc_feature 1..6: note = core
  misc_feature 7..242: note = LE
  misc_feature 243..1307: note = CDS
  misc_feature 1308..1354: note = RE
  misc_feature 30..225: note = bridgeRNA
gcttttatttttactgagaatttagaaaaggtcattatattgttgttatacaaaatgtattgacttttcgtgtgagacgaatgtgggctaggtaaacagatcgttataccgtaaaaaaggaattgtccacacgattttattctcaggagtctgaacagtacttaaggccgctatttggagcctggataaaacaaaaggatagacgaaggaggattaagtcgatacgatttaaattcttgactatgggtattagtaaacaatgcattgggatagatatctcaaaagggaccttcacagcatgtctgtgtcaacgttcagatgatggaggattagcgttctccaaggcaattgattttagtaacgacagcaaaggattcaaccagttccttcgatggacgaaaggagtcattgccagagatgcagcacttgtttttttgatggaagctaccggtgtgtattatgagaaccttgcccaccatctgcacaagattaagaaaagggttcatgttgttcttcccaatatgtcgaaacactatttttcaagcctcaatatcaagaccaaaacagatgctgttgattccagaatcttgagtcagttcggtgtcgaaaggattcataaagcatggaccccgcctccagccatattattgcagctgagaaatttgaccagatactatgtccagctacaagagcagaaaactggattgggtaacatcaaacatagcaaagactgttcgcatgatatccaaacctttatcctgaaaagcaataaaaaacttattactgagatagataaggaaattgtcagatgcctcagggaaatcaacaggctggtaaagtcggacgtgggtctccataaaaaaattgagaagcttgcaacgataaaaggtatcggaatgatcaccatagttaccattcttgctgaaacaatggggtttgaagagtttggtagcgccaaacaacttgtcagctatgccggctatgatgtggttcaacgggaatctggaacatcggtcaaaggaaaaaccaggatatcaaagaaagggaatagatatatcagaaatgcgctgtatttcccggctatggtagcctgcagatataattctgtgttaaaggatgcttatacgagaattatcctgaaaaagccgtcaaaaatggtcggacaggttgctgtacagagaaaattattaatcttaatgtatacactttggaaaaatgacaccgtgtttatagaaaattataaagtaagtagtcccgatccgaaaaccgagactacactagatagttcagaacctgaacttctttagattacaaaaatacttttttgtctaaatatttggaatttaaaacagta

SEQ ID NO: 8505 - DNA, 1441 bp, unidentified
  source 1..1441: mol_type = unassigned DNA; note = element_d5659e4
  misc_feature 1: note = core
  misc_feature 2..75: note = LE
  misc_feature 76..1113: note = CDS
  misc_feature 1114..1441: note = RE
  misc_feature 1221..1435: note = bridgeRNA
taatgggatggtccgccgccttttctccatagcaaggagctgaggcgtattagggtatttggaaggaggcagtccatgcatcttcacaccattggcattgatcttggcaagacggtctttcatctcgttgggcttaattttcgcggcgaagttgaagtgcgcaggaagttttcacggagccagcttttgcgctttaccgccaacctacgtgttgaattgatcggcatggaggcttgcggtggagcgcacttcctcgggcgtcttctgcaagagcaagggcatgaagttcggctgatgcccgcgcaatatgtaaagccttatgtgaagaccaacaaaaacgactatatcgatgcagaggctatcgccgaagctgtcggacgacccacgatgcgatttgtacccatcaagaccgatgaacagttggacatgcagtcactccatcgggtgcgtgagcgctgggtgatgcgccggacagcagtgatcaatcagattcgaagtttgcttcttgagcgtggcattcccttgcaaaagggaagaaagaatcttggtcatgcacttcccggactcctggaagatgctacgacgaagctttctggatcactacgcatgttactgatgcaactgaaagtggaactggatcagttggcccaacggatcgacgaggcagatgcactgataggcaagactgccaagacaaatgatgcatgccggagactggtagatattcctggcgtagggcccatcatcgctacggcattgattgccgccatcggaaatggagatgcctttagaaaggggcgcgaatttgctgcctggattggagtcgttccgcgggaatactccacaggaggaaaacagaaattgctcggcatcagcaaacggggaaatgcctatctgcgcaagctgttcatccagggagcgcgagccgttttgcagcacagcaaaaacctgtcatcttctctcggctcctggctatcgcaacttacattgcgtgcgcaccctaacgtagttgcggtagccttggctaacaaattggcacgaatcgcttgggcagtactcgctaaaggccagcaatatcatccttcgatatgcacgaacaccgccattgcctgaaaatatggcctgcaaatgacgcctggcaaagaacgccaggcttggaaatcgcttttgcgattcccacattcgcagaccatctgtgacgacgaatatgaattcccctgccaggtctgctggcgaaacatgagatggcacaacggtcgaacccggctctctgaaatcctggcctaaggaaaagtctcaaagactgaagaggttatgaggaacagaaagcagcgcattccatcatggcaaggagttttggctccaacaaatgccgtatacatttgcgcagacccttcatgctctctcactttttgcttgcaacaaggcggcggaccataca

SEQ ID NO: 8506 - DNA, 1093 bp, unidentified
  source 1..1093: mol_type = unassigned DNA; note = element_d569451
  misc_feature 1..2: note = core
  misc_feature 3..220: note = LE
  misc_feature 221..1078: note = CDS
  misc_feature 1079..1093: note = RE
  misc_feature 23..207: note = bridgeRNA
cttgtatctagatcctcagcagagtttgcacagatcctgatcggggcgccagctcgttgctacctgggtggcgaacaccgtgcgttagccagagcggcgtcccgatcgttgtcgcgcgagcccgaacagttgcgggggccgagagagctcgagcccggatactgacaaggacgggccaggcggcgcactcgaacggggatccacatgctcgtcggaattgatgtcgcgaaggcggagacgcgatggcgccgagctgatcgtactcgaagcgacaggcggcgatgagctgtcgtgcgtcgcggcgctggcggcggtgagcgtaccgatcgtggtcgtgaatccgcggcaggtgcgcgactttgccaaagccaccggtcagctcgcgaagacggatcggatcgacgccgatattctcgcgctcttcgcggatcgggtgcgccccgaggtgcgcgcgctgcctgatgcggaggcacaggagctcgaggcgttgctcgcgcggcgccggcagttgctggagatgctgcaggccgagcgcaatcgcctgtggcaggtcttcggacgcggcaaggcaccggtgaagaagagcttgaaagcgcacatcgccttcctcgaacgcgagctgcggatggcggactcggacctcggcgatcaagtgcggcagagtcccgcgtggcgcgagcgcgatgatctgcggcgcagcgtgcccggagtcgggccggtgttgtcactcacgctgcttgcgaacctgccggagctgggccgcttatcgcggcgcgcgatcgccaagttggttggcgtcgccccgctgagtcgcgactcggggacgctgcgcggacgacgattcgtccagggcggacgggcgagtgtccggggcgtgcaatacatgggcgcactcgtcgcgacgaagcgcaacgtggtgattcgggcgttctacactcggttgctcgccgccggcaaaccgaagaagcttgcgctcgtcgcgtgtatgcggaaactgctcacgatcctcaacacgatgattcgcactggtcaacgctggtgtgcggagcacgcggatcgcacactgattcaagcttgattttcgagacagttg

SEQ ID NO: 8507 - DNA, 1381 bp, unidentified
  source 1..1381: mol_type = unassigned DNA; note = element_d56c257
  misc_feature 1: note = core
  misc_feature 2..89: note = LE
  misc_feature 90..1121: note = CDS
  misc_feature 1122..1381: note = RE
  misc_feature 1144..1373: note = bridgeRNA
caatgggatggactcctcctcacctactcggcatcaaagtgccagactggagtttcgagaaaccagtcaccaggaagaaggagtccaagatgaagattatccgcgtcggagtagatttggcaaagagcgtctttcaggttcacggcgttgatcgcgatgagaagtgcgtatggcgccgcaagttgagccgcaacaattggctggagatcttgctggagaatattgagccgggctgcgagattggcatggaggcctgcggcagtgcgcatcactgggcgcgcaagctcgaagcactgggatacacggtgaagctcctcgcgcctcagttcgtaaagccctacgtgaagagcaacaagaatgatgctaatgacgctgaagcaatctgcgaggcaatgagccggcccaacatgcgatttgtgtccgtgaagacggtagatcagcaggacactcaggcggtgcatcgcatccgctctggtctgatggagcagcgcaaggccaaggccaatcaggttcgaggtctcgcctcagaatatggcgtggttgcgccgaaggagttgctgcatcttcgccgggcaatcccctgctggctggaagatgccgagaacggcttgagtgggcggtttcgcaagctcctggtcggcatgtggcacgatctgttacgactggatgatcggatagccgagctcgatcgcgagatcgccctgattgcagcagcagatcccgtggccaagcggttgcagcagttgcgcggtgttggtccgatgattgccacggccttgttggccacagtcggtgatgcccatcagttcgccaacggccgacagatggccgcttctcttggcctaacaccgaaacaaaacagttcgggaggcaaagagcggcttttgggaattagtaagcggggcgacgcctatgtgcgatgtctgctcgttcacggtgctcgcgcgatgatccggacagccaaagcgaaagatgaccgactgagccagtgggtcacgcgtatcgctacgactcgccaccctaatgttgccgcggtggcgatggccaacaagacggcgcgaatcgcctgggcaatgataaggaacggaacggattaccaaccagaattagtcgcaggttgaatagcagtcaatcagggagtacatcaaccacgattgctaaacaaaccgcttgatggccaacaggtcgaaccggcgctagcaaaacccgagaatgtctgaggctgagaagcccgtcaaagcgatagggagctggcgcgcgaatagcccattagggtccagcatcctaaatggatgtcgcagtaagagaccggatatacgtgagcagtcgtaccttacagccaaaaaatcgggttgtttgcaaacgagggggagtccatata

SEQ ID NO: 8508 - DNA, 1362 bp, unidentified
  source 1..1362: mol_type = unassigned DNA; note = element_d572118
  misc_feature 1..2: note = core
  misc_feature 3..80: note = LE
  misc_feature 81..1010: note = CDS
  misc_feature 1011..1362: note = RE
  misc_feature 1085..1349: note = bridgeRNA
cttgatggtgtggacgccccctcacggcatcgctgtgccaaggtagcggtgtcgaaattcgctacgaggaggaagcgtccatggagaaggttagcattgtagggctggatattgccaagagttcgtttcacgcgcatggcgcggcggcaaatggatctaaggtctttagcaaggcgttgccgcgagggcgggtgctagagtttttcggtcagattgagccttgcaccatcgctttggaggcttgcgcgggtgcgcatcactggagccgggagctttccagacttggccacgatgtcaggctcatcgccccgcaatacgtcaaaccctatgtgaagcggcaaaagaacgatgcgaatgatgccgaagccatcgctgaagcagcgtcccgaccgaccatgcgctttgtgacgaccaagacaaccgagcaacaaggtcagtcgatggtactcaagacccgcgatcttttgacagggcaacgtacccaggcgatcaacgcattgcgagggcatctggctgaacatgggattgtcgcgccgaaaggccctcagcatctgcctcggttggaaaaggctgtggctgagaatggagaacgattgccgcccgaagtcaccggcctttgccaaatattcttcgatctcatcgccgggctaagcgcgcgcattgacgcgctgacccggcaacttcgacagattgcccgacaggacgatgtggcgcgcaggttgatgaccatgccggggatcggcccggtgacggcggtatcgattgccgtgctggcggcaccgccagagatgttcagcaaggggcgcgacttcgcagcctggatcgggctggcaccacgccagcattctacgggcggtaaaacaaggctgggcaagatatcaaaaatgggtcagcgcgacctgcggcgtttgctgatcatcggtgcaatgtccgcgatccaagccgcgcaaaaacgcggcggcgcgccagatgggtcgtggctggcccgtatgttggctcgcaaaccttaaatgctggttgcagttgcgctggcaaacaagatggcgcggatggcctgggcgatcatggctcatggcggcgtctacgagacccctgccaacgcctgagcgcgaaggcaggctggggtgcggtggttctgaatggaggtcatggcaaagcgtcgacgagatcaggaatgggaaaaccagtaatgtcccgagtagcttgtactacggcctctcgttttggacctgttcctcgaactcaccatgagggcccgcggcattgaaggtcgcaaccagaggccggatacacgaaggaactcgaccgcaatgctgttgccaaagtcaaaaaatcgcttgcagccccgggggcgtccataca

SEQ ID NO: 8509 - DNA, 1337 bp, unidentified
  source 1..1337: mol_type = unassigned DNA; note = element_d574801
  misc_feature 1..2: note = core
  misc_feature 3..269: note = LE
  misc_feature 270..1100: note = CDS
  misc_feature 1101..1337: note = RE
  misc_feature 1131..1332: note = bridgeRNA
tgatgtgatggacgtccctcctcaacataatcctgccacacttatgttgagccgccccatttatagaggaacaacatcatgaacacgataaaagttgtcggtatcgatctggctaaatccgcttttcagctttgtgtctggatggatgatgggaccgttgcctggacccgaaaagtttctcgcagcaagctgttagacacggttcgtcaattcccgtcggatacaaagcttgtgcaacctcgcattactggaggcggacttttcaatccatgggatacgccatccggctcattccaacccaacatgtaaaggcgttaactcgtcatcagaaaaatgatgccaatgatgctctggcgatatgtgagacagcattccgtccggggattcactttgttgccgtaaaaacggttgagccacaggatatcaaagcgctgcgttgtgcccgtcagttgatggtggaacagcgcaccgccgctgccaaccaaattcgttctctggccgctgagcagggcttcgagttcccggttgggatacacacgttgcaacagcgattacccggtttgattgaagatgcggagaaacctgtgtctccggtattacgccatttactttccactttattgggaaacatccacacactgaatgaatatattagttcaacagaatatgaaatcgcagcattgtatcaacagcaacccaggtatcgaatactaatgacgataccgggtgttggcccgctcatcgccgccgcttttttaagtgaggttgatgcagaacaatttgctaacggaagacaactttccgcctggtgcggtctggttccccggcaacacagttccggcgggaaacacattctcacttcgatgactaaaaatggtaactgtgaccttcgaacactcatcattcatggcgctagagcagtcatacgctgtgcccaaaagcgggatgatagcctcggaagatggcttaatcatgtcactgagcgccggggaaaaatgaaagccactgtggcgctggcaaataagttaacacatattgtctggcggttgctgtctgaaccggttgatttcgatatggacaaggcatttgcggcaaggtaataccttttgtagcacaatgtgcaattttacttagtttgcgggcactgatgaaaaaacggtaaccctcccctgtgaaaacctgaagtagatcctggtaaaattcaaataccggcaaagtgataaggaaacagggtgcggatgacatcatggcgcgggcaagttttcccaaaaagacgccggatatatgacagcaaaccgtatcacgtcagtacttgtacaccacgggacgtccatata

SEQ ID NO: 8510 - DNA, 1745 bp, unidentified
  source 1..1745: mol_type = unassigned DNA; note = element_d578bc0
  misc_feature 1..2: note = core
  misc_feature 3..292: note = LE
  misc_feature 293..1582: note = CDS
  misc_feature 1583..1745: note = RE
ctagtaccatataagtgtagtcagataggtcgctcctatctactgcacttattttttcgtatgataagggaagcagttggtctgtcgaaagcccaccttggtgcagatgctttttactgccaccgcagagaagtgcgacagccaaccccttgttgtatgcgcccgagtaagcaggttgtccctttcatagagaggcatacgtgtaacaaactaggttgggataggtaataagtgtggctggctacaaaaatccaactgactgctaaacttttgtaaaggaggacgaattagtatgactcgtatcagtgccggtgttgatgtgtcaaagaacaggagtaccgtatgtattatggaccaggacggtaaattcattatgcggccgtttcttgtctggcattcgactgaggagctcgattttcttgcagatacgctcaagaggcttaatggagaggttagagtcattatggaatcgaccagtgtttaccaatatccgattgctcttcaacttaaagaaagaggactttttatctctatcgtcaatgcatatgagatgaagcagttcgctaatatagattttagaggcggcaaaacggataagaaggactcccgcaccattgccagttacggaattagttattgggataagctggtggaatggcagattcccaaagacacctattttaacctggatctgctaaacagaacctatatgaacgcgaaaaaacatcgtcagataatccttcaggaactgcagcattatattgactgtgctatgccgggaatggataaagagcttcattctctcaatctgtccactaagaaagactttatgctggattttgtggagaaattttggcatcgtgatgagatcgtaaatatgacagaggctgaatttaccgaagttttcactgcttgggcaaagaaaaagggataccgcccagtcgaaggtaaagccgctaagatttacgcgatcgccaaaagctgtatcccttattacccagcaaatccaacggttaaaaccattctccaatgtatcgtcgacaagctgagcggagtcaacaggactcttgtcaccatagtaacacaaatgattgaagaggccaagaaacttcctgaataccagattgttagagaaatgccaggcgttggagatccattagcagcaagattcttcggctccgcaggagatatccggcgattcaaaaactcaaaggcactggtcgcatatgccgggatagattcacctcccgatgaatccggagatttcagtagtacgcataggcatataacaaagaaaggctcgaaagtatttcgtgacactggttacgaaataatgatggctttaagagctcagaagagaacatgggaaaaggtcagaaaaaatcctgaagtttatgattatatgctcaagaaagaagccgaggaaaagccccgaaaagtagcaaagatcgcagcattgaacaaattcttacggatagtatatgcacgaataaaagagttatacgataatatggcgcttgcagaaagagccaaggctaaaaccaaatccaaaaccaaagctaaaactaaagccaccgcctaagctcaatgaactagcaagatttaactaaagaaaagcgcgaaaaaaccgagggaaagatcggtctttttgtgctgcccaaaattaagtggacaaagagaaaacgccggatttagaaaaaagttgcaaaaaaaataaaattggcacttgctttttggtagcagga

SEQ ID NO: 8511 - DNA, 1441 bp, unidentified
  source 1..1441: mol_type = unassigned DNA; note = element_d57a8ff
  misc_feature 1: note = core
  misc_feature 2..227: note = LE
  misc_feature 228..1259: note = CDS
  misc_feature 1260..1441: note = RE
  misc_feature 15..236: note = bridgeRNA
ctgcttgagactccgagcaggcgctgtgggtgatccgtagcgtcgagaggtccttgcgggttcgctctcgaagtgcctgccggctggtgtttacgggtctggctttctaacgaagcgcgtctcgcggggatctcgccgcggtgtggctcgaaagaggaacgcgcacgaatcgacccgaagcaggagtgcccgccgcggttccatccgacgagaccttggaggcgttcatggcagtgatcatcggtgtcgacccgcacaaggcgacccatacagcggtcgcgatcagcggcggcgaggaagagctggggcgtaagaaggtgcgtgctggtggcgcgcaggccgagcagctggtggcgtgggcggagccgttccgagcccggacctgggcgatcgagtccgctggcgggctcggctacctgttggcccagcaactggtggcggccggggagaccgtggtggacgtgccagcgacgctggcgtcgcgtgtgcgggtgctctccacaggccggtcggacaagaacgaccccaacgacgcactctcagtcgcgatcgctgccttgcgttcccgggggctgcgccgagtcgatacggtcggccacagcgaagtgctgcggctgctggccaagcgcaacaccgacatcggcaaccaccggacccggctcgtgtgccgcatgcacgcactgctggccgaactcgccgggggcgggatcaccaaggaaatcaacgcttctgacgtcgaccgattcctcgaggtcctcaccccagccaacccggtcgagcagacccgctacgacctcgcagtcgagctcctcgacgacatccgccgcctcgacacgcagctcaaggcatcacacaagcggatccgtgacgctgtccgagcctcgggaaccaccgtcaccgacctattcggcgtcggtcccatcctcgccgccatgctcatcggctacagcgcagacatcacccggttcgccacccgggaccgctacgccgcctacaacggcactgccccggtcgagttctcttccgggggccgcgtcgtgcaccgggtctcagaacgcgggaaccgccagctgaaccatgccatccacatggccgccatctgccagctccgccagccccattcggagggtcgtgcctacttcgaccggcgagtcgccgagggcaagaccaccagggaagccctccgggcgctgaagcgacacgtcagcaacgctgtctaccgccggctcatcgccgacgcccgacgcgcaggccgatagcgggcccgggaggacaagcgggaacgactcgaagccagcgtgaccggctctccatccctgacggccggctcttcggcgaagtcactcccggacccaacccaacgctaggacagccgacgtcgctcggctccttcgccgcgccccgacacccctctgaagaagtccttgacccaaagaggatt

SEQ ID NO: 8512 - DNA, 1347 bp, unidentified
  source 1..1347: mol_type = unassigned DNA; note = element_d5a6709
  misc_feature 1: note = core
  misc_feature 2..70: note = LE
  misc_feature 71..1105: note = CDS
  misc_feature 1106..1347: note = RE
  misc_feature 1107..1337: note = bridgeRNA
tatgggatggcccgcccttccgaggacatcgagtatgatgatccgtcattgagggaagaggagccgatccatgacgatttcaattttgggtatcgatataggtaaaaatagctgcagtgttgtcggcgtcgacgacaaaggtgcggtaactattcgccgaacgatgcggcggcagacgctgcttgattttgtcagcaagattccgacctgcatcatcgcgatggaggcgtgctgtggtgctcaccatctgggtcgactttttgtgtcccagggacacgaggtccgactgatgtctccggaatatgtccgcccttatgtgaaggctcagaagaacgatgaccgggatgcggagggcatagcagaagccgcttcgcgtccgacgatgcggtttgttgacctcaaaagcgaagaacaactcgatatccagtcgttgcacagggtccgatcccgcctcgttgcagaaagaacgacgctgatcaatcagatgcgtgctattctcttggagcgcggcctgatcttcgccgcgggccgttgcaaattcgaaagtgctgtcgacgcccttctgaatgagcagaccatcagcttatctgggcgcgttcagaggctggttgccgaacttcgagacgaatggaagatgctcgacaccaagatagcagccctcaatgccgagttcttgtcgctggcccgagatgatctcgcaacgcgacggctaacggatatcccaggaattggggtactgaacgccacagcgctgatcgccgctataggaaacgccagcagcttcgatcgtgcccgagatcttggcgcgtggttaggacttgtaccacgacaatttacgaccggcggcaagccacggctgctgggcatcacaaagcgtggcaacgtctacctccgaactttgcttgttcacggtgcgcgagcggccatgcccacactcagtcagagcgacacccctctcgggcaatggctacgaggcctgctttcccggggtatgcaccgcaatgtcgtaatcgtggcgcttgcaaacaagctcgcccgcattgcctgggccgtcttgcgaaaggaacgtccattcgatcgcgcgtacggcgccaccacagcgtaaaaagattggctgcgtctatctgcagcccatgacgtttgcgagaaggatcatagatggcctgacagttgaccggcgtacggaaagcccagcagtgcaaatggctcgttgaagccgtgttgattattgaggctccggacgcgcggatatccatcttggccacggcatgaccgtgagaccgaatacgttgaagcagactgtgcaggattctaaaaattctacttgcgaacagggcgggccatacg

SEQ ID NO: 8513 - DNA, 1425 bp, unidentified
  source 1..1425: mol_type = unassigned DNA; note = element_d5ac63d
  misc_feature 1: note = core
  misc_feature 2..77: note = LE
  misc_feature 78..980: note = CDS
  misc_feature 981..1425: note = RE
  misc_feature 1192..1416: note = bridgeRNA
taatgagatggtccgccgcttgatctccacccggaaggtaggcgattgtgttggcaggtacaaggaggatcatcgacatgcagattcattcggttggcatagatctgggtaagacgacctttcacctcgtagccctgagcgcagctggcaaggtgctgttgcgcaagaagttcactcagaagcaactgatcaccttcaccgcgaacatgcagacctccttgatcgggatggaggcatgttcaggagcgcacttcctgggccgggctttgcgagcgcaaggccacgacgtgaagctgattccagcgcagtttgtaaagccgttcgtgaagtcgaataagaacgacttcctggatgctgaggcgatcgctgaagccgtcgaccgacagaacatgcgcttcgttccgatcaagaccgacgatcagctcgacctgcaagccatgcatcgtgtgcgtgacaggcttgtcgctcgccggacgtccgtgatcaaccagctgcgagcctttctgctggagcgcggcatggttttcgccaagactcccatcaagttgagacaagcgatgccagagatactcgagaacgcggagtcgaacctgacgccacgcatgcgcaaccttgtcagcctgctctggagcgagtggaaggatcttcagcagcagatcgttgcgatgaacgaagaggtcgagcagatcgcttcttccgaccccgcatgccaacggctgagacaaatccccggcatcggccccttggtcgcaaccgcaatcgtcgctgcgatcggcaacggagcagccttccataagggccgagagttctccgcatggcttggacttgtaccccgacagcactcgaccggcggcaaggcgagactcttcggcatcagcaagcgaggtaaccgctacctgagaaagctgctcgtccatggcgcccgatcagcagttctcatcgtcaagcgagacgcgttccccgtttgggccttggcttgatggtctggaacaacgagcaccggtgaaggtcgtcattacagccgcagccaacaagcttgctcgtatggcctgggcggtgctctcaagcggcaatgactaccgcccagcaacggctccgatgccggcctgagcaggcgcggaaaagacgccttcggcttggaagcgcagaatcgcgctcccactttaccgcaccacgacgacgatttagagttcccaccaaggtctgcactggacagctaagacgaccgaacagttcccaacggcgtgctcaaaacctgctcccgaaaatggtcttccatgaccgtgccgtttatcaggtagagcacgcagcgcaactcatcatggccaggagactagaccctccacccaaaggccgaatacatttgcgcagacctgtcgatgtcgcccttcgcttttcccttgcagtcgtgcggcggaccataca

SEQ ID NO: 8514 - DNA, 1450 bp, unidentified
  source 1..1450: mol_type = unassigned DNA; note = element_d5afd73
  misc_feature 1: note = core
  misc_feature 2..229: note = LE
  misc_feature 230..1435: note = CDS
  misc_feature 1436..1450: note = RE
  misc_feature 9..233: note = bridgeRNA
cgttactatgttcgcacctcgataatcgaggttttggccagccaggcccggcatgattcccgcccccagtcgtaaccatgatccggggggtgttgtcaccgggtctggtgggtggctggtgatcgctgataggggtttagcacggacattccgacgccgtccgtaacgtggatgccgagacttgccaccagggttcttgcaggccaattcactttttgtgccaactgcaatgcaaaactttccacttcatgacgccgtcgatgtcttcatcggcgtcgacgtcggcaaaggctaccaccatgccgtcgctctcgatcgcaacggccgtcgcctctacaacaaggccctgcctaacgatgaggcccaactgcgcgccctcatcaatgagttgaaagcccacggccagctcctgttcatcgtcgatcagccggctaccatcggcgcactgccgctggccgtagcccgcgacgccggtgcgctcgtcgcctacttgccaggtctggctatgcgtcgcatcgccgacctgcacgcaggcgaagcaaagaccgacgcgcgcgacgccgccgtcatcgcagatgccgcacgcaccatgccgcatacgctgcgctcattgcgtctggccgatgagccgctcgccgaactgaccatgctctgcggtttcgacgacgatctggccgagcaagtcaatcagaccagcaaccgcattcgcggcctgctcacgcagattcatcccgcgcttgagcgcgtgctcgggcctcgcctggatcaccccgccgtgcttgatctgcttgagcactacccctcgcccgcagcactggccgccgccgcccaaaaaacgctggcgaatcgcctgattaagctcgcgccacgcattggcaaaagcctggccgctgacatcgcgcaagcgcttaccgagcaaaccgtagtcgtgcctggcactcatgccgccacactggtgatgccgcgcctcgcccaacaactagccgccctgcgcaagcaacgcgacgagatggccgccgaggtcgaacgcctggtgcaaagcaaccctctttggccggtcctgagcagcatgcccggagtcgggctcaggaccgcagcgcgactcctgaccgaggtggcgcacaaggcctttgcctcggccgcccacttggcggcctatgccggcctagcgccggtgacccggcgctctggctcctcgattcgaggcgagcatccctctcggcgtggcaacaaggtactcaaacgcgccctgtttctctcggcctttgcagctttgcgagacccgatctcaaaggcttactacagccgaaaaatccagcagggcaagcgccacaaccagacacttatcgcgctggctcgccggcgctgcgacgtcctttttgccatgctgcgcaacggcactttttatcaacccaaaactgccaccagtgcttgacgaactacatagggg

SEQ ID NO: 8515 - DNA, 1498 bp, unidentified
  source 1..1498: mol_type = unassigned DNA; note = element_d5b1927
  misc_feature 1..3: note = core
  misc_feature 4..135: note = LE
  misc_feature 136..1167: note = CDS
  misc_feature 1168..1498: note = RE
  misc_feature 1201..1374: note = bridgeRNA
aacatggggtaatcgcggcgcgatccgcccttggcccttttagaagtgatgactggcgggggtggttgcccccgataagatgaaaaaacgggctcacgattggaaccgggcccaagcatcgaacggagagcaaccatggaccaatatatcgggcttgatgtttcattgaaagaaaccgcgatttcgatccgtgaggacgggaagcggatctggcggggtaaatgcccttcggatccaaagattctagcgcgaatgatcagcaggaatgccccgtacgccaagcgagttgtatttgagacggggccgctgtcgacgtggttctaccatgcgctgacggccgagggcgtccctgcgatctgcattgaagcgcggcatgcgcagaaaatattgaacgagacgctgaacaagaccgatgccaatgatgcggatggcttggcccatctggccgaagccggcttctacaaggcggtccgggtgaaatctttcgacgccatgctgacacgcacgctggtgggggcccgcaatcagctcctgagcatctcaacccaactgagcaaccagatccgcggcctgatgaagacgttcggtctcatcgtccccaaaggaacaggtcgggtgttcgatagcaatgtgagggagcttttggatgaaaatgtcagcctagcacggatcatattgcctctgcttgaggcgtggcacgacatccgcacccacgcggcggatcttggtcgccagttgctcgtagctgcgcgggagagccaagctacgaggcagttgatgacgatcccgggtgtcggcgccgtcacggccgtttcctacgtcgcagcaattgaagatccagaaaatttccgaacgtcacgctcagttggtgcctggctcgggctgacaacgcggcgttaccagtcaggcgaagtcgactatggtggccacatctcgcgaaaaggcgacaatcatctgcgaggactgctttatgaggcggcgacggtgatcctaacaagaaccagcgccaggagcgagagcagtctcagaagctggggcattaagttgcgtgagcggttgggcttcaagcgcgctgcggtggcggttgcccgaaagcttgcggtcattatgcacagcatgcttaagacaggagaggtgttcaacagatcggccggcgccaccgcataggaagcgccggccttctccctcagcgcgtcaatctgatttgaggcactgagcgtccctgctgtgggcgtgggttggatcattccgtgttatggaggctgcagctcattgagactgcgcgctaaacagaggaaggtcctacctgcgaagaaccataatgcggcgactcttgtcgaccgcggagacaaccctgctccccggcgccgggcagttctgaataaaacgtggccgctgaggccgattaaaaaaatcgatttacgccgcgtcgcctgctttgcatacggcgacgatgctggctgcaaaaaccaccttgacgggagcgttgcgattagac

SEQ ID NO: 8516 - DNA, 1356 bp, unidentified
  source 1..1356: mol_type = unassigned DNA; note = element_d5bf094
  misc_feature 1: note = core
  misc_feature 2..71: note = LE
  misc_feature 72..1097: note = CDS
  misc_feature 1098..1356: note = RE
  misc_feature 1124..1353: note = bridgeRNA
taatgagatggtcacccccaccctacgagtgggttacgctgcaggaggttttctctctgaaggagcaaatcatgcaagacgcaacgctcgttgggattgatctgggcaagcattcgttccaccttcatggccaggatcgccgcggcaaagcagtttttcgcaaaaaggtagggcgtaagcaattgttcgaattcttcgcgacattccatacctgcaccgtcgtcatggaatcatgcgctggtgcgcattacatggcccgcaagctcgctggtttcgggcatcaggtcaaactgatttcgccgcagttcgtacgccccttcgttaaaagcaacaagaacgacttcgtagacgcggaggcgatctgcgaagcagcatctcgtccggccatgcgattcgtgacacccaagacggaatcgcagcaaacgctatcggctttgcaccggttacgcgactcgctggtgcgtgatcgagtaaaggcctccaaccagatgcacggcttcctgctggaattcggcatcagcctgccgatcggcaatgccgtcatcacacgcctgccggcagtgctcgctgagcatgcattgccgccacggctggtcgcgatccttgaacgcttgcacagtcacttcaagtacctcaccgaacagatcggcgaaatcgacaaggagatgggccgccagctcgccgatgacgaggtcggccagcggctgctcacgattcccggcatcggtccgatcactgccagcgtgctggctgccgagatgggcgacggcaagcagtacgggtgtagccgcgatttcgccgcttctgttgggcttgtgcctcgccagtacagcacgggcgggagggctaacctgctgggtatcagcaagcgaggcgacaagaatatccggcgtctgcttgttcaatgcgccagagcttatatgcagcgccttgacaggcaaatcggcaggcttgccgaatgggtccggctgatgctgacacgacgacattcaaacgtcgtagcctgtgcgctggcgaacaagctcgcgcggacagcctgggcactggcaacccataacactactttcgatgcaggatcgaccatcacgcccgcctgactggccaatcccacttagctttatggaagtcaacccatctggttttgcgatcgctgaaatttgatgacgtgaacggcacaccggcctgacggacaacctggttcaaaaatcggctcttgaagccgagccactttttaggaccatcaggcgcgattctcatcgtggcgcagggagcaatcctcaaacgacgccggatagatttaggcaagccaaccacaacgtcagaaatcagggttgcaaaaacgggggtgaccataga

SEQ ID NO: 8517 - DNA, 1342 bp, unidentified
  source 1..1342: mol_type = unassigned DNA; note = element_d5d296c
  misc_feature 1..2: note = core
  misc_feature 3..69: note = LE
  misc_feature 70..1074: note = CDS
  misc_feature 1075..1342: note = RE
  misc_feature 1111..1340: note = bridgeRNA
ttaatgagatggtcacccacaccctgtgagcggtacgctggcagggtgttttattttgaggaaaccatcatgcaaaacgttacgcttattggcatcgatctcggtaaacattccttccatgtccactgtcaggacaaacatggcaacgccctgttgcgtaaaaagttttcccgcactcagctgattcattttctcggttcctatcaggcggcgaccgtggtgatggaggcctgcggcggtgcgcaatttatggctcgccggattgctgatttgggccatgagccgaagttgatttatccgcagttcgtccgcccttttgttaagagtaacaagaacgattttgtcgatgcggaagctatctgcaaggccgcttcccggccctctatgcgttttgtaaaaccccgcacgcaagacccgcaggcaatggccgccctgcatcgggtcagggactcgttgatacggcaacgcgttaaaaccaccaaccagatgcacgcttttttgctggagttcagcgtcagcctgccgcgcggtattgccgtgatacggcgtctgagcgctgtgctggaagaaaacgacttcccgccttatcttgcaagggttctgagcaggcttcaccgccattatgtttacctctgcggggaaattgatgaggtcgataaggaactgaaaacccaccttgcagaggatgaaaacgcacagcgcctgttgaccattcccggcgtcgggccggtaacggcgagtctgttagccacgcggctgggtgacggaaaaaactatgccagcagccgtgactttgcggcgtcgacaggtctggttcctcgccagtacagcacaggtggaaaaacaacgctgatgggcatcagcaagcgaggtgataaaaatctgcggcgacttctggtacagtgtgcacgggtctttatacagcggctggagcacaatccagggcgtctggcagagtgggttagaaagcagcttgccaaccatcattcaaacgtggtggcgtgcgcactggcaaacaaactggcccgcatagcctgggcagtgacggcacatcaggcggcgttcagtcaataaaagagccaacgaaaaactcgtcagctcagttaattaacacattactttctggttttgcgacgacagataattgatggcatgaacggcatatcggcctgctgatgaacctgacataaaaaatggctctttgaagccggcggctttttaaggttcggcaggcgcggaactcatcgtggcgcgggcattaatgctcaccagacgccgaatagatttacgcaagcccatcataaatcaaaatctgcgttgcaaaaacgggggtgaccataga

SEQ ID NO: 8518 - DNA, 1582 bp, unidentified
  source 1..1582: mol_type = unassigned DNA; note = element_d5d778e
  misc_feature 1: note = core
  misc_feature 2..248: note = LE
  misc_feature 249..1451: note = CDS
  misc_feature 1452..1582: note = RE
  misc_feature 6..223: note = bridgeRNA
tcgtattataaggtcagccagtcatttctggttgacctatttttaataggatttatgcttgaagtagctggggtagaacgtaagcgcccgtgggacaccgatcccgtccgttatactgttcaccccctacttgtagaaacatgtttgaggctggttgggacatggatcccgtataacaagcgaagctatgaaactacaagtgatataggggcgtaccggcgaatctattaaaggagttgtgatcacatatggaccctgttataggcctggatatcgcaaaaggagaaagccaggtccaagcttttttacaaaggaaagaggcttataagcaaagctttaaatttaaacatgatttacaagggcttcatgctttttatcagttttatcaggaagtggaacaggtttccggacaacctccggctgtcatctttgaatccaccgggcattatcatgagcctgtactccaatttcttgagggacatggcataacgtattatttgatcaatccagttgtttcttatgaggctagaaaaacgagcctgcgcaaggtgaaaacagacaaaatcgatgcattccatctgggtgagctttactacaaagaagatctggaagtctttcaaaagaaaacagagcagtttttgaatctgcgtcaattaaccaggcagcacagcgctttgacggatagctatgttgaaatcaagcttcagtttcaggctgctttggatcagattttcccggaatatcatggtgtttttagtgacctttatggcagtctctcgttgaacactttactgcagtatccgactgcttcggatattcaaaatgtttctcaagaggctttggccaaggaaatgcgtcaatttggggcaaggcgttcccatgaatggtttttgcataaagcatctcaattaaagggtgccgcagaacgtaatccctttaaatctcctgtctgtcaggggcagtttatcagcttgcggctgtatatccagatgctttttcaataccaagagcatctatccaagctggaagaagagatagatgccctggctaaaacatttgaagaatatgaattgatccggtcgatccccggtattgggagtaaaattgccgccacaattacttccgagacggggaacatcgaccagttcaatcatccaaaaaagcttgttgcttatgcaggtattgatcccagcgtttttgaatcaggcaagtttaaagcctccatcaattgcatcacgaaaagaggttcatcaaggttacgtcaggctctttatacggctgtacagtgcggcctggccaaaaaacgaaacaagaaacttatagccttttatgatcgcaaaagaaacgagggcaagccgcacaaggtcgctgtgattgcctgtgccaataaactcgttcactggatccatgccatgttaaaacatcaagaagtctttgtagatcaaccttaaaaatgatttaaattaacaatattccgaaaccttatcggtgcaacggtaaggttatttggcatgcccacttttagtataacatgtttcattgaatttttttacctttaaatgttgacaactattagctggta

SEQ ID NO: 8519 - DNA, 1402 bp, unidentified
  source 1..1402: mol_type = unassigned DNA; note = element_d5dd374
  misc_feature 1..2: note = core
  misc_feature 3..89: note = LE
  misc_feature 90..1127: note = CDS
  misc_feature 1128..1402: note = RE
  misc_feature 1145..1388: note = bridgeRNA
tgatggggtggacgccccctgctccccggcatccaggtgccatatggtggtcgtcgtgaaatcggccacagtcgagaggaggcgtccaaatgcaaattactacgatcggattagacttggcgaaaaacgtgtttcaagttcatggcgtggatgccgaaggcacggtcgtggttcggcgtaaattgcgtcgcacacaggtgcgggagttcttcgtagggcttgcgccatgcctcatcggaatggaagcttgcggcacggctcatttttgggctcgagaactgatcgcgatggggcatcaggtgaagattatgccgccgtcctacgtgaaagcgtatgtcaggcgcggcaagaatgacgcggcggatgcggcagcaatctgcgaggccgtgatgcgaccgcacatgcgcttcgtgccggtcaaaaccgaagagcagcaagcggctttgatgctgcacaagacgcgcgagttgctggttcgtcagcagacgatgctgatcaacgcgatccgcggacatatggccgaactcggcatgattgcgccgcagggcgctgcaaaagtcaaagatctgatcgcagtgatccaggagagcgaggatcaaagcattcccgctctcgcacaggcggctttgcagcctttggttcgccagttgcatactcttgacgagcaggtcgagatcctcgatcgagagatcaaggcttggcacaagacgaatgagacaggtcgtcggcttgcgacaattccgggcatcggcatcctcactgcatctgcaatcgccgccacggttccggacccgtcgtttttcaaatccggtcgtgaatttgcagcctggcttggtctaaccccaagacaaaattccaccggcggcaaggataggcttggtcggatatcgaagaaaggaaacacctatattcgacggcttctcgtcaccggcgccacgtcaatgttgcgctacgcccgcgcaaagacagcggctggagccgattgggtgaatggccttctccaacggcgcccggcgcggttggttacggtggcgatggccaacaagaccgcccgcattgcatgggctgtaatggtgaagggggaaaactttcgagttccggtccggcccatgaccgaagctgcataattcacgaaactccaaaaatcgaacgatcttaatgtttaaccgagctttgcaagggtgatcagacaacgtgatgccaaccggtcgaaccggggattgggatatctcgccatgcaacatgcagtaataactgcgccactttgattgagacccaatccgcgaactcatcagggccagcggtcatgcgccgcaagcgaaggccggacacatgaccgcacccgaccaaattggcagcgcagcgtcaaaaaacttcttgcaaggacgggggcgtccacaca

SEQ ID NO: 8520 - DNA, 1417 bp, unidentified
  source 1..1417: mol_type = unassigned DNA; note = element_d5de197
  misc_feature 1..4: note = core
  misc_feature 5..225: note = LE
  misc_feature 226..1320: note = CDS
  misc_feature 1321..1417: note = RE
  misc_feature 35..237: note = bridgeRNA
ccaacttgttaaatctttgcaggtgatcgtggtctgcagccatgatctccgaggtggtggccggttgactcgtatcacacctgtcacctgtggttgactttcgcttggcttgtcggccggtcaccgccgtatatgcgcagagtggctgaagagaggcctgcgtagccgaaagttggtgtgccctccgcgctttcatctctaaaccgaggcgaggagagaagtttcgtgccagcgatattgaagacccagatggtgatcgcaatcgatccacacaaagcgtcctggactgccgcagcagtggatgcctcgtcgcggcccgtagccgccattcgcgtaccggtcagccgtgacggctaccgcgcattgcgtcgtttcgcccgccagtggcccgactcgacatgggcgatcgaaggcgcatccggtctgggcgcgccactgacagcgtggctacgcaccgacggaatcgacgtcgtcgatatacctgcgaaactagctgcgcgcgtgcggacgctgtcgaccggccacggtcgcaagaacgacgacgcggacgcagtaagcgtggggatcgccgcactgagcgcacgttcgctgacttctgttgtggtagacggcaccgtgatcgccctacgtgcgatcgtcgaccaccgcgacgacctggtcaaaacccgcacccagaccgtcaaccgcctgcacgtcgtgcttgccaatctcattcctggtggtgcaaaacgtgatctcacagccgagcgggccgtcgaactccttcgcaaggtccgtcctcgcgatgccgccggcaaaaccctgcgcagcctcgccgccgacctcgtcactgaggtacgccacctggaccgccgaatcaccaaggcggccgccgacatcaagaccgccgtcagcgcctctggcacaaccctcaccgagttgtgcggcatcggagaattgaccgcggccaagatcctcgcccgagtcggcaccatcgatcggttctgctccgccgcggcgttcgccagctacaacggcaccgccccgatcgacgtgtcctccggagatgtcatccgccaccggctctctcgcgccggagaccgccaactcaactgctgtctacacatcatggccttaacacaaatccggcaggacaccccaagcaaggcctactacttgcggaaacgaaccggcggtaagagtcacaaggaagcaatacggtgcctgaaacgacgcctgtctgacatcgtctaccgccaactgctccgcgacgcgacaagacgtaaggcaggcccgggaggacaatcgggggcggctctaatatccagcgcggccagctgaaaccccgcacactgactcttcggacaagccacttcccggacctgctagcagccaccatacaaccgaacaatggcacacctcttgacacagagaggcg

SEQ ID NO: 8521 - DNA, 1389 bp, unidentified
  source 1..1389: mol_type = unassigned DNA; note = element_d5f781e
  misc_feature 1..3: note = core
  misc_feature 4..82: note = LE
  misc_feature 83..1117: note = CDS
  misc_feature 1118..1389: note = RE
  misc_feature 1136..1375: note = bridgeRNA
tgatgaggtggacggcgcccgcacccggcatcgcggtgccatagggtgatcgttggaacgaatcactgagggggccgtccacatgcagattaccacgattggtctggatctcgccaagaacgtgttccaggtccacggtgtcgatgccaccggaaaggtcgtcgtcacgcgacaattgcgccgcagccacgtgatcgaattcttcaagaaacaaccagcgtgtctcgtcggcatggaagcttgtgcgaccgcgcatcattggacgcgcgagttgtcggcgctcggacatacggtcaagctgatgccggcaagctacgtgaaggcctatgtccgtcggcagaagaacgacgcagcagatgcggcggccatctgcgaagctgtgacccgtccgtcgatgcgcttcgtaccgatgaaaactgtcgaacagcagtccgcactgatgctgcatcgctcctgcgatctgctggtgcgtcagcgcacgcagctgatcagtgctctgcgggcgcaccttgccgaggtcggcctggtcgctgcgacaggtgtcgacggcttgaagacgctgctcacgatcgtacacaagaccgacgagcccggcactctgcccgtggcgatgcaggatgcgctgcgggcgctggtcactcaactggcatcgttgcaggagcagatcgatgcattggaaaagagcatccacgcgcagcatcgtgcgagcgaagcgagtcgccgcctcgaaagcattccgggcatcggggtgatcggtgccacggcgatcgcggccaccgtcaccgatccgactgcgttcaagtctgggcgcgagttcgcggcctggatcgggctcgtgcctcgacagagttcgaccggcggcaagcagaaactcggcggcatctcgaagcaaggcgaccggtatctcagacgcctgctggtcgtcggcgcgacggcggtcatccggcacgcgcgggcccatcccgaaaagcacccgtggctcatgacgctgctggccaagatgccggcgaagaaagcggcggtggcgctggccaacaagacagcgcgcatcgcctgggcgatcctagcgaagggtggcgtttatcggtcaccgccggtactcgcggctgccgcctgacgggctcggcaatgggagcgtgaggcgggcgtcgcggcaaacaagcgaattgcgagggtgatgatggcgtgatgcgaatggtcgagccgtcggtcgggagactcctgcggggtctatgggccattcgagcccggaattttgattggaacccgatcagcggatcacatcagggccagcggtcatgcgccgcgcaaacaggccggacacatgacttgcacccgaccgcaagctgaacgtcaaaatcctcttgcaacgcgggcgtcgtccacaca

SEQ ID NO: 8522 - DNA, 1390 bp, unidentified
  source 1..1390: mol_type = unassigned DNA; note = element_d605496
  misc_feature 1: note = core
  misc_feature 2..93: note = LE
  misc_feature 94..1128: note = CDS
  misc_feature 1129..1390: note = RE
  misc_feature 1146..1385: note = bridgeRNA
caatgggatggacgcccccatcctccgaaccggcatcgttgtgccaaagtggagatgtgagtaaccactcaactggggatgggagcgcccgccatgaatattgcaacgattgggattgatctggcaaagaacgtttttcagctgcacggggtgactagccacggcaaagtcgtactgcgtcgtcagatccaccgcggccagatgcgtgggctttttgtgaacttaccgccgtgcctcattggcatggaagcctgcgcgagtgcgcactactgggcgcgaacgctcgagagctatgggcacacggtccgccttatcgcaccgcactttgtgaagccctatgtgaagacgcacaagaccgatgcgaccgatgctgaggcgatctgcgaagcggtgaatcgtcccaacatgcgttttgtgccgatcaagagtatcgagcagcagtcggcattgtcattgcaccgcgtgcgccagggttttgtgcgggcgcgcactgcgcaggcctgtcagatccgcggcttgttagcggagtttggcttggtgatgccccagggcatcgcgaatatcaagcaggtaccgaagctgctgcaggtggcaggaaaggaactgcccgcaccgttctgccggctgatcgagcggctcctggcgcacctcaaggagctcgaccgccagactcgagagctggaggagcagattgtcgactggcacgagcgcagcgaaccgagccgcaggctcgccaagatccccggtatcggtccgatcacggccagcgccttggtggcttccatctccgacgtgaggagcttcaagaacggccgagagcttgccgcctggctcggtattgtgcctcggcagcactccagcggcggtaagccgaccttgctgggcattagtaaacgcggggatcgttacttaagaacgctgctggtgcacggcgcccgttcggtcatcgtgcgggtgcttaaacgcgacgatgaaaaggacggctggctcaagaggctcttggagcggcgacacgtcaatgtcgcgacggtcgcactcgctcacaaaaccgttcgcacagtgtgggcgatactggcgcacgaccgcgagtactgcccgaattacaaatcgctgcccgtggcggcatgaaaatgaggagttgagctcacaccaccgattgcgcaggcgtctttgtgcgagtgatggcaaaacaggttagaccgtggctgatgaaacccgtgaatggccgagcaccaaagagtgcgcgaaagcagatgggagtcagccagcagaacccatcagggacagcggcctttgcgccgcaacaaaagtccggatgtacgggtgcaatcgaaacctgttggccacgtcacgcgaagaaaagcctcgcaaggttgggggcgtccatgta

SEQ ID NO: 8523 - DNA, 1230 bp, unidentified
  source 1..1230: mol_type = unassigned DNA; note = element_d607358
  misc_feature 1..2: note = core
  misc_feature 3..258: note = LE
  misc_feature 259..1215: note = CDS
  misc_feature 1216..1230: note = RE
  misc_feature 6..208: note = bridgeRNA
cttatatctcgattttgtgttcttcaagagacaaaatccccggctgatcaccgggccgggagccgggcaagacggacccacccttgggcgtgaagcctgttacgtagatggtcacccgactccccttctcgccagcgcgttcgaacggtctcgtaggactgccttgggcaggaacctggatggataaggctgaacccggtgggcagcttcgatcgatcagacccttgaccattcccgaacggacccagaggagattgcatgacgttcacccccatcgggatcgacatcgccaaagccaagttcgacgcggcggcgctccgccacggcaagtaccaaaccaaagtcttccacaataccccggaagggttcacggcgtttctggcctggctgcaaaccttcccagcgccccacgtatgcctggaggccaccggccgctacggggacgccctggcgctctttctgagcgaccacgacctcgcgttcagcgtgatcaaccccacgccaattcacgcctttggccaagccgagctgagccgcaccaagaccgacaaacgtgatgccaagcgcatcgcccgcttctgtcacagtcaaaggccgccgctctttcagccgcctccgccggccgtgcgccagttgcaagccctggtgcgccggttcgataacctcgtggagatgcggcagatggagaaaaaccgcctggagggggcagaccccaccgtgcggacctccatcgagaccctgctcgccaccctcgaggccgagatcgccaccccccgaaaccgcatccgcgagcacatcgaccacgatccggacctccggcaacggcgtgatcggcttgacaccattcccggcgtgggcgacgcgacgatcgccgttctcctggccgccctgggcgacgttcaccgcttcgacagggcgcgctgtgtcgaagccttcgccggcctctcgcccaaagagcgccagtccgggaagtggaaaggccacacccgcctgtcgaagatcggtgatgcgcgcttgcgcaaagcgctgtacttccccgcgctggtggcgtggcgccataatcccttgatccgggccttctgtgagcgtctcaaagcccaaggcaagaacggcaaaatcatcgcctgtgccgccctgcgcaaacgcctggtcctcgcctacggcgtcctcaaatccggccaaccgttcgatcccaactatgcccttgcagcgtgaccgccaagacggtat

SEQ ID NO: 8524 - DNA, 1444 bp, unidentified
  source 1..1444: mol_type = unassigned DNA; note = element_d60840f
  misc_feature 1..4: note = core
  misc_feature 5..223: note = LE
  misc_feature 224..1435: note = CDS
  misc_feature 1436..1444: note = RE
ctcattggatgactatggccaggcgggccaggttggcctgttcgccgggaacggcgagggacggcctcgatgtctcgccacgcgatggcctgtttgagctggtcgccctcgtcgttgccgggaggcatgatcggcgcgagagagcagccccggtgagggccgaacaatgaggaaccgacagccacccggctccaacggcgatgtctggccgggaggtcaacatatgttctgtggatgggactggggctcaaccgtgcatggggtctgcctgatcgatgacaagggcgtggtcgtcaagagatggatggtccagcacaccgaggaccagctcaggaatgtctttgacgagctcgcccagctcgtcgagaggggcgacgtgggacaggtgccgatcgcgatcgagcgcggcgaaggcctggtcgtcgggttgatcgccggagctggtcaccccgtctggatggtcgagccggccgcctttaaggcagcccggccgcggtggggctcagccggtgcgaagtcagatctcggggacgcgttcatgcttgccgactacgccagaacggatggccaccggctgcgccgtatcgagccggtggagcgcgcgacccgagaactcgccgcgttggtgcgggcacgcacagcactggtcgaggcacgcaccgcggcgtccaaccagctatgggcgatcctggccgagcactggcccggtgcggctgtggtgttccagaagctgacctctcagatcactctcgcgttcctgacggattacccgacaccacagaccgcagcacttctcggggagggccggatgggtcagttctgccgtcgacacagctaccgcggcgggaagaccccagctgagctcgtccgcaggctccgcgcggccccagccagcgcgaaccccatcgcgccaacgatcctcgaagcgatcgtgcgtggctcgaccgcgcagatccggctgctcaacaccgagatcactcatctggaaggcgacatcgccgacgcgcttgccgcccaccccaagacgcccctcctacagacactgccacgcgtcgccaccgtcagcttggcagccctgatcgccgagatcgggcctctgctcgagcgttgcgagaaccccgaacaagtggccgccctatgcggtgccgctccggtcacccgagcctccggcaagtcacgcaccgtcggtttccgttacaccgccaacaagccagcacgcgttgcgatcaccagcttcgcggacaactcaagacactcctccgcctgggccggggacgcctaccgacgagcgcgcgcacgcggcgcccgacacccccacgccgtccgaatcctcgcccgcagctggatccgcgtgatatgggcctgctggaccaccgacaccacctacgacccatcacgacaccgcagcgaacgactcatcgccgcagcgacttgaccaagagag

SEQ ID NO: 8525 - DNA, 1210 bp, unidentified
  source 1..1210: mol_type = unassigned DNA; note = element_d613fab
  misc_feature 1: note = core
  misc_feature 2..207: note = LE
  misc_feature 208..1188: note = CDS
  misc_feature 1189..1210: note = RE
  misc_feature 11..189: note = bridgeRNA
ttgtatcttgttttctgtagtggttagctcccactacaggaagcaggatgaatctgtgtcatccatcaggattcgatcctgtgtgtcagcctggatctcctgcttcccctttcacgccagcattaactttgaacggttgccaggagcagcgactccgcatgcacaagggaaacgggcgtgatggtatcaggtgaaaggagacgcaaaatgatccagctcggtgttgatgtcgggaaaagtaaaattgatgtctgcctgcttccggaaggccccgggggcaggaaaaaaaccaaagtgctttctaacggaccggacgtggcccggcagttgcttgagtggctggcggtcagaaaagtcgctctttctgagctacaggtcatcctggagccgacgggaacctatcatgagcatcttgcttatggtctgcatgaaaaaggacttcgcgtggtggttgccagtccggttcgtgtgcgatcttttgctacaggcatgggcattctgacgaaaaacgaccacgtagatgcccatgttctggcgctctatggcgcactgcgccagccggaagcatgggtgcccccgccaccggccatccgggaactgaaagcgctgctgaaaaggcgcgatgcgctgcgggaagatttgcagcgtgagcagaaccggctggaaaaactgcacgtcacccgcttttccacacgcgttgaagcttcagtaacaaaaatgatagcggcgctggatgcagagctgctttcggtccagcagcagatcgacgaccatattgataaccatccggacctgaagcaggacatgaagtacctgacgtcggtgaaaggcattggtaagcaggtgggctcgaatatgctggcagtgctgcgtggaaacgccttcagcagcccggaacaggcggcggcatggctgggtctggttccgcgggagaaacggtcaggcagttcagtgaacggccggtcacgcctgaccaaaacgggtccggccgatttacgggctaaactttatctcagcgccatgacggcgataaaacataatcccatgctcaggattttctacgagcgcctgttagaggccggtaaggctaaaatgtcagccctgtgcgcagtgatgaggaagctggttcatatctgttatgcagtgctgatgaagcagcaggagtttgacccgaattacagcgcataagtttgactatcaagacggtagc

SEQ ID NO: 8526 - DNA, 1447 bp, unidentified
  source 1..1447: mol_type = unassigned DNA; note = element_d61b1df
  misc_feature 1: note = core
  misc_feature 2..225: note = LE
  misc_feature 226..1434: note = CDS
  misc_feature 1435..1447: note = RE
  misc_feature 12..240: note = bridgeRNA
ctactagacgattcctctaggaccggcgtccggccagactcggtccaggcgtccggcgggatgctcgccttgcggctgcccacctgagtgctggtgtggctctacttcggtttgcgttcctgccggacgtcgtctcgaggcgtggctctagaggggtctgcccagctcgtagtagcaatgcccgcctcgctgtccggttagttcgtacgaaaggcggaggacgacatgaaggtgttcatcggggtcgatccccacaagctgtcggcgacgatcgaggtcgtcgacgaccgggagagggtgctggccaccggccgtttcggcaccgataagtccggctatgccgcgatgcgtaagcacgtgtcggcgtggccggagcggacctgggcggtggagggcagcaatggcgctggacgcccgctggcgcagcggctgctggccgacggtgagcgggtggtcgacgttcccgcgaagctgtcggcacgagcacggttgttcgacaccggccacaaccgcaagaccgacgcgcatgacgcgcacgcggtcgcggtggtcggggtccgcaccagcggcctgcgggtgctgtcctacgacgtcgagctcgaggcgctgcggatgctggtcgcccgccgtcaggaactgacccggactcgtatccaaacggttaaccggctgcagcggctgctcgcggagttgacgccggggaaggcgaagaaggacatcacctcgttgcaggccaaggcgatcctggcctcggtgcggccccgggacctcgccggcaagacccgccgccggctggccgccgagcagctgaccgagctggttgcggtggacaagaagatcaaggtcctgaccaaggagttgaagatcttggttctggcccgcggctcgacgttgatgaacctgcccggcgtcgggccggttgtcgctgcccgcacgctggccgacgtcggtcacgtggcccggttcgccgaccggaaccggttcgcgtcctggaccgggcccgcccccatcgaagcctcttctggtgagatcgtccgacaccggctctctcggggcgggaaccggcggatgaaccacatgatccacatcgccgccgccacccagatccgcctcgacatcgacggccgggcttactaccggcgcaagctcgccgccggcaaaacccgcgccgagtcgctgcgctgcctgaagcgacggatctcggacgccatctatcgccagctgctcgccgacgcgaaggccctcagcgcggccagcgtggacgcgggtccgggagggcaccgcggggcgtcccctaaatccagcgcggccggctcacacccgcacaccagcacttcggatcagccacttcccggacccgcaccaacgacgctacccgcgccgacaccgtcgaggaagaccgtggctgcaaaggccctacagcccgcctcttgacacagaggggtgc

SEQ ID NO: 8527 - DNA, 1226 bp, unidentified
  source 1..1226: mol_type = unassigned DNA; note = element_d61f085
  misc_feature 1..2: note = core
  misc_feature 3..239: note = LE
  misc_feature 240..1211: note = CDS
  misc_feature 1212..1226: note = RE
  misc_feature 6..212: note = bridgeRNA
cttgtatctcgactatcgctccgtcaggagcgatagttctcgactgatcatcgagggagggacctggaagccgcgcagctgcttaggctttttgcctgtgacgtagatcgtgctccaaccctccgcactcactcgtatagttcgaacggtatcttgggcccgtctttggcgagagcccgcattcgcaaggttggacagagtgcagtgatgatcgcaaccgatctgattgggagagggatatgtccagtttcgttggcgtcgatgtcgctaaaaacacctttgatatcgctacacatctaccgaacggcaagcacaaaaccaaggccaagctgcctaatgatgccaagggtttcaaagagtttgaagtttggctgacaaagcaggtcgagccttcggctctgatcgtgatggaagccaccagcgtctatcacctggagctcgccgagttcgtctacaacaagggttatcgggtctgcgtcgtcaatcccgccacgactcatgcctacgctggcagcgaactgcggcggatcaaaaccgataaaagcgacgccaaactgatcgccgacttcgcccgggaaaaaaatgaaaaactgaagctttgggcgccagagcctctgaagtatcgccagttgaaagccatggttcgtcgtctggatgaccttcaggagatggagcaaatggagcgtaatcgtctggaagtgtccgatgaaaaggtcaaagcctcgatcaactccgtactgcgccacatcgaaaaagagatcgctgaaacgcataaagcgattaaaaaacacattgatgacgacccggacatgcgccagatgcgcgacttgatcgtgaccatcgacggtatcgggcagaaaacgattgagcgactgttggccgagctgggcgatctacgtaagtacgatgatcctcgcaaactggttgctgctgccggacttaaccctaagctccatgactcaggccagctaaaggggcgctcgacgatctcgaaaatcggctcggtacgcgtgcgggcgggcctctacatgccaggtctcgtggcgttgcagcataacgaggcgatcaaagccatgaaggaccgcttgaaggccaacggcaaggcccccaagcagatcatctgtgcagcgatgcgcaagctgctgcactttgtttacggtgtgctcaagtcgggccaaccctatgacccgaaacttgcgcttgcccggtgaggttcaagacggtat

SEQ ID NO: 8528 - DNA, 1439 bp, unidentified
  source 1..1439: mol_type = unassigned DNA; note = element_d629fb7
  misc_feature 1..2: note = core
  misc_feature 3..221: note = LE
  misc_feature 222..1424: note = CDS
  misc_feature 1425..1439: note = RE
  misc_feature 10..217: note = bridgeRNA
gccctacctttctgttcgtgctccggccgtccggaaggatcggagtacgcagacggggccgggatggttgtcatgtcggctgccggtgatggcttgggaggcttggcccccggtcccgtcgctttcgtctgaccgctgattaggcactgcgacagatcgctgtgtagggcatggacggcggacggaagccgggcatggtcgctaccagggaagggaggggcatggcggtcgcggtcgggatcgatgtggccaaggagttccactgggccgtgctcgtggtcgccgagacgggaaaggtgctggtcagccgacgggtggacaacaccccggccgggatccagacgctgatcgcagacatcgaggccgcccaggtgcagcacggcccggccacggtcggggtggacgtgttgggcgggatcgccggactggtgcaggcgatgctcctggaggcggggctgagggtggtgcacgtgcccgggctggcggtcaaccgggcccgccgcgcgaccgtgggcggggaacgcaaaagcgaccccaaagacgcacgagtgatcgccgaccaggtccgcatgcgcgaggacctgcgcccggtcaccggcctgaaccagatcgacgccgagctgcggctgctggtcgggcgccgccgggaactggtggccgaccagacccgccgcctggggcggctgcgggacctgctggcctcgatcttccccggcctggaacgggtggtggacgtgaccggcaaggccgggctgtggctgctgacccgctacgtcacccccggcgagatccgcgccgccggacgcacccgcctgagcaggcacctggtcagggcggggaacctgaaggcggtcacgatcaatgccctggtcgacgccgcgctcaccgcggcgcacgcccagcacgtcaccatccccggtgaggccgtggccgccgacatcatccgcgatctggcccgcgaagcgctcaccacccgcgaccggctccaccagatcgaccagcgcatcgaggcggtgctgcagcgccaccctgacgcggccctcgtccgcagcctgcccgggatgggggccaccctcaccgcggagtttctcgccgaggcaggcggcatcacccggttccccaccgccgaccagctcgcctccgccgcgggcctggccccggtcctcaaacagtccggcaaggtccgctacctgcagcgcgccaccgccggcaacaaggccctcaaacgcgtcttctaccagtccgcgttctgcgccatccaacgcgacccgaccagccgcgccttctacgcccgcaaacgcgccgaaggtaaacgccaccaccaagccctcatcgccctggcccgccgacgcgtcaacgtcctgcacgcgatcctgcgcacccgccagccctaccagccacggccgcgcgccgctgcggcttgacacgcacattaggca

SEQ ID NO: 8529 - DNA, 1359 bp, unidentified
  source 1..1359: mol_type = unassigned DNA; note = element_d62c74d
  misc_feature 1: note = core
  misc_feature 2..72: note = LE
  misc_feature 73..1122: note = CDS
  misc_feature 1123..1359: note = RE
  misc_feature 1133..1353: note = bridgeRNA
taatgggatggtctgccccgccgaacccgcgcatactgcgcggcgagttttcgaccgagaaaggaccagaaaatgttgcgcaacaagcctcagcccgccgctgtgttcggcatcgatatcggaaagaatgttttccatgtcgtagcaaccgacgcaggcggtagagtcattcaaaaagtaaagctccgccgcgacacacttttgcagttcttcgatgccgcgcagcgtacggccgtcgcgatggaggcttgcccaggctcccaatggctggcacgcaagttacaacagctcgggcacgtggtccgagtgattcctgcgcagttcgtgaagccctacgtgaagtccaacaagaacgatatcatcgatgcggaagcgatcgccgaggccgccacccgacccgcgatgcgctttgttgagatcaaattggaagcccaggtcgatatccaggcgctgcaccgcatccgagatcagaaggttgccctgcgaactcagctcgtctgccaaatgcgggcgttttgcctcgaatacgggatcgcaatccatcagggcatcggcaaattcaaagccgacttccctcgcgtattgaccgacgagggcaatgatctgacgccgatgatgaggcgcacgcttcgtcggctgttcgaggacttcgggcacgtcgagcaccgcatcgccgagatcacacgtgaaatcgaggctttggcggcgagtgacgaacgagcgcggcggctcatgactgttcccgggataggcccactggtggcgacggcattcgtcgcgagcgccggcaatgctagtcagttccgaagggccaaagacctcgccgcgtggcttgggttggtccctcgcgaacactcaacgggtggtaagacgaccctccttgggatcagcaaaagaggcaatcattacctcagacggctgctgattcacggcgcaaggtcatgcgtcatgcatctgaaccgtacttccgatcgcctgggttcgtggttgaccggcctcgagaagcgcatgcatgccaacaaagtcactgtggccctggccgcaaagattgcgcgggtggccggggtcatcctcacgcggcccggctcgacctacgagcggcggcttcccgcattcccgtagggcccgggcagcagactgcgaggttcgaggtagtgatgacgagacggttgatcggcgccgcgtaagcccttcgccgaaaacgggccagtgcccgattagctatctgggaacgcggcgtgctgatctcatcatggcctggctgcaaccgcagcccactcgcgagaggccggatacatttacgcagactgtcgaggtcggatcgcccaagagccttgcacaggcggggcagaccataca

SEQ ID NO: 8530 - DNA, 1323 bp, unidentified
  source 1..1323: mol_type = unassigned DNA; note = element_d62f203
  misc_feature 1..3: note = core
  misc_feature 4..69: note = LE
  misc_feature 70..1107: note = CDS
  misc_feature 1108..1323: note = RE
  misc_feature 1082..1308: note = bridgeRNA
agatgtatggactccctaccccgaaagggatacggtcttaattaccacattagcccgaggagtccacacatgaacaaggttactattattgcaattgacttggcaaagaactcatttcaggtctgcaaatttaataaaggtaatagcgtcgcatacaacaaggctatcaatcgtaaagcattaatcgagcttttgggaaagcatgagcctgtagttgtagcaatggaagcctgcggcggagctcattattgggctcgcttagcgcaacgccacggtcatcaggaaaagatacttcaggctcgagctgtaaaagggcttcagttaaagcaaaaaactgacaaaaacgatgcctatgcaattggtattgcagctcaattacctcatattcggccttgttgtgttatgtcagaagaagagcaaggactgcaatcgctggaacgagtactaacacttcaaatcaagcagagaacagcactaataaatcaaatcagagggctattgtcagaatttggcattgttatatcaaaaggcattcgtaatctggtgaaatcattacctgacgttttagaagacggtgaaaatgggttgcctatgaactatcgtcaagcactatatgctcaatctgagtggctaaaacaatatacggaacagatcgatggttatgacaaacttatagcggaacatacacgtcaccattctacttgtcagaaactgagcaaattggagggagttggacctcaggttgcattagggttaactgttcgactaggtaatgcacaggaatttaaaacagggcgagatgcttcctcttgtataggtctaacgccaaaacaacattcaacaggagggaaagagcacatcgggcatatatcaaaattcagtgccgacaaacgattgagaagcttgttattccaaggagcaatgtctgtggtgcacaaagttgtgctaagggaacctagaacggtgaaagaacagtggttaaaaaaactgattgaaagaagagggaaaaaaatagcagcgatagcattggcgaacaaaacagtcagaacggcggtagcactaataaaaaataacgatgattatcaaccagccctactagcggtttaaagagataagtaaatcaacgaattgcgaaaaaaacggtaagaccaaccagtagaattcagtcgtcctctctagtacctggatactgttcgtgagacatgaactattggtgcgaatacatcaaagggcaggagtagctctccagttaaagcccgtatataagagcgcatctaccacgatattttcaaaataagttgattactttagggagtccatata

SEQ ID NO: 8531 - DNA, 1176 bp, unidentified
  source 1..1176: mol_type = unassigned DNA; note = element_d632b63
  misc_feature 1..2: note = core
  misc_feature 3..205: note = LE
  misc_feature 206..1153: note = CDS
  misc_feature 1154..1176: note = RE
  misc_feature 3..181: note = bridgeRNA
cttgtatggtaggacttgaagggaggaggagggacaaagctcgattctgactgttcgcgcagtacagaccgtgggagatttcacccctcctcctttcacccaagcgccgataaagaatgcatctggcctagaccgacgataggaacaagcctgcgcctctgggtgaacccttcaagtgttcaaaccttagcccggaggattttcaatggcaatgccggtttctgtcgcaaagccgatcgtgggtgttgatgtcgccaaagatgagttagtgatttatcacgcagaaacagatcgactggaagcgatccccaacaccaaagctgcgatcaagaagtggctcaaggagctgcccgcgccagtggatgtcgccatcgaagccaccaatatctatcaccaggaattcgccgacctggcttatgcgcaaggctgtgtgatctacatgatcggcggctacgagctcagccattaccgcaaaggtgtgaaagttcgcgctaaaaccgatgcgctggatgctcggttgttggctcgctacttgaacaacgaaggccaccagttgcacccgtggactccgccttcgcccctgtattgccgtcttataagccttttccggcgccgggcagccttggtccaggcgcgtgtcagcctcaagcaaagttggtccaacgaaccgttgctcaaaacggcgtttgagcaccagataaaggccatgcaacgactggaaatcttgctcgagaaaacaatccagacgcagttggaagcagctggcttgggcgctcagctcaagcgttgcatgaaagtcgaaggtatcggcctattgagcggtgcccgtttgctcacgtcgtttcagcgtggagatttcagaaatgccgatgccttcatcgcttttctgggcctagacctgcgtatatcggattctgggaaaaagaagggacgccgctgcttgtctaagcgaggtgacccagaggcacgtcgattgatgcataacgccgcgatgtcggcgaggcgcacagcggcatggaagggtttttatgaggcactgagggcccggggactcagcacaaccgaagcattagtggcactggcccgcaagcttgcccgagtggtattcgccctgctgaagaaccagagcgaatacttaccgaaaggcatttaaggggtagccccgtaccatagaat

SEQ ID NO: 8532 - DNA, 1364 bp, unidentified
  source 1..1364: mol_type = unassigned DNA; note = element_d63bb23
  misc_feature 1: note = core
  misc_feature 2..67: note = LE
  misc_feature 68..1093: note = CDS
  misc_feature 1094..1364: note = RE
  misc_feature 1131..1361: note = bridgeRNA
taatgagatggtcaccccctcctcgcagtggagtacgctgcaggaaatttcttcgcggaggtgtgccatggaagagatcacgctggtcggaattgatctgggtaagcacgtatttcaccttcatgcccaaaacaaggccggaaaagcagtgtttcgcaagaagctgagccgcaagcaactggtcgagtttttcgccgcgttacacgcctgcacggtggtcatggaagcttgcgctggcgcccatcagatggcccgcaaactcgcaatcttcgggcaccaggtcaagctcatctcgccgcaattcgtgcggccctttgtcaagagtaacaagaacgacttcgtcgacgccgaggcgatctgcgaggcggcatcgcgcccgtccatgcggtttgtcgcgccgaagacggaatcgcagcaaacgttggcggccttgcaccgggtccgcgactctctcgttcgcgatcgggtgcgctcaaccaaccagattcatggatttctgctcgagttcgggatcagtctgcccaaggggcaagccgtcatcaagcgcctgcccgccctgctggccgagcatgcacttccaccgcgcctgatcgcaatcctggagcggctgcacaagcacatcaagtacctgggtcagcagcttgctgagattgaaaaggacttgaaccgtcaacttgacgaagacgatctcggccagcgtctgctcaccattcccggcgttggccccatcactgccagcgtgctcgcggcggagatgggagacggcaaacagtaccgatgcagccgcgacttcgccgcttcgatcggactcgtaccacgccagtacagcactggcggcaagtccaacttgctcggcatcagcaagcgcggcgacaaacatattcgatggctgctcgtacaatgtgcgcgagccttcatgcgtcaattgcacaaacacgcgagcccaatggccgaatgggtgcgctccatgctgacccgcagacacccgaatgtcgtggcgtgcgccctcgccaacaagctggcgcgagtcgcctgggcactcgcgacacgtcatactcgattcgacgagcgatcgccggcattgccggcctgaccgctcccctccatccaacccttggggagtattaccgaagtcaactcatctggttttgcgactgctgatatttgatgacatgaacggcacaccggcctggcagacatcctggagagtaaacgagctctcgaagctgctcgcgttattaggactgtcaggcgcgattctcatcgtggcgcgaggagcgatcctcaaccgtgacgccggatagatttaggcaagcccaaccacccatcaacgtcagggttgcaaaaacgggggtgaccataga

SEQ ID NO: 8533 - DNA, 1446 bp, unidentified
  source 1..1446: mol_type = unassigned DNA; note = element_d63c97f
  misc_feature 1..4: note = core
  misc_feature 5..238: note = LE
  misc_feature 239..1429: note = CDS
  misc_feature 1430..1446: note = RE
  misc_feature 1..237: note = bridgeRNA
ccccgttacctttttgatcgtccccagccggggaccctcggtcgcccggcccggtatgacttactgcccctgtcgtacggatgatccggggggtgttgtcgccgggtcgggtggcgtcggcggaccgctgatagggacacggccgtcccttgaggggttggtctcttcgtaacgtgggtgccggcagtcgacgccagactggcggccgagcacggcgacgtcgcggggaggcgatgcgatgcacggcgattaccaggtgtttctcggtctcgacgtcggcaaggacggccaccacgccgtcgcgctgaaccgggacggcaagcggctgcacgacgcgacgttggtcaacaccgaggccaagctgcggcaggtgttcgacaaactcgcccgtcacggccgggtcctcgtggtggtcgaccagcccgcctctatcggcgccctgccggtcgcggtcgcccgggcctgcggtcatcaggtggcctacctgcccggactggcgatgcgccgcatcgccgacctgcaccccggtagtgcgaagaccgacgcccgtgacgcctacgtgatcgctgatgccgcccggacgctgccgcacacgctacgccgcgtcgacgtgggcgacgaagccctcgccgagctggaagtcctcgtcggcttcgacgacgacctggccggcgaggccacccggctgaccaaccgcatccgcggcctgctcacccagatccaccccgccctggaacgggcgctaggcaagaacatccagcacaaggccgtgctcgagctgctgtcacgctgcggcggccctgccgggctacgcaaggccggccgccgcaagctcacctcgatagcgaacaagaatgcgccccgaatgggcgagcgcctcgtcgaacgcgtcatggccgccctggacgagcagaccgtgatcgttcccggcaccgccgcagccgagacgaacctgccccggctggccgacagcctgcgcgacgtgctccagcaacgtgaccaggtcgccgacgaggtggacaggatgctcgatgcgcaccctcttgccgaggtcctgacctcgatgcccggcatcggcgtcaggaccgccgcccggatcctgctcgaagtcggcgacggcagctcgttcgccaccccaggacacctggccgcctacgccggcctggccccggtcacccgccgctccggcagctcaatccgcggcgaacaccccgcccgcggcggcaacaaacagctcaaacgcgccttcttcctcgccgcgttcgccgccctcgccgacccggtcagccgcgcctactacgaccgcaaacgcgcccaaggcaagaaacacaacgccgccctgatctgcctcgcccgccgccgctgcgacgtcctgttcgccatgctccgcgacaagagcccctaccagccaaggcccgctgctgcttgacaaaacccatagggaca

SEQ ID NO: 8534 - DNA, 1268 bp, unidentified
  source 1..1268: mol_type = unassigned DNA; note = element_d64493f
  misc_feature 1..3: note = core
  misc_feature 4..168: note = LE
  misc_feature 169..1125: note = CDS
  misc_feature 1126..1268: note = RE
  misc_feature 20..189: note = bridgeRNA
cttgtatattcccttctgtgacgtcgacctgatcagttgccgtcacagggacagtcagctcgtctgcctaccgtgcctcgagcacgcagaaaagcttgagcgactgtccttttcatcctcctagcccgaacagttgactgagccccgagctcgtatttttctgcaagtatgggtaccgtgatgaaccactctcattccgtttatatcggcatcgacgtcagcggcaccgcgctcgatgttgccattcatgacaccaccgaacattttcgtgtcgacaatgagccccgcgccattgaacagctggtgcaacgcctgatcgcgttgaaccccacgctgatcgtcctggaagccaccggcaagcttgaactcgccctgctcagggccctgtgcgaagccggcctgcccgctgtcgcggtcaatccccggcaggttcgcgacttcgcccgcgcaaccggcacgcgcgctaaaaccgatcgcatcgatgccttcgccatcgctcatttcgccgcggtcctcaagcccgacgtgcgcccgctcaacgatctgcagacggagcagttacaggccctgctgctgcgccgcgcccagctcatcgagatgcttgtggccgagaaagctcgtcttgaacgcgcccatgctgctgcgcgggacagtctgaacgagcacatcaaatggctcaagctgcagatcaagatcgccgacaatgacatcgattcattcctgcgctcctcgcccgcgtggcgccagaaggaagacctgctacgctctgtgcccggcatcggtcccggcgccgccgcgacgctgatcgccttcatgccccagctcgggtccctgaaccgccgcgagatcgctgcgctcaccggcgtcgcccccttcaatagcgacagcggcaagcacatcggcaagcgccgtatccgtggcgggcgcgctgtcgtgcggcgcgccctctatatggcctgcgtgcccgcgctgcgttttaaccctaccatccgggcgttctatgaccggctacgcaaggctggcaaaccgttcaaggtagctatcacggcctgcatccgcaagctcgtcgtcacgcttaatgcaatggttcgtaacgccacgcactggagtccgccgctcaactgagtttcatcacgcattgccccgttggcgggcagtccgggcgcgatcatcaatcgtgcggtatgcgctcgcctatgcattgctgatagacgtgtcggcaatccagcctctgccagccagcaaccgcttgactcccaatacggttg

SEQ ID NO: 8535 - DNA, 1358 bp, unidentified
  source 1..1358: mol_type = unassigned DNA; note = element_d644985
  misc_feature 1: note = core
  misc_feature 2..222: note = LE
  misc_feature 223..1218: note = CDS
  misc_feature 1219..1358: note = RE
  misc_feature 49..211: note = bridgeRNA
cctttagatttgctaactgagaatatgataatattgtagagaataaataaaacaacctaatcaacaaagtgaaccagacgaattacaaggataacgccctaaaattcgagtaggactttgttgattttactaaagagtatcagactagtaattaagacgtcgaggtctagtattaaggtttagatgatattttagtaacaggttgccttaaataattatcatatggacaaatttacacaatttatcggaatagatatttccaaagattattttgatgtagctatttatgtagatgctaattcttgtaaacacaatcagtttgaaaacactaaaacgggagttgatcaatttatgaagtggatgaaaagcgaaggatgttgtgtagaggaaacattgatatgtatggagcatacaggtatttataaaaatattttagtagatattttgctttcaaagaattgtaatctatgggtagaaatggcttatagaattataagaagtagtggaatacaaagaggaaagaatgacaagatagattctaaaaggatagcattgtatgctaagaaaaatcaagaagaagcgaagctctttaaagcatcaaaggctgtattgaataagattcaggctctattgggacagcgagagatgagtatagctcataagacagctatagaagtaagaaccaacgaatttaaggggtttaatgatgaactgtacaaggttttgtctaaaaatgacaaggctattctcaaggctttagagaacgctataaaggtgattgaagaacagttaaatactcttattagagaaaatcaagaggtatctgagatatttgattgtgtgatttctgtaagaggtgttggagatattacagcgatgtttttaatatgttataccaatgcgtttacatcatttgaagactctcgacaattagcatcttattgtggtgttgtcccttttgaatatacttcaggtaaaagtgtaagaggcaaagctaaagtacactttatggctaataaaaagcttaaaaaacttttgcatctctgtgctttatcagctgttagatgggacccagagataagggcttattacgagaggaaagttggagaaggtaagcataagatgcttgttttaaacaatgttagaaacaagcttgtacagcgtatatgttcttgtgttaggaataaaaaagcttatgaggtacgacaagtagcataaacatcatacattgaattagaaacaaaaatagaggataatacggatataatcctcaggttagatatgccttgttttattgagttattctcaaaaataaggtgtaaaatatattaataatgatttgcttttatcatagtaat

SEQ ID NO: 8536 - DNA, 1393 bp, unidentified
  source 1..1393: mol_type = unassigned DNA; note = element_d6507dd
  misc_feature 1..3: note = core
  misc_feature 4..207: note = LE
  misc_feature 208..1116: note = CDS
  misc_feature 1117..1393: note = RE
  misc_feature 1087..1380: note = bridgeRNA
agatgggatggttgccgccctccccagacggcatcgcgatgtgccaaggttgtggtgttcaacgccacaaaaaagagaggacggcaaatgaaagatacaatgatcggagtggacctggcaaaaagcgttttccaacttcacggcgccacgatgttggggcatctgaagtttcgcaagaagctgacccggacgcagttttgacagttcatgtcgattcagccgcccagtgtggtcgtgatggaggcgtgcggtagcgcaagttactgggctcgggagatggtcaagcttggtcatgaggcaaaattgatcgcaccgcagtatgtgcggcccttcgtaaaaaggcagaaaaacgatgccgccgacgccgaagcaatcgtcgttgcggcgcagcgcccagagatgcgttttgtcgaaccgaagtcagaagatcagcaagcctgcgctgtgttgtttcgaacccgggaacgccttctccatcaacgcaccgagctagtaaatgctcttcgttcggtgctctatgaatatggccatgtctttccgaagggaattgctcacatcaagcggattgaggctgtcctggtgacacccaacagcgatttgccccagctagtgcgtgaggaatgtcaggatctgaccgaccagatctccgagaagacagcacggatcgacgcaaagacgaaaaaagccaagaagctttctttggtgaccgatacggctcgacgactacagacgatgcctggcgttgggccgcagaccgcgttggcgatcagcggctttgctcctccgatggaaagcttcaaacgcgggcgagattttgcggcttggcttggcctcgtgccacgtcaatacacctccggtggcaaggagcggcttgggcgtatttcaaaggccggtcagacagacatccgctctttactgatcatcggtgcaatgtcacggctgacctgtctggcccgtaagaagatcgtcgagggatcatggctggcacggatgctactccgcaagcccctcatgttggtggcaatcgcgcttgcgaacaagatggcgcgcgcgatctgggtaataatgacaaagaaggaagattatcgagatccggcgcaagctgtggcagcatgactcatatgcgtcaccatacaagctggcgtcggtgaaggaggtgtaggaagtcgatgacctgaatgggcaaaacgatcgaaaagatctggatcgggaaaaccagacgtcgttcttgagccgtagagctcttgcagaagatatggacccgatccgcagatcaccatcccggccagcggcttcttgaaaggccgcgacgaaaaggcctaagagaagaacgcactcgatcacccgaccatcaggtttggaaacttcttgcatcctgggcggcaaccagaga

SEQ ID NO: 8537 - DNA, 1511 bp, unidentified
  source 1..1511: mol_type = unassigned DNA; note = element_d65ee61
  misc_feature 1..4: note = core
  misc_feature 5..106: note = LE
  misc_feature 107..1483: note = CDS
  misc_feature 1484..1511: note = RE
gtcactagtgcaccctcttccgtgcgggcccttggacagggcttgtggtaggaactaggcggaagccggggtgacggcctaatgtggtcgcccctcgtgggcctcgatgacactgccgcccccggcttccccggaaccgctgatcgatgacagagggacgcgccgtagagcgccggttagtgaccactcgactgtcggttccttcgcctccgcctggctcctgcctcgtgctgcgagcaggaaggcgacggggttgtcgctggaagatggaccgctgttcttcgtcgggatcgactgggccaccaccgagcacgccgtgtgcgtgctggaccgggccggccgtaaggtcgcggcgttcaccatcgagcacaccgccgccgggttcgcccggctgaccgcccggctcgacaaactcggcgacacacagctgacgccggtggcgatcgagcgtccggacgggcgcctggtggacgccctgctggaagccgggcacccggtgatgccggtcaagccgaacgcgatcaagacctggcgcgaggccgaggtgctctccggtgccaagtccgacccgggcgacgcccacgtgatcgccgactacctgcgagtacgcatccaccggctccgtcccgcggtgccgtactccgggcccaccaaagcgttgcggacggtgacacggacccgaggcgacctggtggacgcccgggtagccgcggtcaaccagctcgccgcactgctggacgcgcactggcccggcgccaaggggatcttcgccagcctgtcctcggcgatcgcgctggccttcctcacgaagtacccgaccgccgcgtcggcggcctcgctgaccgagacacggctcgccgcgttctgcgtcaagcagggctactccggcaagaagcccgccgcggtcctgctggcccgcctgcgctcggcgccggccggtaccaccgatcccgatctgggtgagggagtacgtgcggccgtgctggcccaggtcggcgtgatcaacgcgctcaacaccgcgatcaagaacctcgaccgcaccatcaccgagaagatggacacccaccccgacgggaagatcttccggtccttcccccgcgccggcaccgtcaacgccgcccagattctggccgaatggggcgacgcccgcgccgcgttcgaccaccctgacgccatcgccgcgctggccgggatcaccccggtcaccaaggcatccggcaaacaacgaggcgtgtgggcctgcaacaaacggctccgccaggcgatcacgaccttcgccgacaacagccgccacgccagtccctgggccgccgacatctacaaccgggcacgcgccagcggcaaggaccacccccacgccacccgcatcctcgcccgagcatgggtacgcgtcatctggcgctgctggaaggaccacaccgcctacaatccggccctgcacggcggcaaccaacaccacaccgaacagcagctcgcggcctgatttagatcgagaggttgacacagggggt

SEQ ID NO: 8538 - DNA, 1391 bp, unidentified
  source 1..1391: mol_type = unassigned DNA; note = element_d662f1f
  misc_feature 1: note = core
  misc_feature 2..88: note = LE
  misc_feature 89..1114: note = CDS
  misc_feature 1115..1391: note = RE
  misc_feature 1155..1383: note = bridgeRNA
caatgggatggactccccctccccctgagggcacgtaagtgccaaactggagtttccacacaaccagttcagaaacaaggagtccaccatgaagattatccgtgttggggtcgacctggcaaagaatgtcttccagttgcacggtgtagaccgttccgaaaaggaggtctggcggcgtaagctggatcgtggcaactggataaaggttctgctcgacaaagtcgaaccaggttgcgaaatcggaatggaagcgtgcagtggcgcccatcattgggctcggttacttcaggcaaagggatttgtggtcaagttgatcgccccgcaatttgtcaaaccctatgtcaagagcaacaagaacgatgcaaacgacgctgaagcgatctgcgaagcgatgagtcggccgagcatgcgttttgtatcagtaaaaaccgtcgagcagcaggatatccaagctgtacaccgtgtccgtgctagcttggtcgaccaacgcaaggcgacagccaaccagatccggggtttgacatcggaatacggtttgattgcaccgagagaattggtgcatctgcggacggcgattccgcggtggctggaggacctcgacaatgggcttagcgagcggtttcgtcaccttttgcgcgggctctggcaggacatgctgacactggatcagcgcatcaccgagcttgaacgtgaaatcgaacagattgcacggcaggatccggtagcggttcgtctgcagcagctgcgcggtatcggcccgatcactgcgacggctctggtagcaaccgtcggggacgccagccagtttgctaacggcagacagatggctgcttcgtttgggctgacgcccaaacaaaacagctcgggaggaaaggaccgtctgctgggcattagcaagagaggcgacacctacctgcgctgtttgctgatacatggggcgcgagcggtacttcgcactgctcaggcaaaaaccgaccggctgagcatctgggtgacgcgcatagcgacgacacgccaccacaacgtcgccgcggttgcgttggcaaacaagacagcgcggatcgcatgggcaatgatgtgcaggggtaccgattaccatgctgaactagcgtaagctgggaaagatagcaattttttgtaaggcgtaggagtatctgaaccacgattgcatgacaagccgcatgatggccaacaggtcgaaccggcgctggcagaacccgagaatgtccgaggccctcgagcccgtagaagcgatagggagccggcgcgcgaatagcccatcagggtccagcacctggcacaggtgcagcagcacgagaccggatatacgtgagcagtcgtacctcacggcctgaagacggattgtttgcaagcccgggggagtccatata

SEQ ID NO: 8539 - DNA, 1386 bp, unidentified
  source 1..1386: mol_type = unassigned DNA; note = element_d665eb2
  misc_feature 1..2: note = core
  misc_feature 3..243: note = LE
  misc_feature 244..1281: note = CDS
  misc_feature 1282..1386: note = RE
  misc_feature 15..225: note = bridgeRNA
ctcctatgtttgtctattgaagtaaagatagataatttagaagcgcttgagtgaaaaagaatgagagcagagttgcgtctaaacagcttttaaagcatgtacttgtagagatcttgcctcattcttttttaccttttgagtctgaacagaatgtaaggaatattgcatagcgatatatccaggatatccaaccaggagacaagacgaaggaggttagtcacttgagtattaaactcaaaacgaatgacaaacattattattaaacaggtagccggtattgatgtggctcaaaatgaattggaagtttctttgggaagaatagaccaatctctagaaaaagaggtttatgcttctaaaacatttgccaacaaggcctcagggtttgcagctttggaggtatggataaaaaagcacactaatccgggagcggaggtgcggtttgtaatggaagcgaccggtgtgtatcatgagaaactggcttactatttatcggatcagggccgccaggtaagtattgtactgcccaacaagatcaataattatttcaagaccctggatgtaaaaaccagtaccgacaagacagcatcacaggctatatgccaattcggattagaaagaaaactagaggtatggcagaagcccaaaaagatattcagagaccttaaacaattaacccgtgaacgggatcaactgattgcagacaggaccgcattaaagaaccagttgcatgccgagaacgcggaagcatttccgaatgaaagcagtattaaaaggataaccaaacgcatgcagctgatcaataaacaagagctggagatcagaggcgagttggctgaaattgtaaaaacggatagtgaattggttaaaaagataaataagatcactactattcctggtgtaggcaagctaacagcagtgattgcattggccgagacaaacgggtttgaattgattagaaaccagaaacaactggtgagctatagtggactggatgttaagttgaaagactccggcacatcggtaaaaggcaaacccaaaatatcaaaaagaggaaacagacatttgcgaaaagcaatgcatatgcctgctttaacagcgatgagatgtaatgagcatcataaagcagtgttcgtaagattggtatcaaaacatggaataaaaatgaaagccgcagtggcggtgcaaaggaaaatattggagttgatttacactatttataaaacggacaaagctttcgatccgaattacgaggacgcaaaaaataaagtcgcacagatataaaatagttagagcagccattacgtaaatgtgctgccctaatgaggctggtttaaaaccgccttgattaaaacaaagataaaaaacatttggtagttaacacagaat

SEQ ID NO: 8540 - DNA, 1345 bp, unidentified
  source 1..1345: mol_type = unassigned DNA; note = element_d66b60e
  misc_feature 1: note = core
  misc_feature 2..72: note = LE
  misc_feature 73..1086: note = CDS
  misc_feature 1087..1345: note = RE
  misc_feature 1115..1339: note = bridgeRNA
gaatgacatggactccccctcatcaggctctgccacacttggtaagtctgactacactccttggaggccaccatgtcgcaatcaatttatggcattgatttagccaaacattcgttcagtatccatggcgaagatgaacatgacaaggtactgatccataaatcaataactcgttcaaaagtcctttctacctttgccaatatatcgccagctattgtaggaatggaggcctgtggtacttcttactattgggcgcgtgagttagctaagttaggccatacaacgagaatcatggcgtccaaatatgtggcgcctttcagaacgggtgccaagaacgatctcaacgatgctgtagcgatttgcgtagctgtcacccgcccttcaacgcgcttcgtcaaaatcaaatctcctgagcagcaagctatcctgttgctacatcgcgctcgtgataactgggttcatgagcgaacagcgttgcttaaccaaataagagcaatgctggccgagtttggcatcatcgcaccgaaaggcaggcacgcattacaaaccgccattccagaagcacttgaagatgctgaaaatcaattgcctgacctagcaagggctatcctctccgatagctacgatcacttactcagcatcaaccaacgtattgccgaccaagaaaactgctttaacatgcttgtttctcgtagccataatgcacagaaaataatgaaaactgcaggtatcggccttattaccgccactgccattatcgccagtatcggtaaaggtgagcaatttgataaagaccgaggctttgctacttggcttgggctagttcctacgcaatactcaaccggcggtaaacccagacttggcctaatcaccaaaaaaagcgataaataccttcggacattactagttcatggtgctagagcgttcatttccgccaacggcaacaggaccgaacgcttgagtttatggtgtaaagacctagtcgaacgacggagcttcaagcgggctgttgttgggctggccgcaaagaatgcacgaatcatatggtcgctgctaagtaacgacaccgaatatcaaccactataaaaccaaactgttttctaacggaatagctgacttcaccgggtcattgcaatagccaatgatgatgtaaggttcagatcttttgcgggaaaacctgataatgcggcgggcactgtagatgccttctaacgaatgaggatccgcaaccgcgtagtgtcaataggggcatggcgttaaaagccaataaacagaccgaagtagagcggcagtcccaaccttccattctctaacactgttgttgacaaccgggggagtccatata

SEQ ID NO: 8541 - DNA, 1109 bp, unidentified
  source 1..1109: mol_type = unassigned DNA; note = element_d675079
  misc_feature 1..2: note = core
  misc_feature 3..168: note = LE
  misc_feature 169..1098: note = CDS
  misc_feature 1099..1109: note = RE
  misc_feature 1..167: note = bridgeRNA
cctgtgtattgcgtctgtgctagaatggtagcggacggaaggccgtcgggatcctggtcgtttgagaccgcttgctggctctggtcctccgtccgcctttgatatcccaacctgaacagttgattgaggccgtgagcgcggacctcgaagcacaggatgaggcttgccatgatacaccctgttttcattggatgcgacgtcgccaaggcgcatcttgatcttttcgacggccggacatcccggcatatccgcatcgacaacaccgctgccgccattcatgcatggctgcaaagcctggaggggcaggaggcgacggtcattctggaggcgaccgggcgttatgacaggcagctgcgcgcggctctcgatcggcaacagcgtccgtattgccgggtcaaccccgcccgggcgcgcgacttcgcaagagccaccggccgcctggccaagaccgacgccatcgatgcccgcctgctggcacgcatgggcgaaacgcttggccccgcaaccagcacaccacccgatccggcccggcaggcgcttgccagcttccatacaaggcgcgatcagctcgttgccatgcgccagcaggagcggcttcgcctttccagcgcagaacccatggagcacgatagtctggagcgccatctcatctggctggacggcgagatcgaggcgatcgaaaaagcctgtcacgcccatgtccgggaaaacgcggaactgaacgaacaaagcaccaggcttcgttccattccgggcgtcgggccagtcaccgcattcacgctgatggcgcatatgccggaactgggcggcagctcttccaaagccatggcggcattggcgggacttgctcccttcaatgccgacagcggcatcaaacgcggccagcgccatattcgcggcggacgaaagcgcgtgcgcgatgccctctacatggcggcgctggtggcttacaggctgaagaccgccttcgcccgcacggcgcaaaccatgcagaccaagggcaaaccgttcaaggtcatgatcattgccatcgcccgcaaaatcctcgtcgccgcaaacgcaatcctcagggataaaaccgtctttgctaaaacctgacaatacagttg

SEQ ID NO: 8542 - DNA, 1350 bp, unidentified
  source 1..1350: mol_type = unassigned DNA; note = element_d677e14
  misc_feature 1..2: note = core
  misc_feature 3..84: note = LE
  misc_feature 85..1104: note = CDS
  misc_feature 1105..1350: note = RE
  misc_feature 1122..1336: note = bridgeRNA
gatggtgtggatggctcctgcaccatcggcgtcgtaatgcgccatattgcagttgttacaaactgcttgagaggagccacccaaatgcacgttacaacaatcggcctagatttggccaagaacgtttttcagatccacggtatatgcgaagacggtgaagttgccttcaaccgagctttgagacgggcacaggtcctgaccttctttgaaagcctggagccatgcctggttggcattgaagcgtgtgggaccagtcaccattgggctcgtgagatctctaagttagggcataaagtcaaactgatcccgccagtatatgtgaagccttatgtcaaacggggtaaatcagatgcggttgacgccgccgccatctgtgaggcggtcactcggcctacaatgcgatttgttgaagtgaagcctcccgaacaacaggcgatactagcggttcatcgaacgcgtgatctcatcattcgccaacgcacacagacgatcaatatgctgcgggcgcagctggcagagtttggcattgttttggcaaaggggatttatcatgcgcttcagtttgccaaacaatgtttgaacggggaacaacctgacctgcccgaagtcgctggagatgtaatctttgagctttgcgatcagttgcggttcttacattcaaagatattgcggtgtacgcgtcagatgaacaagatcgcaaggtgtgagaaacgggttgcactgcttcgcacaatacccggtgttgggccgattacagcctcagcaattgttgcaacggttggtagcggcaagcaattcaacaatggccgggagtttgctgcctggttaggactgaccccacttaacaggtcaagcggcggaaaagaacgtctggggcatatctcaaagatgggagatcaatatattcgccggttactggttcttggcatgacctcccgtattcgttcgatcaggacagagccggagaaattcgatccttggtttgcggacatcctggaacgcaagccaagcagggtggctgcagtcgcaatggcgaataaaacagcccgaataatgtgggctgtgctgacccgtaatgaaccctacaaagtgagatcgatctaaccaaggaggccaacaacaagagattgcaagaccaatgaagtgatggaaaattgtcagccctaaaaccaagacaccccgtgctaagtcctgaacgcttgctgttcgacatgcggaatggggcttggttggtggaaaccatcagggccagcggccatgtgtgtcgcgtcaacaggccgaacacaagactgcttctgacaatgcttcaatcacaaaacaggacttgcaaaaagggagccatccacacaa

SEQ ID NO: 8543 - DNA, 1164 bp, unidentified
  source 1..1164: mol_type = unassigned DNA; note = element_d6792c0
  misc_feature 1..2: note = core
  misc_feature 3..220: note = LE
  misc_feature 221..1150: note = CDS
  misc_feature 1151..1164: note = RE
  misc_feature 6..216: note = bridgeRNA
cttgtatcttggcaattgagcagctgtgctgcaaaacagagcggctgccagatcttggccgtggcggagctgaccagaggtcaagctcgcgttgtagtgggatcggcagccgagcagtttatttcaaactcgaacagttactggagcgaccaggttacggcccttttgtgggggcgcgcagcctggccggctcgcatttacaagcaggagttatttaactatgaatagtacagttgtctatgtcggggtggatgtggccaaagctcatttggatgtagcttgggcggagcgctctcgtcgttttgctaatggcaaaagcggatggggcgcattaatcaaatggatcaagcaaagtgctcttccagtgcacttgatctgtgaagccagcgggggctacgagcgtgggttgctcgatgcagcagaacaaagcgggatcaaactcagcttggtgcaagccagtcgggtgcggcaatatgcccgtgcggctggcattttggctaagaccgatcaggtcgatgcgcgtgtactgtgtgcttttggcagcgccatgcaaccagagcccacagtacccctgtcggttcaacaaaagcagttacgcgaattggaaacgcagcggcgacatctgagccgtatgcttgttgcagagcaaaatcgcctggcacagttaaacgataaagaactacggcgcttgactcgctgtctcttagcttcgctcaagaagcagatggctttgatcgatgcgagactggctgccttaattgcgcaggacccgacgcttcgcgaaaaagcgcaaaggctgactgcaattgcgggtgtgggtaggcgcacggccgtgctgttactggcgcaaatgcccgagttgggaacactcaatcgcgctcaaaccgcagcgctggctggcctggctccatttaaccgcgacagcggcaccttgcgtggcaaacgcaccatcttcggaggacgtcgcgctttgcgttgcggcctctacatggccgcacttgtggctgctcgtcacaacctggtcttgcgcaacttctatcagcgtctgcgaagcaacggcaaaccgcacaaagtcgctcttactgccgtgatgcgaaaacttatcctcgctcttaaccaagccttaaaacccaatgcttgcttcgcttgaactcaagacagtta

SEQ ID NO: 8544 - DNA, 1440 bp, unidentified
  source 1..1440: mol_type = unassigned DNA; note = element_d67d97e
  misc_feature 1..2: note = core
  misc_feature 3..234: note = LE
  misc_feature 235..1425: note = CDS
  misc_feature 1426..1440: note = RE
  misc_feature 11..224: note = bridgeRNA
gtcctaccttccaagcgtgggtttgagccggtcattcgtaagatcggcggacccaggggttctgggtatggctgtgagcttgtcgccgttggatggctcaaagaacttggccgcccggagccccgcgacgactcgaccgctaattgggatacgcgactcgatcgctgtgtaggacaacgtcggcgaggtcgtctgcgggatcgatgtgtgacgacgagctggcggaggtgacccgtgccccagatctgggccggagtggacatcggcaaggaacaccaccactgtgtagtggtcgacgaacgcggcgaacgcctcctttcacgccgagtcttcaacgacgaaccggccctgctggaactgatcgcagacgtactcgcgctctccgaggacgccctgtgggcggtggacatcaaccacggtggggccgccctgctcatcggcctcctgctcagccacgaccagccgatggtctacatcaccggcctggccgtgcaccaggcgtcgacggcctaccgcggccagggcaagaccgacgagaaggacgcgttcgtcatcgccgaccaggcacgcatgcgccaggaccttggtctcctgcggcccggcgacgagatagccgtcgacctgcgcaccctaaccgcccgccgcctcgacctggtcaacgaccgcacccgtcagaccaaccggctgcgggcccaacttctggagttcttcccagcgttggagcgcgcgctgaacctgagcaagaagggtccggtcgtcctgctgaccggctaccaggtgccggccgcgatccgtcgcagcggcgccaggcggatcggaacctggctgaagaatcgcaaggtgaagaacgccgtcgcgctcgccgagacagctgtcgaggcggccagggcccagcacaccgccctgccgggagagaccctcgcggccgccatggtcgcccgcatcgccaagggtgtgctggccctcgacgaggagatcgccgaactcgacgcgctcatcgaggcccggttcaacgagcaccgacacgcaacggtgatccggagcctgcccggcatgggcgccctcctcggtgccgagttcatcgccgccaccggtggcgacctggaggctttcggcacggccgaccgcctcgcgtccttcgccggcctctcacccgtgccgcgggactccggccgcgtcagcggcaacatgcgtcgcccgcgccgctaccaccgcggcctactccgtgccttctacctctccgcgatggccagcctgagaacctgctccgcctcccaggcttactacgggcgcaagcggaacgagggcaagggacacaaacaggccctgctggctttggcccgtcgacgggccaacgtcttgtgggccatgctccgcgacggagcgtgctaccaggtactaccaaccgtcacggcggcggcttgacatcgtcattgggaa

SEQ ID NO: 8545 - DNA, 1443 bp, unidentified
  source 1..1443: mol_type = unassigned DNA; note = element_d68aacf
  misc_feature 1..2: note = core
  misc_feature 3..230: note = LE
  misc_feature 231..1427: note = CDS
  misc_feature 1428..1443: note = RE
  misc_feature 11..224: note = bridgeRNA
gtcctaccgttcttgcacgggtccacgccggtcattcgtaggatcggtgagcccgaggactccgggtatggctatgagcttgacgccgtctgaaggctgaaaaaacttggccgcccggagcccgtgacggtcacaaccgctcattgggatacgcgacttgatcgctgtgtaggacaacgtcggcaaggccgtccgcgggatcacagaacgagcaactggcggaggcggccatgttcacgatctgggccggagtcgacatcggcaaggagcatcaccactgcgtggcactcgacgcccgcggagaacggcggctgtcacgccgcgtcggcaacgacgagcccgagctgctggagctcatccgcgatgtactcgccctcgccgagccgggcgagatcctgtgggcgatggacaccaaccgcggcagcgccgctctgctcatcgggctcctgctcgagcacgggcagccgatggtctacctcaccggcctgacggtccaccgcgccgcagccggctaccgcggccagagcaagaccgatgccaaggatgcccacgtcatcgccgaccaggcccgcatgcgccaggacctcggactgctacggcccggcgacgaggtggccgtcgacctgcgcatcctcaccagccgtcgtctcgatctcgtcaacgaccgcacccggcagatcaaccggctgcgcgaacaactcctgggaatcttcccggccctggaacgtgccctgacccgcaagggccgcgggctggttgtgctgctgaccggctaccagacgccgggcgcgatccgccgcatcggcatccgtcgcctcgaatcctggctgaagaaccgcggcgtgaggaacccttcctcactcgcccggaccaccctcgatgcggcagaagcccagcacaccgcgctgcccggagagacactagccgcgggcatggtggcccgcatcgcgaaaggcgtgctggccctggacacggagatcgccgaactcgatgcactcatcgaggctcgatttcacgatcacccgcacgccaaggtgatcgagaccctgcccggcatggggccacgcctcggggccgagttcatcgccgccaccggaggagacctgacagccttcggcaccccggaccggctggcgggcttcgctggactggccccggtcccgcgcgattccggccgcatccgcggcaacctgcaccggccccgccgctaccaccgtggcctgctgcgagcctgctacctcgccgcaatggccaggctccgctgctgccccgtctcccagcactactaccagcgcaaacgtggcgaagggaagagtcacatccaagccgtgctggccctagcccgccgacgtctcaacgtcctctgggccatgatccgcgacaacacgtcctacgaactccgtcccccgatccccgcaactgcttgacgagcgctattgggaa

SEQ ID NO: 8546 - DNA, 1328 bp, unidentified
  source 1..1328: mol_type = unassigned DNA; note = element_d692b12
  misc_feature 1..2: note = core
  misc_feature 3..68: note = LE
  misc_feature 69..1073: note = CDS
  misc_feature 1074..1328: note = RE
  misc_feature 1095..1326: note = bridgeRNA
ttaatgagatggtcactccctccttcccggtactatgctgaggacaggctttcattcggagaactatcatggaaaacattgcgctcattggtatcgatctgggtaaaaactctttccatattcattgccaggatcgtcgcgggaaggctgtttaccgtaaaaaatttacccggccaaagttgatcgaatttttggcgacatgccccgctacaaccatcgcaatggaagcctgtggcggttctcactttatggcacgcaagttggaagagttggggcattccccaaagctgatatcaccacaatttgtccgcccgttcgttaaaagcaataaaaacgactttgtcgacgccgaagctatttgtgaagctgcatcgcgtccgtctatgcgttttgtgcagcccagaacggaatctcagcaggcaatgcgggctctgcatcgtgtccgtgaatccctggttcaggataaggtaaaaacaaccaatcaaatgcatgcttttctgctggaatttggtatcagcgttccgcgaggtgctgccgttattagtcgactgagtacccttcttgaggacagtagtttgcctctttatctcagccagttactgctgaaattacaacagcattatcactatcttgttgagcagattaaagatctggaatctcagttgaaacgaaagttggacgaagatgaggttggacagcgcttgctgagtattccctgcgttggaacgctgactgccagtactatttcaactgagattggcgacgggaagcagtacgccagcagccgtgactttgcggcggcaacagggctggtaccccgacagtacagcacgggaggtcggacgacattgttagggattagcaagcggggcaacaaaaagatccgaactttgttggttcagtgtgccagggtattcatacaaaaactggaacaccagtctggcaagttggccgactgggtcagggagttgttgtgtcggaaaagcaactttgtcgtcacctgtgctctggcaaacaagctggccagaatagcctgggcactgacggcgcgacagcaaacttacgaagcataaaggcagaaatacaccagtttaaacaatcattcatctggttttgcgaatactgatattgatgatactaacggcccaccggcctgttgaggaacctgtaaaacggaaaggctcattgaagccgtatattttctggaggttcatcaggcgcggaactcatcgaggcgcgggaataaaatcccattcagacgccggatagattcaagcaagccaacttgtcgtcaaaatcggtgttgcaaaaacgggagtgaccataga

SEQ ID NO: 8547 - DNA, 1639 bp, unidentified
  source 1..1639: mol_type = unassigned DNA; note = element_d698a88
  misc_feature 1..2: note = core
  misc_feature 3..224: note = LE
  misc_feature 225..1556: note = CDS
  misc_feature 1557..1639: note = RE
agtccttttatccccgcgggtgacgtcgcgcgacgtgaaaatgggggagggttgcccgccgacgccgaaccaggtcttgagatgcgatctcgtgcaccagtctggccgtggggccttgacctgaagggtcgcgcactgtgcttggagcacgccggtcagattttcggttcccgaccgaggcccccgggcatcccgcttcatgtcccttggtgctggaggtggttgtggtgctgcgtgacgttgaggagatcccggatgaggagcatgagcaggttatcggccgggtctgcgccatcgatgtggcgaaggagtccggcaaggtatgcacgcgggtgccgcacgagtcccggccaggcgggcgcgtgtgcaaggtgtgggatgtggccgccaccacgcgctcggtcaccgagctggctgagcatctggcaggcgaggggatcgaggtggtgacggtcgagtcgacgtcggactactggcggatcttcttttacctgctggaagcaggtggcttgaaagtgcagctggtcaacgctcgcgatgtgaagaatgtgccgggccggccgaagacggacaaactcgatgcggtgtggctggccaagctcaccgagaaagggctgctgcggccctcgttcgtgccgcccgcggagatccggcgcttgcgtgattacacccgcacacgcacggacctgacccaggagcggacccgctactggtcgcggctggagaagctgctggaagacgccctgatcaaggtgtcgtcggtggccagcaagatcgacgggatgtccgtgcgggacatggtggaagcgctgatcgccggggaacgcgacccctgggtgctggctggcctggcccgcggccggctcaaagccaagcacacggctctcatttccgccttgaacgggcagttcgacgagcatcacgccgaactcgcccgcatcttgctcgatcagatcgacgggctgtcccgccagatcggcaagctcaccgccaggattgaggaactggtcgccggactccccgccgccgcagcacctgctggcgacggggaagcagagcaacccccgctgcccgcggtgggacgcttgatggaggttcccgggattgccctgcgcggagcgcaagtgatcctcgccgagatcggcctggacatgtcgcgcttcgccaccgcaggccacctagtgtcctgggcgaagctgtgcccccgcacgatccagtccggggcgaagagctcggccgccaaaagcgggaagggcaacccgtatctcaaaggcattctcggcgaagccgctgctgccgccgccaagaccgagaccttcctcggggagcgttaccggcggatcgtcaaacggcgcggcaagctcaaagccctggtcgccgtcgcacgatccatcctggtgatcatctggcacctcctggccgaccccgcggcccgctaccgtgacctgggacccgactaccacgccagccggatcgaccagggcaggaaagcccgaaaccacatccgccagctcgaagcgctcggctactccgtcaccctctccccggctgcctgacagcaggcggagtagccggcgggccagcgagccggctccgccggcgctgccgcacacccagccacggtgatgattttccggtc

SEQ ID NO: 8548 - DNA, 1596 bp, unidentified
  source 1..1596: mol_type = unassigned DNA; note = element_d6a3c31
  misc_feature 1..2: note = core
  misc_feature 3..264: note = LE
  misc_feature 265..1479: note = CDS
  misc_feature 1480..1596: note = RE
  misc_feature 12..287: note = bridgeRNA
cagttactatatatttggttagaggcgtggcagccagccacgtcttttccatcttattgcctaagctggtaaaatgagagcgcaatggcctgacggtgtcctccaaggacttagcgtccgttgaaatgtcagtcagccgcctctcattcccagcgttcgatttgtgtaggtagaaccgaagcgttcgtgttatcagactgatagaatcggcaatgaggaaaggtggccccgccacattgctaacccataacaaggagtgattgcatgaacaacttagccggcattgatgtttccaagggaaaaagcatggtttctgttcttcgcccttttggcgaagtagtggctctgcctttcactgtacagcacacccccagtgaactcagagagctggcaaactatctgaaaagcccggagggtgaaacaagagtagttatggagcacactgggcgatactatgaaccgattgcgcaagcactccacgatgcagggatttatgtctgtgccgtcaatcccaaattgattaaagactacggaaacaactcccttcgtaagatcaaaacggacaaagcggattccagaaagattgctcgctacgggcttgacaactgggccgacttacgcccgtattcttctatggacaccattcgttatcagttaaagactatgaatcggcaatatggtttgttttcaaaaaataggacaacattaaaaaacaatctcatatcactgcttgaccaaacctatcccggtgcaaacgctctttttgacagtccagtccgtgacgatggaagccagaaatgggtggactttgttgcatccttttggcatgtagactgcgtatgcagcatcagcttaatcgcttttacagaaaggtatcagaagtggtgcaagcgccacggttataacttcagcaacaaaacggcaacagcgatttatgaaggggctaagaaaatcttggttacagtgcccaaaaatcccacgtcgaaattccccatccaacaagcagtggagcaactcaatgcctgttcgaagagcatcgaaatgctccgcatcgagatgaatcatctggcatcccaactgccggaatatcctgtcgtcatgtcgatgtatggtgtcggagaacggcttgggcctcaactcatagcagagatcggtgatgtaactcgctttgctcacaagggatcgctgtcagcatttgcgggcgttgatcctggcgcaaaccaatccggaaacatggaattgaagagcgcacgttcttcaaaatgtggttctcctgctttgcgcaaagcactattcaacgttatggattgcttaattaagaaacaaccgatggacgatcccgtatatcttttcatggacaagaaacgtgctgaaggcaaaccatactttgtctacatgactgctggagccaacaagtttctgcgggtttactacggtcgcgttacagaatacttgaaatctttagacaccacacaataactcttccgagccacaccataggccagcgttgatgacggtggcctttttgtcatgctcttttactcaactaagcagctatcgggattatcaattagcacttgacattttatttgtagg

SEQ ID NO: 8549 - DNA, 1401 bp, unidentified
  source 1..1401: mol_type = unassigned DNA; note = element_d6ab413
  misc_feature 1..3: note = core
  misc_feature 4..87: note = LE
  misc_feature 88..1125: note = CDS
  misc_feature 1126..1401: note = RE
  misc_feature 1090..1388: note = bridgeRNA
agatggggtggttgccgtcctccctcaacggcatcgcaatgtgccaaagtggtggtgtttcatccacagagcaaaaggacgacaaccatggagcaagatacaatgattggtgtggacttggcaaagagcgtttttcagcttcacggtgccacaatgacggggcatgtgaaattcagaaagaagctttctcgccaacagtttcgcaagtttaagacagatcatccatcggcgtcagtcgtgatggaagcttgcggtagtgcccattactgggcgcgggaaatgacgcatcttggccatgaggtgaagctgatcgccccgcaatatgtccggcccttcgtgaaacggcaaaagaatgacgtggccgatgccgaggcgatcgtgatcgcggcacaacgtcccgaaatgcgctttgtcgagccgaaatgtgaggaccagcaggctcgcgccgtgctattccgtgctcgcgagcgccttgtccaccaacgcactgaactcgtaaatgcgcttcgcgcggtcctttacgaattcggtaaaatcgtcccacaggggatcaggcatctaaagcgcatcgatgcgatgcccgaggatccgagcagcagtttgcccatgctggtgtgcgaagagtgtcgggacctgatggcgcagattgccgaaaagacggctcggattgtggcaaagacgaagaaggtgaaggagttagctgagcagaccgtcatggcgcgccgcttacagacgatgcccggagtcggccccatgaccgcccttgccattgaggcctttgctccggacatgaagatctttcggcgcgggcgcgattttagcgcttggctggggctggtgccgcgccagcattcctcagggggtaaggagcggctgggacgcatctcaaaggcaggtcagaccgacattcggcgactgctgatcattggagcaatgtctcgactgaattggatgggacgcaggtcgatcccggaaggctcatggctcgcggaaatgctgtcaagaaagccgcgaatgttggtcgcgatcgcattggccaataagatggctcgcgccttatgggcgatgctgacgaacaacgaaggttatcgagatccgacctttgcgaaggccgctggagcgtgaaacttctgctgcatcggaaacgcagagatcggtaagttgggggtgtgaaaagtcgatggcctgaatgggcaaaatgatcgaatagatctagattgggaaaaccaggcgatcttccggagcaaccaagctcggtacacagatatggacccgatctgcggatcaccataccggccagcggcttctgaaatgccgctttcaaaggcctgacagaagaacgcgctcgatcacatgctcaaacggccaaaagcttcttgcatctaggacggcaaccacaga

SEQ ID NO: 8550 - DNA, 1399 bp, unidentified
  source 1..1399: mol_type = unassigned DNA; note = element_d6ad3bb
  misc_feature 1..2: note = core
  misc_feature 3..85: note = LE
  misc_feature 86..1126: note = CDS
  misc_feature 1127..1399: note = RE
  misc_feature 1144..1387: note = bridgeRNA
tgatgaggtggaacggccctccaccacagcatccaagtgctaaaacgtcggcgttatttcaacgccacaagataggagccgttccgtgaaacaaattaccaccatcggactggatttggccaaacagatttttcaggtccacggcgcggacgccgatggttctcctgtcttcaatcgaaggctgcgccttggtgaggtgctgagattcttcgaaaagcatccttcgtgtctggtcggtatcgaggcatgcgggagctctcattactgggcacgcgagatcgcagcacttggtcacgaggtgcgattgatgccgccagcctatgtgaagcctttcgtgaagcgaggtaagacagatgcagccgatgcggaggcgatcagcgaggcagtggtccgtaagacaatgcgcttcgtcccggtcaaatcggttgaacaacaggcagcagcgatagtccttaagacacgcggacttttggtccgccagcaaacccagttgatcaatgcactgcgggctcacctgtcggagttgggcatcgtcgtcggcaccggcagagcaaaagtagcaggtttggtcgagatcgtacgggatgagacggatgtccgtttaccgaaggccgcccgcttcgccttgtcggcaatcgctgatcagatcgaggcgctggcccgacagatcgataggctcgggagggagatcgttgccgaggcaaagcgagacaaggatatgcggcggttgaccacgataccgggtgttggagcaatcacagcggcatctatcaaggcgcttgttccggatcccgccgggttcaaatccggccgtcatctcgctgcatggttaggattgacaccgaggcctcattcgagtggcggcaaggagcgcttgggtaggatatcgaagatgggaaatcctgagcttcgttccctgctggtgctgggcgcaactgcggttctgcggcacgcgcggggcaacaccaacgcatcgaaatggctggtcgccctcatggcacgacgaccttacaaggttgccgccgttgcgcttgcaaataagatggcgcggatcatctgggcgcttttgacgaagggcggaacatatcgaaatatggaggcagcaacccccgcagcaagcgcgtgagctctaagctgatccataaacactgaccggcgcagtagccgtcagaggcgaggtgcatgaacagacgatgattccatgggaacgaaatcccgaagcgagacaggccgtttctcgcacagcgcatacagcgcgtaagtgtgatcagcccctcgcatcgcggacttcatcgaggccagcggtccaagccgcgctgaaaggccggacatatgactgcaccgttcccgggtgatgaaccgtttgaaaaagtccttgcctggcgggccgttccacata

SEQ ID NO: 8551 - DNA, 1491 bp, unidentified
  source 1..1491: mol_type = unassigned DNA; note = element_d6b007e
  misc_feature 1: note = core
  misc_feature 2..233: note = LE
  misc_feature 234..1439: note = CDS
  misc_feature 1440..1491: note = RE
  misc_feature 9..230: note = bridgeRNA
cgttaccttcttcgtggccccgggcctggggctcccggcctccgggcccggcatgacttttgccccctgtcgaccatgacccggggggtggtgtcaccgggccgggaggcaccggtcgaccgctgataggggcacgagcgccggcctgtccggcaaggctctgcgtaacgtggttgccggcaactggtgccacgtcgaggccggggcggcaagaccttccctggaggaagcacgtgatcgacatcagcgacatcggcgtctacctcgggctggacgtcggcaagggcgaacaccacgcccacggcctgcgaccggacggcaagaccgtagtcgacaagccgctgcccaacagtgaaccgaagctgcgggccatgctggacaagctcgccgcgaagtacggcaccgtgctcgtcgtcgtcgaccagcccgcctcgatcggcgccctgccgctcgccgtcgcccgggatgcgggccgcaaagtcgcctacctgcccggcctgacgatgcggcgaatcgccgacctctaccccggcgagggcaagaccgacacccgcgacgcggcgatcatcgccgacgccgcccgcaccatgccgcacacgctccgctccatcgaactggacgacgagaccgtcgccgaactgcacatgatcgtgggcttcgacgacgacctcgcaggcgaggtcacccgcgtcgccaaccggctgcgggggctgctcacccaaatccatccctcgctggagcgggtcccgggcccgcgcatccaacacccggccgtgctctggctgctcgagcgcttcggctcgcccaaggcaatccgcaaggccggacgccgtcaactgatcaccatcctgcggccaaaggccccacgcatggccgagcgcctggtcgaggacatcttcaccgcactcgacgaacagaccgtcgtcgttcccggcaccgacgcggccgcggtgatcgtgcccaaactcgccgcgaacctgtccgccctgctggaccagcgcagacaactcgcctccagcatcgaggaactgctggaggcccaccctctttccaagctcctgacgtcgatgccgagcataggcgtcaggaccggagccaggatcctcatcgacgtcggtgacggatccgccttccccaccgccggccacctcgccgcctacgccggcctggctcccgtcacccgacggtccgggtcctccatccgtggcgagagcccctcccgaagaggcaacaagcacctcaaacgggccttcttcgtgtccgcgttcgcggctctggccgaccccgcctccagggcctactacgagcggaagaaagccgagggcaagcgccacaagcaggccctgatgtgtctcgcccgccgccgcgtcgacgtgctgttcgccatgctccgcgacggcaccttcttcgagccccactccgccccccaaaccgcctgaaccacgacagaacaaccgccccgccccttgacgaaagagataagggcacccc

SEQ ID NO: 8552 - DNA, 1800 bp, unidentified
  source 1..1800: mol_type = unassigned DNA; note = element_d6b061c
  misc_feature 1..2: note = core
  misc_feature 3..352: note = LE
  misc_feature 353..1654: note = CDS
  misc_feature 1655..1800: note = RE
  misc_feature 104..384: note = bridgeRNA
ctcgtataataatttttgtaagcatcttcttaagaaattaccagtaataaaatcccttattactacaaattcactggcaacattgttctttgataactctacaaatttgcctttactaaaagttaatttgtttacttttatctaatgcccgtggacaattaatataagccattgaggttagttctacttgcctcctgtagggccttttaggccgcttctgtttaagtcagttcccctggcctggtgttagctttgaaccgctgggtgtttatctggcttcccctctcctgtatggcagttcaaggagtcgtgcataggggttccagagcgtattctaattgcgaggatgttgatgcgccaggtaccacgggcattagttaattcaatggctgataatttcttcatgaaggaggtgatttcattgtctaattcattactggtcggtattgatgtaagtcttaatgacaacaaagttcgtatcctccatcctgacggtaccagtctttctaagtttgtggttgcaaactcggttcccggtgctaaaagcctttctaagaaagttgttggtattgctgaaaagaacggttttgataatattgttataggtcttgaatctacttctgtatatggcgatcctttagtttactttcttaaacaggacgtctctgtaaatagatttaacaccaaaatccatgtgcttaaccctactcaggtaaacaagtttaaaatgttttatcctgatcttcccaagaccgatgatatagatgcctggatcattgctgagcatctacgcttcgggcgtataaacaaggaggtttacatggatgacaggtacaaagctcttcaaaagcttaccagagctagattccataccgttcaaaaccttgcccgggagaaaaactggttccttaacaacctgtttctaaagttttcttctcttgctcaggagaaaatcttctcggacaggtttggagctacagccagcagcatcattgaagaattcttctcagttgatgaaatttcttacatgccaatcgaagatttggccgagttcatcaacaaaaaaggtaaaggtcatttccaaaacccggaagaggtcgcggctgctgttcaaaaagctgctcgaagctcctaccgtctgcccaagacggttacagattcggttaatcaagtactggctgtatcctttgttgctatgaaagcttacaaggaacagctaaagatatttgataaagctattgaagagcagttcaagctcattcctaatacgctaacctctgtcaaaggtattggacctgtttatgctgccggcattgtagccgaaattggtgatattcatcgtttcaaagatcatgcggcactagccaagtttgcgggtattgcctggactaaataccagtcaggtaattttacggctgccaatactcatttaattaaatccggcaaccgatatttacgctactacatcatggaagctgctaacaaagtgagaatgcacgatcctgagtttaaacgcttttatgatttaaagtacagtcaaaccccgaaaactccgcataaacgtgcacttgcactaactgccagaaaattcgtccggcttgtctatgctctgctgcatagcaaccggctttatacaccgcctaaaggagaataatctccgtttggcatccatttcctgccattattgttaattgattttggcaggcttgttagggattctctttttgcgctttttttacccataacaccctatttttttaaaacttttttccaattggttcttgacatttaaccgctgga

SEQ ID NO: 8553 - DNA, 1542 bp, unidentified
  source 1..1542: mol_type = unassigned DNA; note = element_d6c2a3c
  misc_feature 1..2: note = core
  misc_feature 3..351: note = LE
  misc_feature 352..1527: note = CDS
  misc_feature 1528..1542: note = RE
  misc_feature 6..219: note = bridgeRNA
cttgtattatagagtagtagttattaaagcccctctccaagggctgtgctacactgtaagggatgctgtggattggtgtttcacctcctaccacaagatggtttcagaaaggttccaaccacagctccttacacttttgttaatcagttaaatatcgccagacggtttatgtggaacaaggctacaaaagtaaggtgtactgtggatgcagcatcacatatttaccgttggagggattggttatggtaatttctgttggcattgatgtttcaaaggataagcacgattgttttatccaaagttcagagggagaagtcctggtggatgtcttcactattcccaataatatggatggattcaacatactgctggagaaaattcagagatgtgccacatctcaggacgaaaattaaagtagggcttgaggcgaccgggcattacagctacaacctgcttgggtttcttcttgacaatggtctggccacctatgtcctgaatcccttacatacaaacctttaccggaagagcctcagtctgagaaagaccaaaaccgaccgggtggatgcacgaacaattgcttctatgctgttatccgatgtgggcctcaaaccctacacagatacagcataccacaatgaggagctaaagtcactaaccagataccgttttgacaaggtgaaagaacgagcaaaactgaaaacttctgtttcccggctggtctgcatcctgttccccgaactggaaaagctcgttccgtctctacatattgcctctgtctacgccctgctggcggagtttcccggtgccaaacagattgccgctgcccatttgacgaggctgaaagcactgctcgaaaccgcctctaaaggccactacaaacgggacatggctcttgaaatccgagatgctgccagaaactctattggctcctggatgcccgccaagtctcttgaattgcagcacaccatccggctcatccgagagctggacgacgaaatcgttgaaattgaagagcagattcaagccattatggatgaacttaattctcccattaccacgatcccagggcttggattccgaatggccgccatgatctttgctgaggttggcgacttcaaccgttttgattccccggacaagctattggcttatgccgggatgtctccctctacttaccagtccgggcagctcaagaattgttacccacacatggaaaagcgtggctctcgatacctacgctacgccctttacaacgcgaccaagtatgtctgccactgggacccgacctttgctgcctatcttgctaagaagcgggcggagggcaagcactacaatgtcgctctttctcacgctgccaaaaaagttggttcgtctgatatttgccatggagaaatccaggcggccatattgcttagcggcttgagtgcaactactcgaatagccagcaggggtctgacaagacttcagctttgctataccctttctgagacatcttttctcttcaccaccattcattttgtgggttgacacttaatagttaat

SEQ ID NO: 8554 - DNA, 1346 bp, unidentified
  source 1..1346: mol_type = unassigned DNA; note = element_d6c5b66
  misc_feature 1..2: note = core
  misc_feature 3..73: note = LE
  misc_feature 74..1078: note = CDS
  misc_feature 1079..1346: note = RE
  misc_feature 1150..1317: note = bridgeRNA
agatgtaatgaaaacggtcgtgcctccaagggtatattcgtgctcgaagcacaaaccctgaaggaggcacggaatgatccacgtaggagtagatcttcatcagagattttgctacatgacggctctggactcaagaggaagacagctgaatgcgcaagcggtgcccaacgaagcggcagcgctgcaagcatattttcggcagtttcgtaaaccggtgcaggtggcggtggaagcctgcagtttctggccggcctttcgggcagcggtgggccagcaggtggaggtgcggttggtgcattcgttgcgggtgaaggcgatcgcagcggccaagctgaagaacgatcgggtggattcggcgaccttggcgcacttgttgcgctgcgatctattgccgcaagcctggatggcggacgaggagacgcgaggattgcggcagcaggtgcgtttgcgggcaacgttggtgcggcaacgcacgcggctgaagaaccaagtgcatgccattttgcatcagcagggactgcgccaccgatttacggatctgtttggacgagctggacgacagtggctgcagcaagcgccgcttccggccgtggcgcagaaggcagtgagcacgtatgtggaactcatcgatcacttcaacctacagattgagcagcaagaccgggcggtgcaacagttcacgcgcagtgaggaacgagccaagtggttgatgacgattcccgggatcggagcgtattcggccatgatgttgctggccgagatcggtaccatcaagcgttttgccaacaagcgggccttgagcaactatgctggcttggtcccctgggtgcgggaatcggccgacaagcggcgcagcggagggattacgcgcgtaggctcgccctggctgcgttggatcatggtggaagcggcgcagaccgcggtgcgaacttcgccggcggtggccggctactttcaacggttgagtcggcgtaagcaccgcaacgtagccatagtggcggtggcccataagctgctggtagcggtctgggctctgttgcagcatggcgagtgttttgaagaaggaaacttcaagtaagctgtggaaaagacggcgcgcggcgcgccttggaaaacgctggcgcgtttcccactttcccacagctccggctgcggctgggattgagttttaggtttgcggcggtgtaagggagtctccgtcagctcggtgtcattcttgtcccacgaggacctggctcagatggagcgacggagttcggacgtaccttatgtgcctcgagcacgcatagaagtctgtccgcatcgcccgcaattaccctgtggacaggcacgcctgttttcataga

SEQ ID NO: 8555 - DNA, 1167 bp, unidentified
  source 1..1167: mol_type = unassigned DNA; note = element_d6c9b77
  misc_feature 1..2: note = core
  misc_feature 3..102: note = LE
  misc_feature 103..1152: note = CDS
  misc_feature 1153..1167: note = RE
cttgtatctctcccttgcccgctgacacgacaccggcgaggctggcggcggacgggagcccgcccatctctcgggtgatcgagcccgttcttgatctctcgggtgatcgagcccgttcttgagcacggtgccccgtccgccggttccatccggaacccgaacagtcgctcgggccgcaaggtgagcccgcattcgcaaggacgggtcatcgaacagccttcttcgccaagcttcgtcggcattgacgtctcgaaggaccgtctcgacgtacacattctgcccgcagggcaggccttcgccgttgcgcgcaacggcgaaggcctggatcacctcgtcaccgagttgcgcacgcgtgcccccaccctgatcgtgcttgaagcgacgggcggcttcgaagtgaccgtcgccgccgtcctggcgggcgctggtctgcccctggccgtcgttaatccgcgtcagatccgcgatttcgcccgcgccactgggcggctcgccaaaaccgacgcgctcgatgcccagatcatcgccctgttcgccgaacgcatccgccccgaaccgcgcccgatcgccgacgccgagagccaggtgctggccgagttggtggcgcggcgtcggcaagtggtcgagatgatcggcatggaagccaaccgcctgcgtcaggcccgcagcccacgggtccgccgcaccatcgaggccacccggaaaaccttggaggctcaactggtcgagttggacaaggacatcgacgacagcgtgcgtggctcccccgtctggcgagctgccgacgacctgctgacctcagtccccggcttcggcggcatcaccgcgcgcacgttgatcgctgatctacccgaactcggccgccttgaccgccggcgtatcgccgccttggtcggcgtcgcgcccgtcaaccgcgattccggccagatgcgtggccatagagccatcgccggtggccgcaccgctgtgcgcaacgccctctacatggctgcgctctcggcggtccgctggaaccccgtcatcaaggcccattacaccaggatcgtggcaacagggcgtcccaagaaggtcgccctcgtcgcttgcatgcgccatctcctcaccatcctgaacgccatcatcaagacagcctcgccatggaaaaccgcttgacctgcaacacagtcg

SEQ ID NO: 8556 - DNA, 1407 bp, unidentified
  source 1..1407: mol_type = unassigned DNA; note = element_d6ce14d
  misc_feature 1..2: note = core
  misc_feature 3..79: note = LE
  misc_feature 80..1123: note = CDS
  misc_feature 1124..1407: note = RE
  misc_feature 1125..1394: note = bridgeRNA
tgttggagtggacggcccccgaacggcatcgaaatgtgccagattgagtcgtcgaagaactcaaacgaaggagccgtccgtggacaagattattcgtattggcatggatacgtcgaaacacgtcttccagctgcatggtgtgaacgccgccgaacaaccggttctgcgcaagaagatgcgccgcaaggaaatggtggatttctttgcgaagtacccgccaaccgtcatcgcgatcgaagcttgtggtgcctcgcatcattgggcgcggctgctggaagggttcggccatgaggtcaagctaattgcgccgcagcttgcgaagccctacgtcaagcgcggcaagaatgatgccgcagatgccgaagcgctatgcgaggcgatgagccgcccgacaatgcggttcgtgcctgtgaagagcgccgagcaacaagcggcattgatgctggtcggcatgcgtgagcgtgctgtcgccacccgaacgcagctggctaatacgatccggggctatgctgcagaattcggagttaccgcagccaaaggcctgtgtcatattccgcgcctgctagaccggatcatggctgatgagaccattcctgcccttgcgcgcgatctgtttgcgtcactggcggcagagttcgcgcagttgaaggaacgccttaaggggatagaggcgaagctaatgacctggtaccggagcgacgagtgctgtcgtcgcctcgccacgatccccggtgtcgggccgatcggtgcggttttgctggtgatgaaagcgcccgcaccggagctgtttacatccggaaggcaattcgctgcctggatggggctgacgccccgggatcattcgaccgccggtaaagtcagaccaggtgtcatcacgcgagccggcgatgagatgttgcgcaagacactcgtcgtgggcgcgacttcattgctgcgacaggtgagagcgggcaaaggcaggaacgcctcgccctggctcatcgacctgcttcggcgcaagccgcctaaacttgtggctgtggcacttgccaacaagatcgccaggattgcgtggaaaatgatgatgtcgggcgaagcctacaaaaacaccattgcgcgaccggttgtggcctgcgcggcgtgaccagatcggccagtcacggtgagcaggagaaagacgctaccgtgctgagctgatgcgtgaacttgcaggaaacctgaagatggtgtgatcgatcgatccaagacgtgggacaccccgtgtgtgccaatggcccgatgtggccgtcaccttgtttggaacccatgttgcggaatccatcttggccagcgttcatgtgcgagcgcaccaacaggccggacatatgaacgcaagcgatccgatcaaaatcgtcagagtgctcttgcggggaggaggccgtccacata

SEQ ID NO: 8557 - DNA, 1508 bp, unidentified
  source 1..1508: mol_type = unassigned DNA; note = element_d6d0437
  misc_feature 1..4: note = core
  misc_feature 5..241: note = LE
  misc_feature 242..1483: note = CDS
  misc_feature 1484..1508: note = RE
gtcactggtccacactcctcgtgtcgagatcgggcagtgttcggttgaggtctcgatgagggtgggggtgacggccacgtacggtcgcccttcgagggccagcatgacacggccgccccccgtcttctcgggtgtcttgaaccggcaagagagggaagcgccgcagagcgccagtcagtgaccgcccggcgagaccccgctcatcgtgagctcgaacacattccgagaacaaggagagcgagtgactgaaacagtgctggaaatgaacgcgttgtggttcgtcggcatcgattgggccagcgaggaacacgccgttcatgtcatggcgccgagtggccgcaaggtcaaggcgttcatgatcgaacattcccgagacgggttcacgaacctcgtcgaacgactcgccaaggtcggtgttgcggcgtcgatgccggtggcgatcgagcggcccgacggtcgtctggtcgacgtgctgctggccgccgggcacccggtggtgccggtgtcgccgaacgcgatcaaggcgtggcgagacggcgaggttgtctcgggtgccaagtccgacgccggtgacgctgaggtgatcgccgagtatctgcggatgcggcaacacaagctgcgcgtgctcgcaccgttcagcgacgcgacgcgcgggttgcgcgctgtggtgcgtgcccgtgacgccctcgtcgaacaacgagtcgccgccaacaatcagctcgaggcctgcctggaagcgttctggccaggtgcgaatgcgatcttcgctgacatctgcagcgacatcgcgctcgcgttcttggagcgctacccgacgccagccagcgccctccggctcaccgagaaacagttggccacgttcttgacccgccacggctactccgggcgccgctccgcgagcgagctgctggaacgcctccgatccgtgcccgacggcatcagccccggcctcgaaaaccgagcccgacaagcaacagtcatcggctacatcggcgtgatccgggcgctcaacgacgcgatcaaacaactcgcccgagagaccgccgcccaactcggggagcacccagaccacacgattttcacgtccctgccaaggtccggttccatcaacgcagcccagatgctcgccgagtggggcgactgccgcgaagcctacgacagccccgaagcagtctgcgcgctggccggcctcacgccggtcaccaaacattccggcaaacaccacgccgtccacttccgatgggcctgcaacaccagattccgcgacgccgtgaccaccttcgccgacaacagccgccacgcctcgccctgggcagcgaacatctaccaacgcgccaaagaccgcggctgcgaccacccccacgccatccgcatcctcgcccgcgcctgggtccgcgtcatctggcgctgctggaccaacggcaccgcctacgaccccaacctgcacaacggagcccagcaactcaccaccaacgccgcctgacgaacaaggggttgacatagagggt

SEQ ID NO: 8558 - DNA, 1546 bp, unidentified
  source 1..1546: mol_type = unassigned DNA; note = element_d6e03be
  misc_feature 1..2: note = core
  misc_feature 3..263: note = LE
  misc_feature 264..1253: note = CDS
  misc_feature 1254..1546: note = RE
  misc_feature 3..247: note = bridgeRNA
cttgtatgatgtttatagaagctaaaacatcacattttcctttcttttagtgatgtgacataatacattcagatgctgtggacttttgattttcttctgtagtccaactacttaaaggagtgtattgccacggttttatctgaatcatttataagctggatgttgccacgagggaattccttcccgagcacttatttcaatcaagtctatgagggtaaacacctgtggaattgtcacagtatcacactcagaaaggagctcttatgatttacgtaggcattgatattgccaaactcaaccatttcgcctctaccatttcttcagatggtgaaattatgcttcaaccgttcaaatttacaaatgactatgatggcttccatctgctgcttcacaagctcgattctttggatcctgacagcctcatcataggtcttggatcaacggctcactatggcaacaaccttcttgaattccttgtcaaacataactacaaggtctgtgtcataaaccctatccagacctctgcaatgcgaaagaacaacattcgcaaaacaaaaacggataaggtagatacttacataattgctaaaactttaatgatggatcctcaccgtttcttttcgcagcatgatctttcaatcatgcacttaaaggaattggggcgtttccgcatgaaactaatcaagaaacgtacccagggcaagatccaactaatgtcgtatgttgatcaggctttccctgaactgcagtatttcttcaaatctggcatccaccagaaatctgtgtatgcagttcttaaagaagcacctacgaccaaagacattgcttctatgcacctgacccatctgtcacacttgcttgaggtttcctcccacggtcatttcaagaaagacacagcgactgcattaaggattctggcacagaagtctgtcggttgcaacgacagttctatatctactcagataactcagaccattgaactaatcgagttactggatagccaggttcatgacgttgaatctgaaatggaattgattgtcaattctttggattccgtcattatgaccattccgggcattggttttatcaatggcggaatgatactgggcgagattggcgatattacgcgcttctccagcccatcaaaagtgcttgcatttgctggtcttgatccgactgtctatcagtctggaaactttaatgccagccataccaagatgtccaaacgtgggtctcgtcccctttcgctttgataaatgcagcacataacgttgtcaaaaacaacaaaacctttaaagattactatgatcagaaaatgtcagagggaaagtcccattacaacgccttaggacattgtgccgggaagttagttcgcatcatttataaaatgctcactgacaacgtttcatttaatttggattaatatctgaccgttcatatatatttttaaaaagcaccctatgggagctctattagttagccatttttccggtcagaaaataaatataattttttgctaatttagggttgactattcatagctggt

SEQ ID NO: 8559 - DNA, 1380 bp, unidentified
  source 1..1380: mol_type = unassigned DNA; note = element_d6e26b4
  misc_feature 1..3: note = core
  misc_feature 4..76: note = LE
  misc_feature 77..1114: note = CDS
  misc_feature 1115..1380: note = RE
  misc_feature 1125..1317: note = bridgeRNA
agcatcggtgatcgggcgggctcgtggcccgccgagctctccatagactggaagacctgtctagaaggagatggaaatgacctactacaccggaattgacgtgtcgctgcggtcggtctcgatctgcgtcgtggacgacaagggcgaggtctgcctggaggcgaaggttgcggccgagatcgatgccatcgtcgatcgactgcaccgcttcagcggtgacgtgaagtcggtcggcttcgaggccggcacgctgacgcagtacctgacctacgggctgcaggccgccgggttcgaagtcatttgcctggaggccaggcaagtcagcgtcactctggccgcgatgcgcaacaagaccgaccgcaacgacgctcgcgggctcgcccagatcctcaggaccggctggtatagccgggtccacgtcaagagcttgcacagccaccaggtgcgagctctgctggccagtcgcaaggcgatcctcaagaagtgcgtcgatctcgagaacgagctgcgcggcctgctcaaggtgttcggcattcggctgcccagcagggtgggccacggatcgttcgacgccgagctgcgcgagacggtctgcagcgacgacatgctcgcgtgcgctctcgtgccgttgctggacgcgaggacggtgctctacaagacctacctgaagctcgacaacgcggtcaagggactggtgcgcgtcgatccaatctgccgccgcctgatgtccatccccggcgtcggcccggtcacggcgttgacgttcaaggccgcggtcgacgacccgaaccgcttcaagtcctcacgcaccgtggcggcgcacttcgggctgactccacggcgcttccagtccggcgaggtcgacaacccagggcacatctccagagcaggcgatgccgatgttcgctcggcactctatgtcgccgcccactcgctgctgacccgcaacgctcagtggtcgtcactgaaggcgtggggtgttcgactcgccaagatacggggtcatcgccgcgcggtcattgctgtggcccgcaagctggcggtgatcctgcaccgcatgtggatcgacgggtctgagttccgctggggcagcccaaccgcgaccgtcgtatgaaccgattgaccgaggagtccaagcactgagttagagcgtctaggtgtgaacgatggtccgggtgaagccgcaaacggctgctgcgcatcaagcgcgtccaaaagcatggctccccgctccgtccgaccaatgcgtgcagcgtcgattccaaggtcgagccgactgcgtagagaagcgtgactcacaccgaggcggtccaccgaacgtactcaacaccaaaagactgaaggagaactcgacgcttgacaaacgcgcccgatcagaga

SEQ ID NO: 8560 - DNA, 1588 bp, unidentified
  source 1..1588: mol_type = unassigned DNA; note = element_d6e2861
  misc_feature 1..2: note = core
  misc_feature 3..94: note = LE
  misc_feature 95..1276: note = CDS
  misc_feature 1277..1588: note = RE
  misc_feature 1316..1546: note = bridgeRNA
agacataatgatttgacctgcccttcctcaacgcacgtgggttatgttggggaagttgaatccttaacacagagccacattgaggagggcaggcatgaagaagtttaacgcacaacagacgatcgaaacgcaagtcagtaccgcgacgttgcgaggttgtttgggcagtgaggagcgtcacgggttttacgtagggttggatgtgcacaaggagacgattgcggtggcggtggccgaaccgggtcgggctgcggtgcactattggggcgagatcaagcacgcacctaaagcggtgtgcaagctggtgccacagctgagtgagcagtatggcggtgtgctgatgctgtggtgctacgaggcgggcccgtgcggttatgggctgtatcggcaactgctgtcgctgggccaggactgtgaggtggtggccgcgccgaggagcgatcggatcaagaccgaccggtgcgatgcgtgcaagctgcgcgcgggcgagctcacgcgggtgcgggtgccgggcgaggagcaggaagcgatgcgcgatctgagccgttgtcgactggacttcaagagccaggagcgcaaagcgcgccaacagctcaacgccttcgtgctgcgtcacggccatcactggccacgcggcaaaacacgctggacgcggggccactggaactggctggaatcgctcacgttccctcacccctggcaacaagtggtgttgcaggagtactgcgaggcggtgcgtgcggcgacgcgccgcgtcaatgatctcaccgctgagctgatgagtgcgttggtgcaatggtcgttggcgccggtggtggattcgatggtggcgttgcgcggtgtggacaagatcgccgcgatcacactgctcgccgagttgggcgacctcacacagtttagttcgcccaaacagctgatgggttatctcgggctggtgcccagtgagcacagcaccggcacacgccgtcgtcagggcggtattacgttgatgggcaatgcgcacgcgcggcgcatgctggtggaggcggcctggagctaccgtttcccggcgcgccagacgatgcacctcaagcgcaaggcccaacaggcctcctcgagcgaggccaaggtgattgcctggcaggcgcaggcacagcggcggctgtgcgggcgctaccgcacgctggttcacgccggcaagtgcacgaaagtgacctgtgtggcgattgcgcgtgaactggtggggtttatctgggcgatcgtgtgcctcgagatgccgaaactgcggctgcaatgaacacgactgcctactcagcaacgaaccaacggaggcaatgcacagacgcatgggttcagggtacttgtttcgccggtgtggagaatccttgctcgggctaaaccggcatcgtggggataatcccaggcgggcgttcgcctcgatgaaccctgatactagacaaaggccagctccgcgatgcagtgatggaaggtcggtaaccaatccacgtatctcagcatgaaccatcgtcgtaatctgcggataagcgccctgaaccgatgtgtttgaacaaactgaaatttgaaatgacttgacagctcaaaacatatc

SEQ ID NO: 8561 - DNA, 1344 bp, unidentified
  source 1..1344: mol_type = unassigned DNA; note = element_d6e95dd
  misc_feature 1..2: note = core
  misc_feature 3..83: note = LE
  misc_feature 84..1103: note = CDS
  misc_feature 1104..1344: note = RE
  misc_feature 1118..1330: note = bridgeRNA
gatggggtggatggctcccgctcccggcgtcgcaatgcgccatactgcaggtgtcagaatctgcgatcgagaggagccaccccatgcaagttaccaccgtcggcctcgacctggccaagaacatctttcaagtccacggcgtgaccgagaccggagaggttgccttcaaccgaccgttgagacgggcgcaggtgctggcgttcttcgagcgactgtcaccctgcgtcatcggcatcgaggcctgcgcatcgagccaccattgggcgcgggagctttcgcaactcggccattccgtccgactgatgccgccaatgtacgtcaaaccctacgtgaagcgtggcaagtccgatgcagtcgatgccgaggcgatctgcgaagcggtgacccggcccacgatgcgcttcgtcgagatcaagtccgaggagcagcaggcactattgtccttgcaccgcgcgcgtgacttcatcgtgcgtcagaggacgcagcttatcaacatggtccggagccttgcggcggagttcgggatcaccatcgctcggggtgtcgcgcgcgccatcgagttcgccaggtccatcatcgacggcaagcagccgggactgcccgatctggcccaggacgttctgcgcgtcctcagccgacagctgatggatcttcacaaccgccttgactggttcgaaaccatgttgcgcatccaggcgcgcctcagccgacaagctcaacttctgcagacaattcctggtgttggcccggtgaccgcctccgccgtggctgcgacgatcgggtccggccgacaattcaggagtggccgtgagtttgctgcgtggttagggctgacgcctcgcaaccattccagcggcggcaaggaacgattgggaaagatcaccaagatgggtgaccgatacctgcgccaactcatcgtggtcggcatgacgtcgcgcgtccgacaagtcgcgacccatcccgagcgagccgacccttggctgacgaagctgctgcagagaaagcccgcaaggctggcgaccgtcgcaatggcggacaaaacagcgaggatcatgtgggcaatcctcacgaggaatgagccctacaagccgcacgccgtatgagacggcgcgcgcccacgagatagcaagaccaacgatgtgatggtgtgccattcagccgctacgatcaggacgctccgacgaatgtcccgggcgccattgcccgcgaagcagataggaacctgatctgcggatcccatcagggccagcggtgatgaccgcgcaaacaggccggacacaagaccgcttctgaacaggtacacaagatcatttacgacttgctatgcgggagccatccacacag

SEQ ID NO: 8562 - DNA, 1467 bp, unidentified
  source 1..1467: mol_type = unassigned DNA; note = element_d6ed952
  misc_feature 1..2: note = core
  misc_feature 3..231: note = LE
  misc_feature 232..1446: note = CDS
  misc_feature 1447..1467: note = RE
  misc_feature 6..228: note = bridgeRNA
ctaatgggactggaaagtcttccgtagttgagagaggcttcccaccgagccgctgattggtgagcactcgaaacgacccggagcatcaagccctaggactagagcgtgccccagtcggttggcgaggttgacggagagggctggaggggtgtcgtgccaggagcactgatccattaggtcgccgccgttgcctcgggctcgttgaagactcttacaacgggaggtgaccagatgatttttgtgggagtggactgggcggaagctcaccacgacgtgtgcgttcttgaccgggacggcgaggtcctcgcgcgcacgaagatccccgacaccctcgagggagtgcgcgcgctgcacgaactcgtggcgcccttggccgaggagccccacgaggtggtcgtgggcattgaaaaggaccgcggtctcatcgtgacggccatgctcggggcgggctaccgcgtctatgcgctgaacccgatgtcggtcgcgcgctaccgcgaacgccacgtcacctccggatcgaagtccgatccgggtgacgccaaggtcgtggccgacgtcgtgcgcaccgatcgccacaaccaccgcgaggcgaagggcgacagcgacggggtcgacgcgctcaaggtgatcgcgcgcgcccaccagagtgcgatctggagccgtcaacgagagaagaacgccctgcgcaacgccctccaggactactaccccggagcgctacgcgccttcggcacggagctggacagcggcgacgcgctcgaagtcttacgggtcgctcccacaccggccctgggcgcccagctctcactggccaagatcacctcggccctgcgccgtggtggtcgtgagcgcaacctcgagcgcaccgcgaagaagatccaggcggccctgcgtgaagagcagcttcgcgagcgtccgcgtgtcgaggcggccttcggcacgatcacggcggcgcacgtggccatgatccgcgcctatggcgacacgatcgccgagctcgaggcagcgctccgcgaggattttgaacagcacccggacgccgcggtcgtcctctccctgccaggactcgggacggtcctcggcgctcgggtgctgggcgagttcggggatgccccgaatcgctacgccgatgccaagtctcgcaggaactacgccggcacgtcgccggtgaccaaggcctcgggaaagtccaaggtggtgctcgctcgccattcgcgcaacgcccggttgagtgcggcgctcgaccaatgggccttctgttcactcaagaactccaccggggctcgcacctactacgacgaactacgagcgagaggcaaaactcaccgacaagcgatccgacaactcgccaatcgactcgtcggcatcctgcacgtctgtctggagcaccacgtcgtctacgacgaaaatctcgcctggaagcaccgggtcgatattgccgcttgacaccttcgggtcaaggggtgt

SEQ ID NO: 8563 - DNA, 1376 bp, unidentified
  source 1..1376: mol_type = unassigned DNA; note = element_d6f1f45
  misc_feature 1..3: note = core
  misc_feature 4..137: note = LE
  misc_feature 138..1121: note = CDS
  misc_feature 1122..1376: note = RE
  misc_feature 1147..1364: note = bridgeRNA
tgatgctgcggacggcgccccctctgcggcatcgaagtgccataaggtggttgcgctaaggcaagccacattgaggggagccgtccctgggcgaggttatcgcgatcggtctggatattgcgaagtcggtattcccggtgcagggggtcgatggcgcgggtgtcgtggtgatccgcaagcgcattagtcgcgccaaggtattggtattcttcgccgatctgcagccgtgtctgatcggaatcgaggcgtgtccatcagcccatcactggggccgcgagctggaagcgctcggccataccgtgcggctgatgccgccgagctatgtgaaggcctacctcaagcgcagcaagaatgatgcgaacgatgcggcggcgatctgcgaagcggtcacgcgaccatcgatgcggttcgtcgcactcaagacgaaggaacagcaggcttccctgatgctgcaccggacccgtcaaatgctggtgcgtcagcgcacgatgttgatcaatgccatgcgggggcacctggccgagcttggcattgtgtcggcgaagggccgcaacgggaccggtgagttgctgaggatcatcacggatggtgcggatggccgcattcccccaatggcccgcggtattctcggtgtgttggcccggcagtacagcgccatcggtgccgagctcgggtccatccagaagagcatcctggcctggcatcgctcctgcgaggcgagccggcggctggaggagattcctggcatcggcccgatcgtcgccaccgccttggttgccgagatcggcgactggaaggcgttcgggtcgggacgcaatctcgccgcctggatcgggttggtgccgaagcagcacacgaccggcggcaaggatcggcttggcggcatcaccaagcagggcaatcgatacttgcgatggctgctcgtcaccggcgcaatggccgtcatccgctatgcgcaaaaacatggcactcacaagcggccatggctgggacgattgatggagcgccggccgaccaaggtggccgcggtcgcactcgccaacaagattgcgcgggtggcctgggccatcatggttcacggcgacaggtacaaagagccggaactgcaggcggcagcgtgagagacgccggcagatagatcggcaacaccaattggcgagggcacgacgacgtaatgcagatacggtcgttccgggaatcgggagagcccgtttgggtcaacgcaccaccaagtgcgggagttcgattgggacccgattcgcgcagagcattagggccagcggccacacctgccgcatcaacaggccggacacgtgaccgcacccgaccaatgctgcatcaaatcagaaagtccttgccagggcgccgtccacacg

SEQ ID NO: 8564 - DNA, 1663 bp, unidentified
  source 1..1663: mol_type = unassigned DNA; note = element_d705a7a
  misc_feature 1: note = core
  misc_feature 2..217: note = LE
  misc_feature 218..1417: note = CDS
  misc_feature 1418..1663: note = RE
tagcacctacggaatgaaggagccgcggcgaccgagagagcggtgcgcgcagcttttcgctgcaggcgcgcaccgctgtcgaggcggccatggccagtcaaagtttatctagaatgtgaatgttcacaacccattccggagagaccgaccatgaccacttcagattttacacccgccgccgcggtgctggtagcgatcgacattgccaaggtgcgcaatgacagaagtgctgatcgaagcaccgggccacaagcgccggcgtcgccttttggtcctcaacacccgtgttgagcacgaccatctgatcgaagtgctgcaggcgtacggccgccctgtggtctgcgcctttgaggcgaccgggaactatcaccggccgatagcatggcgcctggctgaagcgggttttgaggtgcggctggtgtcgtcgctggcgctggcccgaacacgagaagcgttgcacaacagctgggacaagaacgatccaaaggatgcccaggtgatgctgcacatgctcaggatccaggcgacgcaggtctaccatgatccgctgcgcgccggcatcaacgacgtgcaggaactgtcgaagacccatgaagcgatcgccagggccaagaccgagatccagcaccgtatcctgacgcactacctgccactgtattttcccgagatcgatcgattccgggggaacagccgcagcgactggttcttcgccttcctccatgcctttccgacgccagcaagcatcacggcgctgacaaaggaggagtttgtgacagcagcgtgggatgtcgtcggccgcaaggtcagcaagacacagattctgatggatatttacgagacggcgcgctcatcgaccggactgccgctgccgcttgatgcccctgccattcgcatgttccggatggtcattgacgaagcacgcggcctgatccggcagcgcaatgagatcgaagcgcaggccgacgagctgttgcggcacagccaggattatcagctcctgcgacaaatcccgggcattggaccgatcaacgcattgaccatcattgccgaagccggcgatcttcgccgtttcgctcatcaacgccagtttgtaaagttctgcgggctggacctctcgacacagcagtcaggccaatatcggggccagacccgcctttccaaattcggcaatgctcggctgcgccgcaccctgtggatcgccggacaagtcgccatccgccagcgggagaatggcttccgtcataagttcgaacgctacattgcgcgggatcgcgacaatcccgatctacgccgcaaggcaatgaccgctattaccgccaagatggcccgcgtcgtgcacgctgtcgtcaaaggtggttccgactaccggcccttcgttgaagggcgggtgccaggtggaagaacctctgtcagctagggccgtgagggcaccgattcgatgaccctgtagataatgttcgggtcttccgcctggatcagaagctcgtgttgaggacgggagggccgccttcgtgcggaccctgtgtttgctatggacgagaccttttcccttgccggtggaagccgcctggttcgacgacttgaccaacgtcacgcagcaagggcatgctgacgaacagagagaccttgactgcaggctccatttcgttccgcgcttagggcg

SEQ ID NO: 8565 - DNA, 1457 bp, unidentified
  source 1..1457: mol_type = unassigned DNA; note = element_d706540
  misc_feature 1..3: note = core
  misc_feature 4..121: note = LE
  misc_feature 122..1159: note = CDS
  misc_feature 1160..1457: note = RE
  misc_feature 1208..1410: note = bridgeRNA
agatgggatattcggccggctgtcgtaatcccagctttttggttgaggcgccgcgcttcaggctgatgatggacgtggtctgtgttgaggcagctacaagcatcagatggagaagcgcagcatgaaacattatgccggactagacgtctcggtcaaagagacctccgtatgcatcgtggacgaagcgggcaggatcatccgcgagttgaaagttccgagccatccccaggatttggtcgacgcgctcaaggatcccacctggcggctcgatcgcatcggcttggaagcaggccccttgtcgcaatggctgttcagcggtttagcggaagccggattgccggtggtctgcatcgaaacccggcatacaaaagcgtttctcaaggcgcaggtgaacaaaagcgatcgcaacgatgcacgcggcatcgcccagatgatgcgcgtcaagttgttccggcccgtgcatgtgaagacgctgacgagccagaagcgccgggccctactgaccgctcgcaagattctgcaagacaaggccgtcgccatcgagaatgacatacgtgggctgctgcgcaacttcgggctcaaggtcggcgttgtcggcgtcggcaagttcgatgatcgagttcgggagcttgtcgacggcatgcctgaacttgtcgaaatcatggaccctctgctggtcgcccggcaaaaacttcgccagacgttcgcggcgctccaccgtaaattgctttcgatcgttcgcgatgatggcgtgtgccaacggatgatgaccatccccggggtcggtcccgtcgtatccctggccttcaaaagcacaattgacattccagctcgctttaagaactcgaaggctgtcggcccgtcattgggattgacgccggtgctcaaccaatcgggagaaagcctccgagttggccgcgtctccctttgcggggatgatatgatgcgagcgctcctctacgaggccgcgcaggtcatgatgacccgtgtgcagaaatggtcatggctgaaggcctgggcgatgaacgtcgccaagcggcgagggctgaagaaggccatcgtcgcgctggctcgccgattggcggtcatcatgcatcgcatctgggtcgacggctccgtgttccgctggacgaacaacgcgataccggtgaccggctaacccgaaatcggatcgtcacgccatcaacaaggagaccgtttcctaatgtgagttctgccgccaggcggaaagatgtccttcgcgggacgatggatgaggtgagttcgcttgggctcttgtaccgatcatgcctcggcacgatcaggacgcgcgtcagattgggccatctcattcttctgatcccatgctgggaaagccaagagctgatcccgaagagaagcgcggacccgcgaaagacttgaaccgccgagaagggcagaagcctgaaagcgcttgacctcaacacgccgaatagaga

SEQ ID NO: 8566 - DNA, 1166 bp, unidentified
  source 1..1166: mol_type = unassigned DNA; note = element_d709275
  misc_feature 1..2: note = core
  misc_feature 3..218: note = LE
  misc_feature 219..1154: note = CDS
  misc_feature 1155..1166: note = RE
  misc_feature 12..224: note = bridgeRNA
cttgtcttatgacctttgcggttcctgaggcaaaaggggactgccggtgaagcgcagcgacacttcaccggcggcgggggtcggaccgatccgatgcgggccgcgaagcgggccgcgaagcgggccgagttagagtggggtcgcccccgtcttttccagaagacctgaatggatacgcgggcttcgagcccgcatgacaagcgaaggatccggaaaagatgactgagactaccatcggcgtcgacatctcgaaagaccggctcgatgcgcaccgtctaccggacggcgccaccgggcagttcccgaacagcaaggccgggcaccgggccttcctcgagtgggcaggacaggacgtggcgcgcatcgtctacgagccgacaggtccctatcaccgggcgttcgaaggtgcgctcgcaaggaccggcctgccgctgtgcaaggtcaacccgaagaaagcccgccgcttcgccgaagcgatcggcaccctcgccaagaccgaccggatagacgcacgaatgctcgcccgcatggggcagctcctcgagcccgaaagccggccggtcgctgacgaggctctcggcagcctgcgcgagctgctccttgtccgccgggccttgatcaaggagcgcacggcggtgaccaaccggcgccacacgctgaccatcgcccttctcagacgccagcacacccagcgcctcgctcagatcgaacggcaactcctgaaaatcgaccaggccatcatggcaatgatcaaggaagacccgacccttaagcgccgcttcgagatcctcatgacgatccccggcgtcgccaacgtgaccgccttcaccatgctgatcgacatgccggagcttggcacgatggacgcaaaacaagccgccgccctgtgcgggctcgcccctctcaccagacagtcaggccagtggcgcggacgcgccatgatcggcggcgggcggcgcctcttgcgccaggccctctacatgcccgccatggtcgccgcccggtacaatgacgatcttcgcgctacctacgaacggctgaaagccaatggaaaaccaggcaaactcgccatcacagccgtcatgagaaagctcatcatcctcgccaacgccctcatccgcgacgaccgtgaatgggcgcccaggatggcttgaccacaacggata

SEQ ID NO: 8567 - DNA, 1196 bp, unidentified
  source 1..1196: mol_type = unassigned DNA; note = element_d709292
  misc_feature 1..2: note = core
  misc_feature 3..230: note = LE
  misc_feature 231..1193: note = CDS
  misc_feature 1194..1196: note = RE
  misc_feature 29..206: note = bridgeRNA
cttgtatggttttcctgcaggtccaaactggacttgtcagggtggagggggcaagcgcgccttccggcctttcggcacggactgtgggagatttagcccccgcccttctcatcaaaacgccgatagagaatccatcggcggagccttgccgctcatgaccgacgaaatgttgcaagccagcgttcgatgagccctgacaagtaaaatcaccttagcttggagggtaaagcatggcaaagcccattacgccagtcatggtgggtgtcgatgtcagcaaggccgagctggtcattgcccgcagtgattcgaaggatcttaagaggattgccaacacagcccaagccatcggcggctggctgaagacgcttgcgggccgaaccaaaatcgcactcgaggctactggtacctatcaccgcaccttggcaacgctggcgcatcaggcgggcgttgagctttatttgctcgatggttatcgactcaaccggtatcgcgatggcgttggcagtcgcgccaagaccgacccggctgatgctcggttgattctgcgctacctgagcaaggaactgagcgacctcaaaccctgggtgccgcctcacgatgcgttttaccgcatccagagcctgctgcgacgccgggcttcgcttgtgcatacccgcatcgccctgacccagagcctggacgatatgcccgacctcaagagcgcatccaaacgcctgagcaacaacatcaaggacatcgaaagattgatcgaacgccgcctcaaagaggccatggctgaggtgggctggcagtcggatgcccagcgctgtaaggctatagagggcatcggcgatctcacctcggtagcgctggccaatactttccaccgaggcgaattcaagaacagcgatgccttcgttgcctacctgggcatggacgtcagagttcgggactcaggcaagcaggtgggtcgccgtaaactgaccaagaaaggtgatccggagctgcgacgccttttgtataacgcggccatgtctgcccgccggacaaaagcctggtccggcctatatgaaacctatcttagccagggactgaagacgactcaggctctagtaaagctcggccgaaagctggcccgtatcgccttcgccttgatgaaaaaccaatcaatgtatcgaccaaaaatgccggttaagtgttgcgctgcaccatagaat

SEQ ID NO: 8568 - DNA, 1390 bp, unidentified
  source 1..1390: mol_type = unassigned DNA; note = element_d7094aa
  misc_feature 1..2: note = core
  misc_feature 3..87: note = LE
  misc_feature 88..1116: note = CDS
  misc_feature 1117..1390: note = RE
  misc_feature 1087..1376: note = bridgeRNA
gatgggatggttgccgccctccccagacggcatcgcaatgtgccaagatggtggtgttgaaagccactgagcgaggaggacggcgagatgaaggatacgatgatcggtgtggacttggcaaagcgagttttccaagtccacggagcttcgatgaccgggcaggtaaagttccggaagaagctgacacgggagcagttccggcggttcatgtcggagcagcccgcctgcatcgtcgtgttcgaggcttgtggaagcgccagttactgggcacgggaaatggaagcgcttggccatgacgtgaaactcatcgcaccgcagtacgtacggcccttcgtcaagcgtcagaaaaacgacgcggctgatgccgaggccatcgtgatcgcagcgcgccagccggagatgcgcttcgttgagccgaagacggcagagcagcaggccaaggcggtgatgttccgaagccgggagcgcctggtccatcaacgcactgagctcgtgaacgcgctgcgggcggtgctctacgagtatggccatgtgtttcccaccggccttgtccatctgaagcgggtcgaggcgctggtggaagatcaggcatgcgacctccccgctctgatcattgcggaatgccgggacttgctggcccaaattgccgagaagacggagaggatcgacgcaaagaccaaggaactgaaggcgctcacggccgagacggacacggcgcggcggctgcagaccatgccgggggtcgggcctctgacggcgctggcggtcgaggctttcgcgcccgacatggcgcagttcaagtgtggccgagactttgcggcctggctggggctcgtgcctcggcagcattcctccggaggcaaggagcggcttgggcgtatctcgaaggtgggccagagggatattcgacggcttttgatcatcggggcgatgacacggatcatgggccgcacccgtcaaaagcttccggtggagaactggctcgggcggctgctggccaggaagcagaagatgttggtcgcaattgcgcttgcgaaccagatggcgcggcaactctgggcgatgctgacgaagaacgaggattacagagatccggcgctggcggctgcgacatgaatgtcatgtcgtagtcacccagcgtcggtgccaaggggagtgtgagaagacgaagacctgaatgggcgcaacgatcgaacagatctggattgggaaaaccagaaaatttccatgagcatcggagctctcttggtagatttggacccgatccgcagatctccatatcggcccgcggcctctggaagtgccgcacatcgaggcctgacagaagaacgcactcgatcacacgccaagacggtcaaaacttcttgcattacgggcggcaaccacagag

SEQ ID NO: 8569 - DNA, 1492 bp, unidentified
  source 1..1492: mol_type = unassigned DNA; note = element_d70c878
  misc_feature 1..2: note = core
  misc_feature 3..230: note = LE
  misc_feature 231..1445: note = CDS
  misc_feature 1446..1492: note = RE
  misc_feature 12..196: note = bridgeRNA
tccatacctttcttcgtgggttggctcgggtcattcgtaagatcgggacgcccaggggtgccgggtgtggctgtcatttcgttgccgcgtacgtggcttgaagggattggccgcccggcgcccgcgacgactcggctgctgattgggatgcgcgaaccgaatcgcttgtatggacgtgacagcgaggtcgtctgctgggacagccctgaacagcgacgaaggagggtccggtgccagaactgtgggccgggacggacgcgggcaaggtcgaacaccactgcaccgtgatcgacacgaccggagcgacggtgctcacgcgccgggtgcccaacaacgaggacgaactgctgcaactgctcggtgacgtctgggatctggcggacggcactcctgtcacctgggcggtcgacctcaacgcgggcggcgccgcactgtggatcgccctgctggtcaaccacgggcagaggttgttctacatccccgggcgcaccgttcatcacgcgtccggcgcctaccggggcagcggcaagacggacgcgaaggacgccttcgtcatcgctgaccaggcgcggatgcgtcgcgacctgcaaccactgcaggagaccagcgagatcgcggtcgacctgaaaatcctcaccgcccgccgcatggatctgtccgccgaccgcacgagagcgatcaaccggctcagggcccagatgctggagtacttccccgccctggagagagccttcgactacagcaactccaagacctcgctcgctctgctcaccaagtaccagacgccggccgccctgcggcggatcggccgggcccggctggcaacctggctcaagaaccatggcgtccgcatgctcagcaccgccaagagcgccgcggacgccgcggtcaccgccgccgaggcccaacacaccgttgtccctggggagaagaccgccgcgaagatggtccacacgctggcgagggaggtgatggccctcgatcaggagatcgcgggactcgaagccctgatcgagggccggtttcgtgagcatccggacgccgaggtgatcacttccatgcccggcatcggcgccatgctcggcgcggagttcatcgccgcgaccggcggcgacatgaccgccttcggcagtcccgaccggctcgccggcgtcgctggactcgcccctgtcccacgcgactccggcaaggtcagcggcaacctgcgcaggccccgccgctacagcagacgtctgttgcgcatgttttacctctccgcccaggtcgcctccgtgcactgtcctgagtcgaaacgcttctaccagcgcaaacgcgccgaggggaagaaccacaagcaagctgtcctcgccctggccaggcgccgcctcaacgtgctctgggctctgatacgcgatcaccgcatcttcgagaccgccacaacccggtccgtggccgtggcggcatgaccccgtcacgaagcgtcatcctcggaacttgacaccgtaattgggaa

SEQ ID NO: 8570 - DNA, 1537 bp, unidentified
  source 1..1537: mol_type = unassigned DNA; note = element_d7143e7
  misc_feature 1..2: note = core
  misc_feature 3..245: note = LE
  misc_feature 246..1421: note = CDS
  misc_feature 1422..1537: note = RE
  misc_feature 3..223: note = bridgeRNA
cttgtattatagagtagtagtgattaacgcccctctccaagggcgatgtgctacactgtagaggatgctgtggattggtctattgctcctaccacttgatggttttcgaaaggctccaaccacagccctttgcagtattgttgatcagttagataccgccagacggtttatttagaacaaggttacaagagcaaagtgttctgtggatacagcagcatcacaatcttaccgttggaggttttactatgatttgcgttggaattgatgttgccaaggacaagcacgattgctttatcatcagttcagagggcgaggtgctcggcgatgtgttcaccatcgagaacaacacggagggatttcaatatctgctacaaaaaatccgttccaacacctcagctcaagacaaaatgaaagtaggacttgaggcgaccggacactacagctacaacatcctggggtttcttctggacaaaggtcttcccacctacgtcttgaatcccttgcacaccaatctgtaccggaaaagcctcaccctacgaaagacgaagactgaccgagtagatgcgcgaacgattgcggctatgctaatgtctgatgtgagcctcaagccctacacagacacagcttaccacaacgaggagctaaagtcactcacaagataccgattcgacaaggtcaacgagcgcgccaagctcaagcaatcggtctcccgtctggtctgcattctgttccctgaattagaaaagcttgtgccctcgctccatatggtttctatttatgctctgcttgacgaattcccaggtgctcgtcaggttgcaggcgctcatctgacgcggctaaaatctgtgctcagtgacgcttccaaagggcgttacggtcgcgacaaagcccttgagattcgtgaggctgccaagcaatccattggctctgtcatgccggcaaaatcgctggagctgcggcacaccatccgtctcatccgcgagctggacgctgaaatcaaagaaattgaggttactatcgaaggcatcatggacgagattcagtcgcccatcaccaccatccccggcattggcacccgcatgggcgcgatgattctagccgaggtcggcgacttcgcaaggttcgattcacccgacaaggtcttggcctacgccggtctctcgccctctacctaccagtccgggcagctcacaagcagctacgcccgcatggagaagcgcggctccagatatctgcgatatgccttctacaatgcgaccaagtatgtctgtcactgggatccgggcttcgctgcctatctcgccaaaaaacgtgccgagggcaagcactataatgtcgcaatctctcatgccgctaagaagctcgtgaggcttatctttgctatggagaaaacaggggaagcatatcgcctcgctgcctgacctttttgaatttgcttgctcggcgtccggtggacgtctgctttgctgcgccttttttgaatcgccgataaatttgccattcacatcattggggggcttgacttttaatagttagt

SEQ ID NO: 8571 - DNA, 1588 bp, unidentified
  source 1..1588: mol_type = unassigned DNA; note = element_d715f46
  misc_feature 1..2: note = core
  misc_feature 3..262: note = LE
  misc_feature 263..1498: note = CDS
  misc_feature 1499..1588: note = RE
  misc_feature 83..243: note = bridgeRNA
aacccccatgcccgcgcacttggcaccaccataaatgaaactgcgcagcctgtaggttattgaatttgcaaccgatatcatctatactgacaataacggtaaagatcgttttgtatttgggcctgtagcccgttgtctaaactgatttcaggttctctcatttgcaccacaatctgtccagccgattacggcagaaggacgtatagtaaaatgataacagacagagaaccgtgccgtacactcatcctttggaggtgccagtatggataagatttacgacaaatgttgtggtattgatgtgcacaaaaaactcatcgtggcctgtttcagaaaaggcaacaaacaggaagttcgagagtttggtgcaacaaccagagagcttcttgtattggctgactggctcaaagacggcggctgtgagatggttgccatggagagcacagcatcctattggaagcctctgtataacatccttgagtcttctgacctgaacgccatggtggtaaatgcccgccatatgaaagctgtccccggcaggaagacggatgtaaaggatgctgaatggattgctgatctccttcagcacggcttgcttcaggcaagctacattcctgacaaagatcagcgtgaactcagggaactggttcgctaccgcaaaagccttgtcggtgagcgtaccagggagctcaatcgtctccagaagatgctggaaggggcaaatatcaagctgtccggtacagtggccgatatcaacggtaagagtgcccgcagtatactggaatatatgcttaccggagaaccgattgacagtgtaaaatacgatgagatgtatgagcagaaagtaattgcccataatctcaaagccagcaaagatcagatcattgatgacctgaatggcgtcatgtcacccctgcagcgcaggatgatgcgggaacttctggatcatctggatgaactcaatgttcatatcaaaaatctggatgatgagatcgacaactttatgaagccagaggaaaagaaagcttccgctgcgatccaaagcatcacaggaattggcaataccagtgcacaggcgattattgtggtaatcgggacagatatggaacgttttccagatgacgcgcatatggcctcctgggcaggtttatgtccgggtgataatgaaagtgccaaaaagcgaaagtccggcagaacccgaaaagggaatgcactcttgcggacaacactgatcacatgcgcacattctgcggttaagaacaagaagtcctatttttacgcgcagtttatgagaatcagtgcgcaccgcggaaagaagcgagcctatgtggccgttgcccattctatgctgatagcgatttaccacatcctgaaggatggggttgttttcaaggaccttggagctgaatactacaaccagttcaataaggaacgcaaaataaatgcgtatcttaaaaagttaaaagcacttggctgggaagcacctgctgttgccgcataagaattccaactgagttataaacggcataaaaaaagtttgataggggtagtctgcgcttttttatcttcccgatagtttatgtttcatagt

SEQ ID NO: 8572 - DNA, 1474 bp, unidentified
  source 1..1474: mol_type = unassigned DNA; note = element_d71f61c
  misc_feature 1..4: note = core
  misc_feature 5..299: note = LE
  misc_feature 300..1469: note = CDS
  misc_feature 1470..1474: note = RE
ctcactggtccaccatggtcgccgatcggcaggagggcctgtcgatgcacctgagggttcgactggttcaccgccgaccccgctcgcggctcgaccgccaaaatgagtgaagcgggaaccagtcgcccaggacgtgccgactggcgatagggctgagcgccacagagcgccgatcagtgagcttccggcagccacttcctgaacccgacacgtgcaggcctggagaacgatcagcaaggagactgacgtggaagagttgagggaacggttcggtggtttggactgggcgaacgacagtcatggccgtcaacgtcgtcgacgacgagggcaccatgatcgacgagttcgaggtgcccgatagcagcgatgggcttggggacatgtgccgtcgcctcaagaaggcagcggtccgccgagtggcgatcgaacgtcctgacggcccggtcgtcgacgccctcctggaagccggtcttgaagtggtcgtagttgtgtccaggtccgtgaaggcgttgcgagttcgctacggcgcctctggcaacaagtccgaccgggccgacgcctatgtgctggcggactgcctccgcaccgacgggcaccggtggcagagccttcagccggacaccccggccacagtgacactgcgttcacacgtgcgagcccgcaaggacctcgttgagcatcgggtagcgatcgccaaccagctgcgcgcccacctcaaggtcgtgttccccggtcctgtagggctgttctcggacctggatagtcccatctcgctggcgttcctacgccggttcccctgggaagggaaggcggcttggctctccgagaagcgtctcggcgcctggctccgcactcaaagctacggcggtcgccgctcagccgccgacctctacggtcacctcacccaggcacccgtcgggttgctgggcgacgaaggagaagcccgcagcagcgtcaccttggcgttcgtgacgctcctcgaaaccctcgacagcgagatcaagactctcaaccgacggatacgagaactgttggatgcccaccccgacggccacatcttccgatcccttcccagagccaacaccatccgcgctgcgacccttctcgccgagatcggcgactgccgcgcccggttccccgaacccgaagccctctcctccctcgccggagtcaccccctccacccgcgcctccggcaaacaccgagccgtcacattccggtgggccgccaacaagaaactccgagacgccatctgcgactttgccggcgacacgcccaacggcaacgaatgggcccgccaccgctaccagcagctccgcaccgacggcaagagccacccccacgccgaacgtatcctcgcccgcacctggacccacatcatctggcgctgctggcaagacagagtcccctacgacccgacccgccacggcgccctccaacgcctccaaaacggaaccagcttgacatagggcta

SEQ ID NO: 8573 - DNA, 1611 bp, unidentified
  source 1..1611: mol_type = unassigned DNA; note = element_d7219a4
  misc_feature 1..3: note = core
  misc_feature 4..270: note = LE
  misc_feature 271..1449: note = CDS
  misc_feature 1450..1611: note = RE
  misc_feature 21..245: note = bridgeRNA
cttgtatattgatgtccgtcagggtcgtggtaccttgacggcattttctgttaatcccataaaccacgtgggataatagatccgtgcagttgagggcgtcgtttgtcctccttgaggttgagcctcgttcgaaagactgacgcctcgactttgcgggttggattcgtattagctggatgggatttagtcccgcatctccaacaaggtagaattcccgtaaagatcgtcggataacctctctgcaactttaattgaaaggttggtgcaaacatgtattacatcggcatcgacatcgctaagaaacgtcatgaagtttgttttttaaatgaagagggggatgtcctagatgggaactccttcaacatttccaataccgcatcagggctagacaagcttcaaacggcactaaacaagtatgggttaaagccggataattcggtggtgggtatggaggctacaggccattattggcttgttctctattcttggcttattgagcaagatttccatgttaaggtcattaacccaatcgtcacagatgcttaccgcaatatgctcatccgcaagaccaaaaatgaccgaatcgatgccgaggtcgttgctagagtactcaaaatgggtgagtaccaagaaacctctgtgcttgaagatgacaccatggctcttcgtcagctctgtcgctatcggctttcactaattcagaccacgggcgacctgaagcgtaaagtgattgccttcctagaccaagtctttcctgaatacaacacgatcttctcggatgtttttggtatgagttctaaagaattacttaaaagctacactactccggaagaaattgcctctgtacacactaagaagcttgccaatattctggcgaaggcttcaaaaggacattttggtaaggagaaagccttagaaatcaaggccgttgctcgtcaatccatcggtataaccatcgccaccgatgcctttgccttccaaatccgtcaactcattgagcaaatcgaatttgtggaaaggcaagtcgaaagtctcgaccgagaaatcgctggttatatggaaactttggattcaccgattacaactattcctggcattggtcccgtttatggcgcaaccattcttgccgaacttggagacattaatcgtttcccaagcggcaagcagattgtttcctatgccggccttgacgcctctgtacatgagtctggtgacttcattggattacaagctcacatgtccaaacgaggctctgcttacctcaggatagctattttcggagctgcgtttattgcttcatgggcagatcctgagctttctgcttactacaagcgtcttagggctagaggaaagcaccatttcgtcgctatgggggcagttgccaggaaattatgctatatcatttacgcagttttgaccgaaaataggccttttgaaaacaggagctaattggcttgtctctgccttttttagcgtatctctgacatgcgctctttgggttgcacttttcctattcaattttcaagattcaatgacatccaacgtctacgttgcttcttttttctagactgtctgctcacttctctatgagcttgactttttatagctggt

SEQ ID NO: 8574 - DNA, 1147 bp, unidentified
  source 1..1147: mol_type = unassigned DNA; note = element_d722943
  misc_feature 1..2: note = core
  misc_feature 3..223: note = LE
  misc_feature 224..1132: note = CDS
  misc_feature 1133..1147: note = RE
  misc_feature 10..223: note = bridgeRNA
gctctacctttcttcgtgggtttggtctggccagtcgtagggtcggatctcccggggatgccgggtatggctgtcatggctgagccgcctgatggctcaaggagcttggccgtccggcatcccgcgacgactcgaccgctgattgggagatgcgactcgatcgctgtgtagagcaacgccggcgaggtcgtctgcgggatcgatcgacaacgagctggcggaggtgcccgcgccccggatctgggccggagtggacatcggcaaggaacaccaccactgcgtggtcatcggcccccagggccgacggctgctgtcgcgccgtgtcctcaacgacgaagccgaactgctggagctggtcggcgacgtcctggccctggacgacgatgtcctgtggccggtcgacctcaaccacggcgaagcggccctgctgaccggcctgctgctggcccacgaccagcccgtcgcctacctgaccggttatcagaccccggccgccctgcgccgcctgggcaccaaacgcctggagacctggttgcgggcgcgtggggtcaagggcccggcggcgctggctcagaccgctgccgaggccgctcaggcgcagcgcacgcgccttcccggcgagaagacggcggcggcgatggtggcccgcctggccggggaggtgatgcgcctgaacgaggaaatcaccgagaccgaggccctcatccaggcccggtttcgcgaccatcggcacgccggactgatcacgtcgctgcccggcatgggagctctgctgggcgcggagttcctgaccgcgaccggcggcgacatgggcatgttcggcagcgccgaccgtctggcgggctatgccggcctggcatccgctccacgcgattcggggaaggtcagtggcaatctgcgaagacctcggcgtttccaccgcggcctgctgcgggccttctacctgtcctcgatggccagtctgcgttcgtgtccggcgtcgaaggcctattacgaccgtaagcgggctgagggcaaggggcacaagcaggcgttgctggcgctctcgcaccgccggatcaacgtcttgtgggccatgctccgtgacggtacgccctaccaaggttcacccccggtcaccttggctgcttgacaccagcattgggaa

SEQ ID NO: 8575 - DNA, 1674 bp, unidentified
  source 1..1674: mol_type = unassigned DNA; note = element_d72386d
  misc_feature 1..2: note = core
  misc_feature 3..294: note = LE
  misc_feature 295..1497: note = CDS
  misc_feature 1498..1674: note = RE
  misc_feature 61..290: note = bridgeRNA
ctggtatattatagatgactcatttaacagtcatcatagtataccttttcctttccatcaatctatctattaaaccgagattgataacagttaagtttacttgtaatatattgaatatgtgaatgtggatttgtatctttccttgtggctttgactacttttgataggatctcaccactccttattcctaaacagtgattagttagatgagtcttaccctttgggtacttagtgaattcgtatattgcaccaggttctgtggtttaagtgttgtggtttacacttcacatcgttatgaaaggacgtgttttcatgattttagtcggaattgacattggcaagaacagtcattacttctgtgttatcaatagagaagatggtgaagtacttgtcgatccaacaagttttaagaacgatcagaaaggctttggcttattcattcaagcattacagccttatgacaagacttctattttaatcggtatagaagatactggtcattatcacttcgctttattaagatacttattaagcaaagaatttaacgttgcccttatcaacccagtagctacggatatgactcgtaaaatgcaaggtggcatctctaaaaacgataaattagataccttgaccatttgtgatgtgctttcctcatcaaatcgtaagaaatcttatcgcatcactaagattcataaattcgattactatgaacagcgacaattgacacgacatcatcacaatttgaaagaagaactcaatgtctatacaaatcgtttacagaaatgtattgaccttgttttccctgagtttaacagcttgttcaaatccaaatatggcattgtctatatgacgcttctaaagacctttggaagtgccgataagattgctcatgccgatatcagaagtattcgtaaatgctttgagattcaaggcagaggcaatcgtatatcactaagcgctgaacagctcaaagctgctgcgaaagagtctgttggtattgcgtcttcggcagatgaaattcagatcaggcatctaattggtcagattgaactgatccatgctcaactggatgaaatagacaaaaaaatagaagagttctctgtcgaagtcaactctcctatcctgtccataccaggaatttctcatttctctggtacttctattttagccgaaataggagatattggcaactacccaaaagcatcaaaattagcaaaacttgcaggtgttgcgccttatgagcatgaatcgagtcaatacagggcagaacaaaccgctattaccaagaaaggctccaaatatctaaggaagacgctatatcagattattgtgcctatcattcaacacaatgaggtctttaagcggtactatcagttaaaacgtagacaaggaaagagtcatcgctgtgcacaaggtcactgtgttagaaaattgttgagagtgatttatcacttactaacaacaaatcaacaatttgacccagcgcttttgagataaccttgctttatttcgtaactattttaaatagaacatcaagcaggttgttttcgtcatgcacttgctatacatataaacattcacatttcaaagatcaattactttctaactataaaatctgtgtttttaatatttttaaactttttcataaaaaacacttgaaatttatatagttag

SEQ ID NO: 8576 - DNA, 1366 bp, unidentified
  source 1..1366: mol_type = unassigned DNA; note = element_d727d51
  misc_feature 1..2: note = core
  misc_feature 3..84: note = LE
  misc_feature 85..1107: note = CDS
  misc_feature 1108..1366: note = RE
  misc_feature 1081..1353: note = bridgeRNA
tgatggtgtggatgcccccgcccgacggcatcgcgatgtgtcaagatggtgatgctgaagtcaccatagggagaggaggcatccatggatgagattagcatcgtcggcgtcgatctggcaaagcaggtcttccagcttcatggcgctgcggcggacgggcgcgcgcttttccgcaagaaactgtcgcggccacagttcgcgaagttcatggcggcactgccgccatgcatcgtggccatggaggcctgcgggaccgcgcattactggggccgggaactcgcactgctcggccatgacatccggctcatcccgcctgtctatgtcaaacccttcgtgaagcggcaaaagaacgatgccgcggatgcggaagcgatcgccgaggcggtccagcgaccgaacatgcggacggtggcggtgaagagctccgcacagcaagcccgcgcgatgctcttccggacccgcgatctgctcgttggtcaacgcacccagctggtcaacgcactgcgtggccatctcgccgaacacggcatcgttctggccaagggcatcgccaacgtcgaacgtctcgcccttcgtctggaagacgatgacctgccagacttggtccggcacttggggcggatctatctcgatcagatcgcgcaactgggggctgagatcgaaaaactcgacaagcgcatcgtcgcggccgcgaagcaaaacggggaggcccgaaggcttcagaccatgcctgggatcggcccggtctgcgcgatggcgattacggctttcgcgccggacatgcgtgagttccgtaggggacgcgacttcgcggcctggctgggccttgtgccacgacagcattcgagtggcggcaaacagaagctgggtcggacctctaagatggggcagcgcgacatccgacgcctgctgatcgtgggggcgatgtcgatcgtccattggcgaggtcgcgacggcgggcggccaggatcatggctcgcgcgtatgctggcccgaaagccgcgcatgctggtggctatcgcgctggccaacaagatggcacgcatggtctgggccatgctcgtgcgcgaagaggactaccgggatccaaccggcgcggtctgctgaccgcggcgcgcggagcgtcggcgatgtgaggagagcgacgacccgtatgggcaaatgatcgaacagatccgggttgggaaaaccagtggcgtgcaacgagccgcgagctcgcaattttgatctggtccccgatccgcgcatcaccataccggcccgcggcatgtcttggccgcacctgagaggcctgaaacatgaccgcactcgatcacgcgctcaaaaggtcagagaaaatccttgcatcgaagggggcatccaaaca

SEQ ID NO: 8577 - DNA, 1471 bp, unidentified
  source 1..1471: mol_type = unassigned DNA; note = element_d72d906
  misc_feature 1..4: note = core
  misc_feature 5..244: note = LE
  misc_feature 245..1345: note = CDS
  misc_feature 1346..1471: note = RE
  misc_feature 38..241: note = bridgeRNA
ccccgttaccttgttggtggtccctggtggtaggtgccgggggctgggccagctgctgtgggcatgatgtcttgcccctgtcttctgatgatccgggggtgttgtcacccgcggcagccgggcgctggtgaccgctgataaggggaacgacccatcgagtgtgaggtctaacgcatacgtgggtgcgggaccggtcgtccactggctgaccccgtatcgacttgaccgagaggcggcaggagagatggatatcgaggacatcgacgtcttcatcggcatcgacgtcggtaagagcgagcactgggccacggccctgagccgggacgggcggaaggtcctcgacagggccctacccaacgacgaggagcgcctgcgtgctctctacaagaagctggccgatcatgggaacctgctggtggtggtcgatcagcccgccaccatcggggccctggcggtggcggtggctcaggacatgggcatcaccgtgggctacctgcccggactgtccatgagacgcatcgccgacctgacgccgggcagcgccaagaccgacgcgaaggacgctgccgtcatcgtccaggccgccaggaccatgccccacactctgcgtgccattagcacctcggacgagggacgccgcggcgctgagcatgctgactggcttcgacctggacctggcccgccaggtcagccagaaccgccaaccgggtccggggcctgtacacccagatccacccagccctcgagacgggtgctggggccctggctggagcatgacgccatcctggaggtcatcgccgcctggcccaccccagccaagctgaagagcgcgggcaaggcaaggattgacgccaggctcaagaagcacgggtgcaggcggcacgccacctgggctggccagatcgtctcggccctggaacttcagagtgtcactgtcgccggcatcaacgccgcagcagtggttctgcctcacctggccaggcagctcatcgcgctgcacgctcagcgaggccgatgtcgccgcccgggtcgagaccctggtgcaggcccaccctctttaccaggtcctgacctccatgcccgggatcggggtcaggacctccgccgtcttcctggccgagaccctgggcccaagaccttcgacaccggcgcccagctggcctcctacgccgggctcgctcccgtcacacgccgctcggctcatcgatccgcagcgagcacgtctcccagcggcaacaagagactcaaacgcgccatgttcctgtcagccttcgcctcactgcgctccgacccccgtctcccgggcctactaccagcgcaaacgcgaccaaggcaaacgccataaccaggccgtcctcgccctggcccaccgccgcaccccgaccctgcacgccatgatccgcaacaacaccctctacaaccccaaccagccacgaaactacccaccaccgcttgacacaccacaggggca

SEQ ID NO: 8578 - DNA, 1380 bp, unidentified
  source 1..1380: mol_type = unassigned DNA; note = element_d73d429
  misc_feature 1: note = core
  misc_feature 2..93: note = LE
  misc_feature 94..1125: note = CDS
  misc_feature 1126..1380: note = RE
  misc_feature 1147..1372: note = bridgeRNA
caatgggatggactcctcctctccttaacggcatctaaagtgccaaactgaaagaagcgttttttcagtgacaggcagagaaggagtccactcatgaagcttagctatgttggtgttgatttggcaaagaacgtgtatcaactgcacggtgttgatcggtctggcaaggctgtatggcggcggcgtttgcggcgccatcagtggatgagggtgttgctggaaacggtggagccgggctgcgtgattggcatggaagcctgcacaggcgcgcaccactgggcccgcgagttgcagagtcacggctacacggtgaagctaattccaccacagttcgtaaagccctacgtgaagagcaacaagaacgatgccaatgatgccgaggcgatctgcgaggcaatgagccggccgcacatgcgctttgtcacagtaaagagtgtcgaacagcaagatatccaggcaacccaccgggtccgcgccgagcttaaggatcatcgcaacgccaaggctaaccagatccgcggcttggtggctgagtatggcttggttgcaccgcagactttactcgcactacgacgtgcgatcccggactggctggaagacgccgagaacggcctgactgactatttccgttcgttactgcacggcttgtgggatgatcttttgacactggatgaccgcatcaaagaactcgacaaggagatcacgcggcttgccaacagcaatgaagttacgcggcgattgcaacaactgcgtggtgtcggacccatggtggcgacggcgctggtggcaacggtaggcactggcgagcaataccgcaaaggccgacagatggcagcagcactcggactcactccgaggcaaagtagctccggcgataagcatcgcctgttcggcatcagcaagcgtggcgatgcttatctgagaacactgttgatacacggtgccagggcggtcgtgtcacaagcaaaacatcgggacgacccgttgagtcgctgggcaacagacatcgccaagcggcgtcatcccaatgtcgcggctgttgcactggcgaacaagaccgcgcgcatggcctgggccatgctgcgcaatgaaacagattacgatcctaacttggctgttggctgagtcggggaaacaaaggagaacctctacagcgattgcttaagcaaactacttgatggcaaacaggtcgaaccggcgtcggccaaacccgtgaatgtccgagtactcgaagtacgaaggagcgattgggagccgacgcgcgaatagcccattatggcccggcatcaacgtatgcctactacagaggccggatatacgtatgcagtcgtgccatgtctgacatcaacagtctgcttgcaatgaggaggagtccatata

SEQ ID NO: 8579 - DNA, 1620 bp, unidentified
  source 1..1620: mol_type = unassigned DNA; note = element_d744c29
  misc_feature 1..2: note = core
  misc_feature 3..251: note = LE
  misc_feature 252..1487: note = CDS
  misc_feature 1488..1620: note = RE
  misc_feature 7..226: note = bridgeRNA
ttcgtattatatggttagccagatatttctggttgaccatattttatatggtcttattatatctatgtagccggggtagaacgtaagcacccgtggggcaaagaccccgtcagctaaaccgttcgccctctacttgtagaaacatgtttgaggctggttgggactatgatctcgcataacaagcgaagctatgatactacaagaagaattagaggtaaccggcaataattatttggaggaggagatttagaatgaatccagtcgttggtctggatgtttcaaaaggggaaagtgaagttcaaggatttttagaaaagggaaaaccttatcgtaaaagctttagtatccggcatgatctcgaaggattagaattattacttaagtttcttaaggaaataaaagatttaactggtcaacaacctccggttgtattagaagctacagggcattatcatgctccagttgttcagtatttggaggagcgtaattatttattaataatcgttaatccattgatttcccatagagccaaaagttcaagtttacgaaaagtgaaaacagatgcagttgatgcttaccgcctctgcgagctttactataaagaggagttagagccttataaaaagcgtgggatacgactcttaaatcttcgtaatcttacaaggcaacatgcgaatataaccgagatatatgtacaaaccaaattacaatttcaagcagtattagatcaagtatttcctgaatataagggcgtttttggtgagttatactctgtagtatctttacttaccctacaaaaataccctacctcagaagatatcttagcagttagtgaagatgagttggctaatgggataaaagggttatataaacatggatcaaaaaaatgggtaaatgaaaaggtacaaaaacttaagaatgcggctgctcgcaatccatttcaagaaactttgtacaaaagtcatttattaagcatgaatatgtatattgatatgcttcttcaatataaagagcatctatcaaagttagagacagagatagacactctcgctaaagaaattgaagaatataagattatccaatctatccccggtattggtgaaaaaatcgcggcaccgattatttctgagatcggcgagatagatcggtttaatcatcctaaaaagctagttgcattcgctggagttgatccagaagtatttgaatctggtaaatttaaagccactctggtacgaattacaaagcgtggttcaagcagactacggcatgccttgtatttggctgttcgtgctggaatacgtgacgctcgtaaaaagaaaacaagtgatgagattatccctagaaataagagattaagagaattttacgataagaaacgcagtgaaggtaaattgtataaagtagcagttattgcttgtgttaataagctcttacattggatatttgccatattaaaaaacaaaaccactttccaagatatagcttagaagctatttctaactaaatacagaaaaaccttccagaaaccgtataacagaaggttatttggcatgcacatttttagtataacatgggtaatttaagttttttagtgaaaaatgttgacaaactattagctgg

SEQ ID NO: 8580 - DNA, 1650 bp, unidentified
  source 1..1650: mol_type = unassigned DNA; note = element_d746b46
  misc_feature 1..4: note = core
  misc_feature 5..273: note = LE
  misc_feature 274..1509: note = CDS
  misc_feature 1510..1650: note = RE
  misc_feature 13..308: note = bridgeRNA
ttgctacaatggtgttggttctgagaagttcacagccagtgagctatacagatgcccaaacctaagctacaatgaggatgtgctgagagaacgaagcattgcttgagctgaacgctcgtacgcgcaaactgttctccgccatctccattgcagcgttcgattgacgcaggttgagttatcggcagataaaaatgttgccgtacattcgtgtcacaaagcaagctgaatcggtaatgggcataggcggaaccggcattcaaggaggtcagaaaaatggaagctgctgttattaccgccgtcggtatcgatgtgtctaagagcaaaagcacagttgcggtacggagacccggaggcgaaatcgtacttcggccttgcgagatccaccacacgaacagtgacttgaaaaagctggcatccacacttaaaaaactggaaggcgatatccgtattgtaatggaacataccagtacgtactggagaccgatcgcactgacattgaaggaagcgggcttttttgtttccgttgtcaatgcgatgctgatccacgattttagtgataatacgatccgaaagctaaagacggaccgagcggatgctcttaaaatcgcaaactatgcgctcaccttttgggatacactacccccgttcaacaatgaagaagaaaccaggctgcttcttaaaatgcaatccagagcaaatgagcggatcactgcgactgcaacagcgttgcggaacggtctgattgcactggctgaccaaacatttcccggggtaaatattgcatttgatccgaacacaaaaaatgcaaatgggcatgaaaagtgggtggacttctttctgcgttattggcataaggattgtgtctgtcaatattccatggaggctttcacggaatcttatcggggctggtgcaaacgaaaaaactacaagttccgtacagataccgctcacaaaatctatctgcttgcacaggaaggcatggctactcttccgaaatgcgaaagtacgaagatgctgatcacgcaggcttgtaaaagcctgaatgccgtttgcgaggccaagcaaagcacccagcttgaaatgcagcggttggctgcaatgctccccgaatacgaggttgtggtgcagatggaaggagccggacccattaccgggcctgctcttatggccgaaatcggtgatgttcggcggttcaaaaacaagaaggcattggtagcctttgctggtatcgatgcgccaccgttccagtctggtgcatttgaatccaagtcacgccatgtttctaaacgaggctcaccgcatctgaggcgaaccatttttattatatcgaatattattttaacacgttcaaatccggaaaatgccgtttactgcttcatggacaaaaagcgttccgagggaaagcattattacgtttataccgtcgcaggaagtgccaagttcctgcgggtctattacgctcgtgttactgaatttctgcgttctcagccatcttctgatgcctgttgatgatttccgatgaactattacgatgattttcagctgacaagctgtgctgtcggcttattaaagttgccggatgcttaactgcacccggcaataatctttttttgatttttttgttcagcctattgacactcgttagcaggt

SEQ ID NO: 8581 - DNA, 1620 bp, unidentified
  source 1..1620: mol_type = unassigned DNA; note = element_d74ea5d
  misc_feature 1..3: note = core
  misc_feature 4..297: note = LE
  misc_feature 298..1458: note = CDS
  misc_feature 1459..1620: note = RE
tctggtatattgaagttactcatacaaagagtaataaatctaatataccaattctcctttctacctgaatcttttggtatcacttcaggttgtgataaaatttgtaattgtgaatgtggatttgtatcttactctctattgctctgactttctagaaagaatcttaccacttcttcgtatcgcatttattattagttgtatgagtcttttgaattctaaacacaccaggtttttgatacctttgaagtggattcaatttcacaatcacaaactatcgtaagaaaggaattgataattatgaaacttgttggcattgacatcgccaaatatgaacacgctgcttttatcatggaggcttctactggcgaatctttatgtgatccttttttcttcaaaaacaataaagaaggttttaaaaaactctatacggaacttaataaatattcaaaaaacgaactcttaatcggtatggaagatacagggcactataacttcgccattgaaagtagtttattggctgaaggctataaagtagctcttattaaccctattactactaaaagccttagaaaagcttctttaaaatccgttaaaagtgataaagaagatgccctattaattacgaaagcgcttttagacaaagcctactatcgtatcatctctattcaagatgagaaattaaaggaagcgaaagaattaactcgctatcgtacacaactaacccttgaaatgaatcgtaaaaagaatgttcttcaacgacatattgacattgtttttcctgaatttaatacattatttaataacgaatacaccattacttatttaaacattttaagaaaatatagtgacgcttatacaattgctcatacagacattcgttctttaagaaaatgttttaaatattgtaactcctttagtgcggaagaattaaaagaattagcttctaattctgttggcattcatgatgtttctatttcttttatcattcaatcggttatttccagtattgatttaatcaactctcaaattgaagaattagataaaaaaatagaagaactcgccatcacacaagcttcttctatcacatcaataccaggaatatcaattattactggtacttctattttagctgaacttggtgatataagtaaatactcaaatgcaggaaaagtaattaaatttgcaggtgtaaatccttatataagtgaatctggcaaattttcagctgataaaacagccataaccaagaaaggttccaaatatctaagaacaacactttatagagtcattattcctgtaattcgtcataaccctgcattcaataattactatcatttaaaacgaaatcaaggtaaagggcacctctgtgctttaggtcattgtgtaagaaaacttttgaggattatttatcatctcgaaacaaacaatctatctttcgatataaattcactcaaatagtcaaaacttttaacaaaccacattttattgaaatgtgctatttttaactatagttcttttcaacatatttacattcacaatttcaaagatcgaatactatattttcaagtattttatatttcatactttttcacaatttactacttgactttaatatagttg

SEQ ID NO: 8582 - DNA, 1462 bp, unidentified
  source 1..1462: mol_type = unassigned DNA; note = element_d7526fc
  misc_feature 1: note = core
  misc_feature 2..250: note = LE
  misc_feature 251..1447: note = CDS
  misc_feature 1448..1462: note = RE
  misc_feature 41..220: note = bridgeRNA
cgttatgttgttgacagcccctaaaagaggatcatagggactgtcggccgaccagcctcggcatggtgtcttgcccctgtctaaccaatgatccggggggtgttgccaccgaggctgggatggcagcgaggtgattgctaattaggggcgcggcgccagaaaacggacgcctgtcataacgtggatgtaagactttgctacctgcggttggccgaccaaatgaggaaccatgcgcaaaggagccagcctcatgaaaaccgacgacatccagatcttcctcggcctcgacgtcggcaagaccgaccattgggcctgcgccgtcaccaaagacggaacaaagatctggaacagaaccctgcccaacgacgaagcgaaactcaccaaggtgtaccaagacctccgcgccaagggcactgtcctggtcgtcgtggaccagccagccaccgtcggcgcactggcggttgcggtggcccaacatctgggcatcatggtggcctacctgccgggcctgacgatgcgccgcatcgctgatatgtatcctgggacggctaagaccgatgaaaaggacgcattcatcatcgccgacgcggcccgcaccatgccgcacacgctacgcagcctccacgtctccgacaaggaagaagccgcgctgggaatgctcaccggtttcgacctggacctggcgcgccagatcacccagacaagcaaccggatccgcgggttgttcacccagatccacccgcccctggagcgtctgatcggtgcccggctggactacgacgcgatcttggaagtgctcgccgcctggcccaccccagcagcattgaagcatgctggcaaagccaggattgatgcgaagctgaagaagcacggagcccgccgccacaccgcctgggccgccgcgatcttggacgctttggacgaacaaaccgtcaccgtcgtcggtaccgaggctgcgggactagtcatcccgcacctggcccgacaactgatcgccttgcatgcccagcggacagatgtggcttcccatcttgaatccatggtggaggcccaccctctttacccggtcctgacttccatgccaggggtcgccgtcaggactgccgcggccttcaacgccgagacctccggcaagaccttcgacagcgccgcggccatggcctcttatgctggtctggcaccaacgacgaggcaatcgggcacctcgatcaaatccgagcgcgtaagccactcaggcaacaaacgattgaagcgagccttgttcctctcggcattcgcctccatccgctccgacccgaccagccgtgactactatgaccggaaacgaggccaaggcaaacggcacaatcaggcgctcatcgccttggctcaccgccggctgacggtgctgttcgcgatgatccgggatgggtcactttatgatgttccagagctgaaaattgcttgactttgaacatagggg

SEQ ID NO: 8583 - DNA, 1593 bp, unidentified
  source 1..1593: mol_type = unassigned DNA; note = element_d75ee77
  misc_feature 1..2: note = core
  misc_feature 3..251: note = LE
  misc_feature 252..1427: note = CDS
  misc_feature 1428..1593: note = RE
  misc_feature 5..229: note = bridgeRNA
ctcgtattatataaagtagtagtatttgtaaatccctctccagggataagtgctatactattagagatactgtggattggattttaattcctaccactcgatggttacagaaaggctccaaccacagtctctttgtatatttgttaatcagttagataccgcatgacggtttatttagaacgaggttacaatcgcaaggagtaccagtggttctaaaacagtatcaaatatttattcaaaggagattcgttatgatttatgttggaattgatgttgcaaaagataagcatgactgctttatcactaactcagatggagaggtattgttcaagtcctttaccatctccaacaatcgtgaagggtttgaagccttatttcaaagaatcaaatctgtatcagatgatttaaccaaagtaaaagtaggacttgaagccactggacactacagttacaatcttctgggatttcttcttgataaaggtctgaccaccttcgtcatcaacccgttacataccaatctttacagaaaaagtctaagccttagaaagacgaaaacggataaagtcgatgcccatacaattgcttctatgatcatgtccgatatgaacttaaagtcctacttagacatatcttaccacaacgaagaactaaagtcattaacccgttatcgttttaataaagtaaaggaacgtgctaaattaaaaacttccgtttcacgtcttgtaaacattctgttccctgaactggaaaagcttgttccttcccttcatatggtatccgtttatgcaatgctctctgaattcccaggttcctctgcaattgcatcagcacaccttaccaggctgacaaatctgcttgatgaagcttccaagggtagatacggcaaggatactgctatcctgtttcgtgaagccgccagaacctctatcggttctcatatgccagccaaatcccttgaattaaagtacactattaaactcatacaggagctaactgttgagattgatgaaattgaagttgaaatcaaatccatcatggatagcattcactcaccgatccttacaattcccggcatcagctatcgcatgggtgctatgattattgcagaaatcggtgattttagccgttttgattcgcctgataagcttcttgcatatgctggaatgtcaccatctacctaccagtcagggcagttagataactgttattcccacatggaaaaacgtggttctcgttacctgcggtatgctatctacaatgccaccaaatacgtctgccattgggacgaaaccttcggtatttatttggcaaagaaacgagccgagggcaaacattataatgttgcactgtctcatgctgctaaaaagcttgtgagagtgatttatcagcttgaaaaatcagggcaaacatacatcaaagcttcttaattttttctaaatctaatatctcctttttgagtgccgaaaacgacactatgtttgtcatgcagttttcaaggtgctaagaactaaatttcagttcttttatatctgaaatgcttttcagcaattcattctaaaaattttattttaggcttgacttttaatagttagt

SEQ ID NO: 8584 - DNA, 1365 bp, unidentified
  source 1..1365: mol_type = unassigned DNA; note = element_d766546
  misc_feature 1: note = core
  misc_feature 2..69: note = LE
  misc_feature 70..1095: note = CDS
  misc_feature 1096..1365: note = RE
  misc_feature 1126..1359: note = bridgeRNA
gaatgacatggattccccctcccgaggatctgccacacttacgtggtacttattagcactggaggcaccatgtctgattattcttattttggcggtatcgatttagctaaaaaccacttcagtattcatgtcgttgactcgaaagggaaagtggctcttcataaatcggttactcgctctaacttactgaccacaatagcaaatatgccccccatgcgtataggactcgaagcgtgtggcggtgcacattattgggcaagaacgcttaatacattaggacatgatgctcgcattatggcggttaagtatgttgttacacatagaactaaaggtaaaaacgacctcaatgatgccgtggctatctgccaagctgtacaacatccatctacacgattcgttcctgtaaagtctcctgagcaacaagccatactgtccgttcatcgaatgcgtgagcattgggttcgtgaacgcacggctttaatgaaccgtatccgcgccttactttctgaatttggtctagttattcctgttgggcgctcttctttaatgaagcaagtgcctcttatgctggaagatgccgaaaacgagcttccacacttagcgcgaaccgttattgctgacgcgtactatcaccttgaacaactaaaccaacgtattgcggatactgagcaagtgtttgatgccttttcaaagattagcaagaatgctcagcgtattatgaaggtcagaggaattggtccacaaacagcaaccgctattcttgcctctattggtaacggctctcagtttgataaaagccgagacttctccgcttggctagggttagtaccaaagcaatattcaacaggcggcaaacccagattaggcagaattaccaaacacggagacaagtatctacgcaccttactcgtccatggtgctagaacggtcattgctaatctaggtgataaacaagacaggctcagccagtggtgtcgaggcgtgttgggacgacgaggaatgaaccgagctattgtcgctcttgcagcaaagaatgctcgaattatctggtcgctattacacaaccaaacggaatatgagaattacgctgcttaagaaaccattaagccaagcagcgtaacaatagtacacccaccgggtcatagcagacgcaatggatggagataggttatgaccactagcggagagcctgttaatgcggcggacacatatgatgtcatctaacgaataaggcactgcagtcgcgcaaagtcatcagggtcacgatgttgcgaaccatcgatataaagaccgaatgtagagcggcagtccaaaacccatcacttgaagtttagcggatgtttgacaaccgggggaatccatgta

SEQ ID NO: 8585 - DNA, 1826 bp, unidentified
  source 1..1826: mol_type = unassigned DNA; note = element_d7684cd
  misc_feature 1..3: note = core
  misc_feature 4..510: note = LE
  misc_feature 511..1686: note = CDS
  misc_feature 1687..1826: note = RE
  misc_feature 141..423: note = bridgeRNA
ctcgtataatagattttagggtagtttcaagagtaccctaataaacctctgccacgctcagttgagaagggctgcagtgaaatcggaatgagcgtagcgaatggagatttcactgctttggtgcaagatcaaattgtaatcaaacaatcaacaggcattcacatacccatgatatcatagctgtaatcagcaggaacaagttctttttttcctcagtcgagccgcaaggctgcttccgtttggagtctgttccccagagctgtgagttagctgcttacacgtaggctgtttatccgggatgcgctccatccggttttacaggcagtacggattttcgcatcggagccgcccggagtgtatgctgatatgcgaggttgcggatgccacagtatcatgggtagctgaatgcctgctgattgcaaatcccgatgaagggaggtggaaaatgtgaatcaagacaaactttatgttggcattgatgtcagcagcaagaataacgtctgctatctcatgcagtctgacggcagcaaacacagctcgttttctgtgccaaacaacaggaatggtgcgaatattattgttgacagagtaacctctgtacttctcttgcaggacattccacaggttgtgatcggcatggaagccacgtccgtttacggtgacaatctcatgcgatttcttcgggaaagcggcggtcttggacattttgaccggcacatgtatatgcttaatcccaagcaggtcaaaaagttccgggatgcctattccgatcttccgaaaaacgattatgtcgattccttcgtcattgcagaccaccttcgttttggcagaatcaataaggaggtttatatggacgattacaagtatcaggcactcaaaatgtatacccgggcgcgtcatcagctcgttcaggaattgacaagagaaaagcagcgccttctgaacactgttttcatcagtttttccggactaacacaggagaaaatcttctccaataaattcggcgcagcgtcaatggctctggtcgaggagttctcttcgcttgatgagctggcgtacatgaataccgatgcgcttgcggattttattcgcgagcacggcaaaaaccactttgagaatccggaagagatcgcggaagctgttcagcgtgctgcaaaactttcttaccgtccgccgcaggtcattgcggatgccgccaggcagatgatcgccatctctatgaatactatccgtctgctccagaaacaggtcaaggagtacgacaaagcgattgaaaagatgcttgaaacgatcccgcagacactgacctcaatcaagggcatcggcaatgtctatgctgccggaatcatcgctgagatcggtgatatcaaccgtttccccggtcaggcaagcgtggcgaaatacgccggtcttgtctggacccagcaccagtccagcgactttgaagctgaggacaggcgcatgatccaaggcggcaaccatcatctgaaatactatttgtgcgaagctgcaaacgctctgagaagatgcgacccggagtttaagcgcttctacagtctcaaatacaaagaggctaacaagcacaatcataaacgtgcactcgctctcactgccagaaagttggtcaggttagtctatacactgctgaagactaaccgcctgtatatcccgccggaggagtattgatccggcaccttcagcccgttgaaaaaattttttcggcactggctttagtaggagataccctttttgtctcttttttggcagattgtacgatttttatcattgcttttctactttttgcctattgacatttcaccgtagga

SEQ ID NO: 8586 - DNA, 1418 bp, unidentified
  source 1..1418: mol_type = unassigned DNA; note = element_d7696ad
  misc_feature 1..2: note = core
  misc_feature 3..86: note = LE
  misc_feature 87..1115: note = CDS
  misc_feature 1116..1418: note = RE
  misc_feature 1161..1405: note = bridgeRNA
tgatgtggtggacggcgcccgctcccggcatcgaagtgccatagggtggttcgtcggaaacgaatcacatgaggggagccgtccacatgcaaattaccacgatcggtttggatatcgccaagaacgtgttccaggttcacgggatcgacgcggccgaaaaggtcgtcgtccggaaacaactccggcgccgccaggtgttggagttcttcaaatcgttgccgccgtgcctgatcggcatggaggcctgcgccacggcccattactgggcgcgtgaactcacgaagcttggccaccgggtgcggctgatgccggcgaaggacgtgaaggcctacgtcaagcgcaacaagaacgatgccgccgacgccgaggcgatctgcgaggcagtgcggcggccgaccatgcgttttgtgcaaatcaaatctaccgagcagcagggccggttgatgctgcatcggacacgcgatcttttaatgcggcagcggacccaggtgatcaatgccatgcgggcgcatttggccgaactcggcattgtggctgcgcaagggcgtgaagggatcaaggagttgctgaagatcattgcgagcgaagaggatgcgcgcttgccggtcgatgctcacacgagcctcgttatactggcggcggagcttcaggcgatgcagacgctgatcggatcgatcgagaaacggatcatggtgcagcatcgctcgagcgaggcgagccagcggctggagagcatccccggaattggtgttatcggggccaccgcgattgccgcgactgtccctgacccgaaggtttttcgatcgggtcgtgacttcgcggcctggatcgggctggtgccacgcgaagattcaacgggcggcaaacagaagctcgggccgatctcgaaacagggcgatcgctatttgcgacgcattctggtggtcggagcctgcgcggtgttgcgatacgcgcgccagcagccggagaaatatccctggctcacacaacttctcgcccgcaaaccgttcagggttgtcgcggtggcgcttgccaacaagatggcgcgcatcgcctgggcgttgctggccaagggcggcacctatcggtcgcctgcgcttgcggcagcggcctaacaaggagttgggcgatgggaggatgaggttgcgtctgtgcgtacacgaactgcaggggtgatgacggcattgatgcgaaacggtcgagaccgtcgattgggaaaacccgtgatgggtcacgcgacacttgagcgcgtgcttttgtttgggacccgatccgcggattacatcagggccagcggccatagcggctgcatcgcgacaggggtaatcctccaagcgacgacaggccgaatacatgaccgcacccgaacgcttcgctgatagtcagattcctcttgcaccgcgggcgccgtccataca

SEQ ID NO: 8587 - DNA, 1225 bp, unidentified
  source 1..1225: mol_type = unassigned DNA; note = element_d76bbbb
  misc_feature 1..3: note = core
  misc_feature 4..239: note = LE
  misc_feature 240..1217: note = CDS
  misc_feature 1218..1225: note = RE
  misc_feature 48..219: note = bridgeRNA
catcctatgtttgtaggagttgaaagattaagggtaaagtaatagatttatagtagaagaaaagggtaaagagaaaaggttaagtcttgtcattagccataggaggctgttcgaaatgctgatcactttaccctttgctttcgagcttgaacagttcattaggcctctggagcctgcatgtaggattgataagccgttaagcatgttcttctaccatttattgtcttaatcacaaagttatgcaaacccaaacaaattacacaggcattgacatttcaaagttattctttgatgtagccattggcaatcagaacaagtacttgtattacaagtttagcaacgatgaaccaggctttaaggccttgataaagctgctttgcccggacagccatatcgtaatggaagcatcaggcccgtattatttaaagcttgcctgttatcttgatgatcagggcctggctgtaagtgttgttaacccattggtgatccgccgtttctgccaaatgcggatgtcaaggaccaagacagataaaaaagatgccgggatgattgccgaatatggtaaaacagaaaagccggggctttggcaacggccacagcaacatgtcatcaccttgcaacagatggatgctttgccagctcatctaaacaaggaacatacggcactaagcaaccaattggaaagctttaaaaacagcgggttgctggatgggcagcttgaaaaaaagatcgttaaagagttggcccataagcaatctttcttaaaagaaacaatagcggcgatgcagcttttagcagggcaacattatgccgaaatgctggctaacctggaaagcatcccaggcgtgggcaagaaaacggcaatgatgctggtcatcatcagcggtggttttagcaggtttaacgattatcgtaaactgagtgcctatatcggaatctgtccaaggatatacgactcggggacaagcgtaaaaggcaaagccaggatatgtaaaatgggcatgtctaaaatcagggcatcactgtacatctgctcctggagcgcaaaacgatacaacaaagcatgcaaggaactttatgaccggctgctggcaaaaggaaaagcaaaaaaacaagccttaatggccgtagctggtaagctacttaaacaagcttttgcaatcgccacgcaaaaaacaaaatacaatgaaaattattcaaatattacttgcttttaaacacagtt

SEQ ID NO: 8588 - DNA, 1542 bp, unidentified
  source 1..1542: mol_type = unassigned DNA; note = element_d76bc45
  misc_feature 1..2: note = core
  misc_feature 3..246: note = LE
  misc_feature 247..1425: note = CDS
  misc_feature 1426..1542: note = RE
  misc_feature 3..224: note = bridgeRNA
ctcgtattatagagtagtagttcgtaaagccccgctccaagggcaatgagatacactgtttaggatgctgtggattggtttcatgttcctaccgccagacggtttttgaaaggctccaaccacagtcctttgcagtattgttgattagttagataccgccagacggtttatttagaacgaggttacaagagcaaagtgtcctgtggtcctaaacagcatcaaatcattcctttcggaggtatcatcatgatggtttgcgttggaattgacgtagcaaaggacaagcacgactgctacattcttagttcggaaggtgaaatccttgccgatgttttcaccatcccaaatagcagagacggctttgaagcattgctacagcggattcatctttgcaccaaagagacagacaaaataaaagtagggcttgaggcaaccggacactacagttacaacattctcgggtttctgcttgacaacggccttgacagctttgtcattaacccactacacaccaacctttacaggaaaagccttagtttgcgaaaaaccaagaccgacagagtcgatgcacgaacaattgcaacaatgctaatgtctgatgtggacctcaagtcctacacaaacgcagcataccacaatgaagagttaaagtcactgacgagataccgctttggcaaggttcaagaacgagctaaattaaaatcttccgtttccaggctggtgaatattctctttcccgaactagaaaagcttgtaccgaaccttcatttagcgtctgtttatgcacttctaagcgagtttcccggcgcaggtcaagttgctgcagctcatctgacacggctcacgaacctgctcgcaaatgcctcaaaaggccattatggtaaagaggaggctaccaatatccgcaatgtcgccagaagttccattggctccactatgcctgcaaaatcgttggaactaatgcataccattcgtcttattcgggaattgaatgccgagattgatgaaattgagacggaaattaagtctatcatggatgctcttcactctccaattatgactataccaggcatcagctaccgcatgggggccatgattcttgcagaaatcggagacttttcaaactttgattcccctgacaagattcttgcctatgctgggctctctccatctacttatcaatccgggcaacttactaattgctactctcacatggaaaaacgtggctccagatatttacgctatgccattttcaatgctaccaaattcgtttgcaactgggacccagtctttgcctcctatcttgccaaaaagcgagccgagggcaagcattacaatgttgccgtttcacacgccgcaaagaagctggttcgtctaatttgtgctttggagaaatctggacaggcttactgctctgcagcctaatctatctctcatatcgtttccttgagcgccacgggacgctccgattgttatgcctttctttattgtcatccacttcacaacatttttcgctttggggcttgacttctaatagttagt

SEQ ID NO: 8589 - DNA, 1604 bp, unidentified
  source 1..1604: mol_type = unassigned DNA; note = element_d76ca57
  misc_feature 1..2: note = core
  misc_feature 3..377: note = LE
  misc_feature 378..1277: note = CDS
  misc_feature 1278..1604: note = RE
  misc_feature 1348..1560: note = bridgeRNA
agacataatgttttgacctgtcctgcctcaagaacgtggattatgttaggtgagattcaccaacacctagccacaattgaggaggacaggcatgaagaatactaacgcaatcaacggaaaagcgagagagatctttgagaatgaagcaccggagtatccggcatacgtagggctcgatgtccataaggagactatcgtggcggcgatcgcccgggagggtcggggaaagccggagtcgcttggaacgatagcgaacaaaccgaaggaggtggcgaagcttgtcgagcggctgagccgggagttcggggggagaggttctgctgtactgctacgaggcaggtccgtgcggatacgttctgtaccgtcagctggtggagatggggcaggaatgccatgttgtggcaccgtcgaagatccctaagaagcccggcgacaggataaagacggaccggcgggatgcgaggaagctggcccggctattgaggagcggggatcttacggcggtatgggtgccgggagaggagcaggaggcgatgcgggacctggcgcgggcgcggaacgacttcaagatccaggagcggaaggcgcgccagcaactgagcgctttcatgctccgtcacgggcattcgtggcccaagggaaagacgcggtggacgaagggccacttcgaatggatggagacgcgcaagttccctcacgaatggcagtatgttgtgcttcagggatacatcagagcggtgaatgcggcggagaagagggtggctgacatcacggcggaaatgagcatggcgctgccgcactggtcgatggctccggtggtctactcgctgatggcgttcaggggtatcgacatggtcagcgcgatggggctcctggcagaactcggggatctgacccgcttcgactcgccgaagcaactgatgggctttctggggcttgtgcccagcatacacgcctccggcccgacaaagcgcgagggtgagataacgaagaccggcaactcgagggcccggcgcctgctggtcgaagccgcctgggcgtaccgccatccggcgcgcatgacggctcatttgagacgaaaggcgaagaacgcgtccgaagaagccagggagatatcctggaaggcccagaaacgtttgtgcggaagataccggtcgctggtctactcgggcaagaacaagaaccagaccacggtggcagtcgccagggaactctcgggctttatctgggacgtgacacgggtcgagatggccaggtttgaaacccccgcccgctagcgggccggtaacgcatcgcaaagaagtatccgacaagaggaaaagaagttaaccacagaagaaaaggaggtcagaggcgctccaggtcagggcattcgcagacagatcttctgaagaatcccggtcacggctagaacggcttccccgaaaggggaatgatccacgcttttagataagaggaaagcttcgcgacgaagacaagtcaggtaggtaaccaatccacgtatatcagcatgatccatcgtcgcttaccgtccgcaatgccctgacctcaggcgcttctgacaaacgagaatatgtagaggggttgacaggtcaaaacatatc

SEQ ID NO: 8590 - DNA, 1479 bp, unidentified
  source 1..1479: mol_type = unassigned DNA; note = element_d76dd83
  misc_feature 1..3: note = core
  misc_feature 4..415: note = LE
  misc_feature 416..1453: note = CDS
  misc_feature 1454..1479: note = RE
  misc_feature 1..216: note = bridgeRNA
cccttaccttctttgtggggctagcgcgatgctggccctgggaagtccggcggtgctggcatggctcattgccccctgtcacttgatgacctggggggtgttgccaccggtgccatcgggtgcgacgagacctctgatggggacatgcgactgatcgctgattcgtaaggtggatgacggtaagcgcaccgtggacctggcttccctcccgttgaccgactggcaggaggaaccctgatggcatcacccgacgaagtgaccgtgtggatcggtctagatgtcggcaaggaggagcacttcgccgatgttctcgatgacgacggcgagtcgctgttcgcccggtcgatccgcaacgacgagacctccctcgacgctctgatcgacgacgccagcgagcacgggaccgctggcgttggtgatcgaccagcccggctcgatcgcccagctcgccatcgctgtcgccgcctgccgccaagtcccagtcgcctatgtgcccgggctggtgatgcgccgagccgcggacctctatccgggagaggccaagaccgaccgccgagacgcgttcgtgatcgccgacaccgctcgcactcgacgcacgaaggtgcactggctcgacacaggcagcgacgagctcctcgagcagcttcgggtgctcaacgggttcgacatcgacctggccgctgatgtcacccggctcacgaaccggctccgtgacctgctcgtctcggtctcaccagcgctcgaacgcgccatcggatcccggcttcaccagcccggagtccgggcactgatcgccaagttcccgacccccacagccctgcgtggtgctggccgggccaggatcaacaagacgatcaagggtcggtcaccccgcctcgccgacaaagtcaccaccaccatcatcgaagcgctcgacgctcagaccatcgtcctcccagccgaagacgcccttggccgggtcatcgcagaagtcgctaccgaactcgaccggctccacgcccggcgcgacgccctcgccggtgagatcgaggaggtcttcggggcccaccctttcggcaaactgctccagacgctgcccgggatagggccccggaccggagcacggatccttgctgaaatcggcgacggcagccgcttcgcggacgcctcgaaactcgccagctacgccggcctcgtcccggtcactcgccagtccggaacctcgatccgaggcgagtccatgagccgacgcggcaaccaccggctcaagaacgccatgttcctcgccgcgttcgcatcgctgcgatcccccgagtccaaagccttctacgaccgcaaacgagccgaaggcaagaaacacaacgcagcgctcatctgcctcgcccgccgccggaccggcgtcatcttggccatgctccgcgaccaacagccctaccggccacccaccacccccgaactcaccgaagccgcctgaacccccttgacaagaacatggggaca

SEQ ID NO: 8591 - DNA, 1406 bp, unidentified
  source 1..1406: mol_type = unassigned DNA; note = element_d76e52e
  misc_feature 1..2: note = core
  misc_feature 3..90: note = LE
  misc_feature 91..1128: note = CDS
  misc_feature 1129..1406: note = RE
  misc_feature 1173..1392: note = bridgeRNA
gatggtgtggatggctcctgctcacggcatctgagtgccaaagtgtgagaagctgtcgcaaggatctcacgagcaaaggagccacccatcatggagattaccacgatcggcctcgatctggcgaagaacgtgttccaggttcacggcgtggacgcgaccggcaaggtcgtggtccgcaaagcgctgcggcgtgtgcaaatgatgcctttcttcacgaagctggcgtcatgcctgattggaatggaggcgtgcgggacgtcgcatcactgggcgcgcgagcttgcggcgctcgggcatgacgtgcggttgatgcccccagcctacgtcaaaccgtatgtcaaacgtggcaagaccgatgcggccgatgcggaagcgatctgcgaggccgttacccgaccgacgatgcgcttcgttcccgtcaagtcgcgcgagcagcaggcggcgctgtttcttcaccgcacccgcagcctgctcgtgaagcagcgcacgcaactggtaaacatgatgcgcggccagctcgcggaattcggtatcgacattccgaaaggtctggagcgtgccttgaccatggcgcgccagattatcgacggcgaagccgagatggaccttccaccctacggcatgagaatgctggcgatcctgtgtcagcaggccttggcgacccacgtgcaaattcgtgagatcgaccgcgaattgcagaagctcgagcgttcggacgagatggcgaaacgcctggcgacgatccccggcatcgggccgatcggcgccactgcgtttgcggccgctgtcacggacccggcacaattcagatccggacgccagtttgcggcgtggctcgggctgacgccgttgcaaaattcaagtggcggcaaggagcgtctcggacggatcagcaaaatgggcgaccagtatctccgtcgtctgctggtaattggagccaccgccatggtgcggcagttcaaaatgcgaccggaaaagacaccgccgcatgtcgcatcgctgctggcccgcaagccggttcgggtggcgacggtcgccatggcgaacaagatggcgcggatcgtctgggcgttgatggcgcgcggcgaaacatatcgcgtcggccacataccggcgctggccgcctgagggcgaacggaacacagagagatcggtcggctcaccccggctgaaggaggttgcgggagcgacgcgacgtgatggcaaaaccggtcaggccgggaacagggacaacccacagtatgtcagaggcttcgagcctgcaaagcagaatgggaccttgttcgcggactccatcagggccagcagtcttttgaacgactgcattaacaggccgaacagaagactgctcccgaccaacgccagaacgtcacttttctcttgcaacgcaggagccatccacagaa

SEQ ID NO: 8592 - DNA, 1711 bp, unidentified
  source 1..1711: mol_type = unassigned DNA; note = element_d779e9e
  misc_feature 1..4: note = core
  misc_feature 5..61: note = LE
  misc_feature 62..1243: note = CDS
  misc_feature 1244..1711: note = RE
  misc_feature 1272..1489: note = bridgeRNA
caagatgctatggggcgaacggcgagggtattgcaccttcggcgctgttcaacggctaccgatggagctcctcatgtcgcaagcttttgatgcgagcaagtccctcatcgccctcgaccaggatagcacgatcatcgtcgtgatcgagatgagccagtcgaagtggctcgtcgcggcggttgtcccgggcgttgagcgccaacccctcaagaaactcgatgccgacaaggacgcgttgctcgagctcctacaccgctggcgcaacgaagccagccgagccgggcgcgcgatcaaacgcatcgccgtcgcttacgaagccggacgcgacggcttctggctagcgcgctggctgcggcggcatgatgtcgaggcctacgtaatccatcccacaagcatcgcagtgtcgcgcgagcaccggcgcgcgaagaccgatcgcctcgatacggaactgctgatgcgcgcctttctcggctggctgcgcggcgagaggcgccattgcagcatggcggcgatcccaacggctgaggaagaggacgcacggcggccaaaccgcgaacgggagaatctggtcactgaacagacgcggatcgtcaaccaaatgaaggccatcctcgcccgctttggcatccgcaccttccggccaaccctccgcacggccgcagaaaagctagacagtctctgtaccgcggaagggacgccgttgtcagagaacgcgcgcgccgaactgcgccgtcacctcgttcgactatgcgtcatacgcgaccagatccgcgcgatcgagcaggaccgcttgcgcaagcttacgacggcccgggccggagagcgaggccctcacgcgatggtttgcctccttgcacgggtcaccggcgttggcatcgagacggcggacatgctggtcaacgaggtcctttcgcgccccttacgcgatcgtaaggccgttgcccgctatgccgggctcactggcacaccagacgagagcggcagacgtcgacgcgagaaaggtcttgcgcgcgccggcaacgcccgcgtccggcgcggcatgatcgagttcgcttggcgctttctcaggttccaaagcgacagcgccctggcccaatggtttaacgcccgaacggccgacggccgccgcaacacccgcaagaccatgatcgtggcgctggcgcgcaagctgctcatcgcgctttggcggctcgtcacaatcggcgaggtgccagagggggtcatcttgcgtccagcctcgtgaattacagactcaaactgagaggcaacgacacaacccgcttggcagcctgccaataacgatccgaggtggcggtgacccgacctggcacatggcctatacgccgtcccgaagaatgggcccgccgccccggagcttcgccaccgatgcgcatgactgcatcatggtcccgacccttacaggtcgaccgaatacaagtttgtggtgcgataacggcacccctgatggcaagctcccctcggaactatcgttctcacctgctacggcgggaaagctcgcccgaccaaccagcctgtcgctgtgttcgcgaccgtcaagggcaagtcgcttcgcgatggcccttcggccacccttgaccgtcgctgcccgcagcgaccaggtaatgccaggtcgggacggggagatggtctttgtggatcgaacaaggagatgaattggactcggacaggccttgacaccaaaaaccccata

SEQ ID NO: 8593 - DNA, 1671 bp, unidentified
  source 1..1671: mol_type = unassigned DNA; note = element_d77ad87
  misc_feature 1: note = core
  misc_feature 2..84: note = LE
  misc_feature 85..1158: note = CDS
  misc_feature 1159..1671: note = RE
  misc_feature 1441..1662: note = bridgeRNA
taatgggatggtccgccgcttttgagatgcatctcggtgcggagcaagcttgaaggtgatatccaaaggaggatcatcaacagcatgaacgtacacaccatcggcattgatttaggaaagacggtctttcacctggttgggttggaccagccaggaaacgtggtcgtcaagagaagaccttcgcggagccagttgctccgccaacttgccaacaccccaacctgtctgattggaatggaagcgtgctgtggtgctcatcacctgggcgccgctctggtagcccaagggcatgaggtgcgcttgattccaccccagttcgtgcgccctttcgtgaaggctaataaaaatgactacaaggatgccgaagctatcgcggaagccgtgcaacggcccacgatgcgattcgtgcccatcaaaacccaggatcaactggatctccaggcgctgcatcgagtgcgggatcggctggtgtcgcgccgcacagctgtgatcaaccagatccgggcctttctgttggaacgagggatcaccttccgccgcggccggaagtatctgcagcaacgcatgcctttgatcctagaagacgctgaacagaatctatctcccttgctgcgccagttgctggatcagctctggcaggagtggaaagtgctggcgtcacaaattgaagccatcagcgggcagatcgaaaggattgcacagcaagacgcggtctgccaaagattgcaacagatccccggagtgggtccgctggtggcgaccgccacggtagccgccatcggaaacggatccgcattcgtgagagggcgtgacttcgctgcttggctaggcttggtcccgcgacaacactccaccggaggcaaggccaagctgctgggcatcagtaagcgcggcaatccctatctgcggcgtctgttcatccatggtgcacggtcgattttcacccaggcccatcgagaccgattagcgctgaacgcctggatgaatgaactggaacatcggatgcaccgcaattgtgcgattgtcgcggtagcgaacaagctagcgcggatcgcatgggcggtgctggccaagggagcgaactatcactggccgggtaccgatccatgggaaccgagagaagctctcgacgtgccgtacggagcgggaacacagtgattcacgctagtgagttttaccaacggcgctcgccggccagatggctgcgaaccaaaaatcggcaggtttggggcacagctttcttgcccttcgccacgcggaggcgtgtcctggaccggaacaccaccgcaccctagacagcaacaccacccgacaaaagatgctccgctatcaaagcgaagggcaagaaagcctgcttcaccctcccttgtcttgcgagccttttggcgagtggaggttgcagccgggaacacaccaaacgtgctctatcgttgcacaaaaaccgacctcggtcgccaagcaccaactaacgagatggcggaacagtctaacggcgcgccccaagcctgttataaaaaatggttctaaggtgaccgacccctttattaggacgggcgcgcgcgaatcctcatcatggccaggagttcgctccaccaatagaccggatacatttttgcagaccacctccgacaatctcgattttctgcttgacgccaagcggcggaccataca

SEQ ID NO: 8594 - DNA, 1414 bp, unidentified
  source 1..1414: mol_type = unassigned DNA; note = element_d77bf82
  misc_feature 1: note = core
  misc_feature 2..100: note = LE
  misc_feature 101..1138: note = CDS
  misc_feature 1139..1414: note = RE
  misc_feature 1189..1409: note = bridgeRNA
caatgggatggagtccgacccaccttacatcagcgctgctgcgccataatagatagggtgagagggctactgccttgcctatcgcttaggagcacatcccatgactatttcccgagtcggtgttgatattgccaagtctgtcttccatgtccacggtgtcgaccgtcatgaccaggtgcagtggcgtggcaagtacgcccgtgacaagtggctggacgcgatcgccatccgtgttcctactggtgccgtgatcgctatggaagcctgcgcctcatctcactattgggcccgcgaacttcaggcacgtggctatcacgtcaagctgatcgcggcccagttcgtgaagccttacgtcaagagcaacaagaatgaccgggtcgatgccgaggccatctgtgaagccatgggacgaccaacgatgcgttttgtgatagccaagacgacagctcaacaagatattcaggccactcatcgcattcgggaagagctggttcagcaacgcacagctaaagcaaaccagattcgcgggttggtcggcgagtatgggctggtggcccccgtcggcatcggtcaactgcgcatggcattgccacgctggttggaagacgccgagaacggtttgacctataacttccgtttcctgcttgcggggctcgccgaagatctccggtacctggatgatcgcattgccagtgtcacggagcacatcacgctgcacgccaaaactgacccggtggcgaaacgtctgatgacactccgtggagtcggcagtattacggccagcgcgttggctggcgccctgggggatgctaaggccttcaagcgaggtcgtgactttgccgcttcactgggtctaacaccacgtcaacacagtactggcggacgagaccgtctgctggggatcagtaaacgtggcgacagttacctgcgtacattgctggtacatggtgctcgagcggtcttgcgatacacggaaggcaaggaggacaacctaagccactggatccggcaactggctgagcgcaaacatgtcaatgtggcggtgatcgctttggccaacaagacggcgcgtatcgcctggtcgataacctgtcacgacagtgactatgatccggatagagcagctcaagctgcataaatacaaccccataaatccaatgcttttatttcactgaggacacccaccaccacgattgctgagcatgctgcaagatggcaaacaggtcgaaccgacgttggtaaaccccgttttggtcgaagagctagcagctcgctttaccatttgggaactgacgtgcgaatagcccatcagggttcgatgccactggcatcctattaaagaccggatatacgtgtgcagtcgtacctactaaccatcgcgccttgtgcttgcaaccgggtcggactccatata

SEQ ID NO: 8595 - DNA, 1383 bp, unidentified
  source 1..1383: mol_type = unassigned DNA; note = element_d7880ef
  misc_feature 1..2: note = core
  misc_feature 3..262: note = LE
  misc_feature 263..1264: note = CDS
  misc_feature 1265..1383: note = RE
  misc_feature 33..237: note = bridgeRNA
ctcctatgtttgcaaagtaatttataagtttttactttttttaaatttgcattgataaagtgagaaagaatgagagtgcattcgcgtctaaatagttcgtagaaacatattctcgcaaagaaattacctcattcttttttatcttttagagtctgaacagaatgtaaggaatcaggcagggcttgatatccagaatatccaatcaggagaaaagacgaaggaaaattcatcactttataaattaaatttaaaaaagtaaaagatgagtagaattgtaaaacaagttgccggaattgatgtagctcagaaagaactggtagtcactttaggtcgtatttcggatgatttttcgatagagttatttgcctataaagtttttaaaaatagcaattcaggttttatttcattggttgaatggacaaacaaactaacagagaatgaaacagatgttcgttatgtgatggaggccaccggtgtatatcaccaaaagtttgcttattttttatctgaaaacaagtacgaagtaagtattgtcctgcctaataagatcagcagctacatgcggactttggaattaaaaaccattacagataaaagctgttctcaggctattgcacaatttggtttagagcgaaaactagatctctggcacaaacccaaaactgtttataaagaattacagcagttgacaagggaaagggatcaaattgttcaggaacgaagtattattaaaaatcaaatacatgctgagagaacagaggcagaaccaaatcagaaaagcatggaacgaatgcaggccagaataagatttttgaactcacaggagaaggagatcaaagaggatattaattgcattgtaaaagaaaatccagatttaaaacaaattatagacagaataataacaataccaggagttggggaactgacagcagtgattgttttggcagaaaccaatggttttgagctgatcagaaacaaatcgcaattatcgagttacgcaggactggatgtaaaggagaagcaatccggaacatcagtaaaaggcaagccgaggatatctaaaaaaggaaataggaacttacgaaaatcaatgcatctaccagcactgacagcagtaaaatgggatgataacttcaaagggatatatgcaagattagtatctaaacatggaattaaaatgaaagctttggtagctattcaaaggaaaatactggaattaatatatatcttattcaaaaatgaaacaatttatgacaaagactaaataataaaaatagcgtgaaaacacataaggtttaacacgctatagagactagctcaatgactgtcttgaaaaacaaaattaataaaaattaagatttaaattggaaatcaacacagaat

SEQ ID NO: 8596 - DNA, 1411 bp, unidentified
  source 1..1411: mol_type = unassigned DNA; note = element_d78a93f
  misc_feature 1: note = core
  misc_feature 2..98: note = LE
  misc_feature 99..1136: note = CDS
  misc_feature 1137..1411: note = RE
  misc_feature 1186..1406: note = bridgeRNA
caatgggatggagtcctccccaccctagtccggcgtcattgcgccatactggagggtgagaacatcacttaccagcttgatagtaaggagagtttcccatgaatattacccgggtcggcgtagatatcgcaaagtccgttttccatgttcatgctgtggatcgtcatgatcaagtccagtggcgtggtaagtactcccgtgacaaatggcttgacgctatctgcaagcgggtacctgttggggcggaaatcggcatggaagcctgcgcttcgtctcaccactgggctcgtcagttccaggttcgtggctatcacgttaaattgatcgcggcacagttcgtcaagccctacgtcaaaagcaacaagaacgaccaagtcgatgctgcggccgtctgtgaggctatgggacgccctcacatgcgtttcgtgacgatcaaaacggtatcgcagcaggatatccaggcagcgcaccgcgttcgtgccgagcttgttcaccagcgtacggccaaggccaatcagatccgcggcttggtcggcgaatacggcctcgtggctccgcttggcatcgctcagttgcgtgctgctctgcctcgctggctggaggatgcagagaacggcctgactgatgagttccgcgtgcttctggctggtctcgccgaagatctgcgccacctagatgtccgtatcgcgatggtaacggagcgcatcaagcgccacacccaaacggatccaatggcgaaacgcctattgtctcttcccggtgtcggcacccttaccgctagcgccctagctggtgcgttgggcgatgcgcaggcttttaagcgtggacgcgactttgccgcctctctgggcctgacaccacggcaacacagtacaggtggacgagaccggctactgggcatcagtaagcgaggagatagttacctacgcacgctactggtgcatggtgcccgcgcggttttgcgatacgcgggcgacaaagacgacaacctgagtcactggatccgacagttggcagagcgtaagcatcccaatgtggcggtggtcgctttggccaataaaacggcacgtatcgcctgggcaatcacacggcgagatgcagcctatgaacctgagttggcagcctacgtcgcgtagagctatctctttaatctaataaagttacttcactgaggtcgcccaccacaacgattgctgagcatgcagaaagatggtgaacaggtcgaaccgacgtcagttaaacccgttttggtcgaagagttaacatctcgctttaccatttgggcactgacgtgcggatagcccattagggtccgatgccactggcatcgttataaagaccggatatacgtgtgcagtcgtacctgtcgatcatcgtatctcgtgcttgcaactggggaggactccatata

SEQ ID NO: 8597 - DNA, 1111 bp, unidentified
  source 1..1111: mol_type = unassigned DNA; note = element_d7a8aa9
  misc_feature 1..3: note = core
  misc_feature 4..200: note = LE
  misc_feature 201..983: note = CDS
  misc_feature 984..1111: note = RE
  misc_feature 37..185: note = bridgeRNA
gcttgtgtcttgaggttgaattagaatttggagtgagagcggtgaatggcaagctgaatgccgcaggtgccatgagcacgagtgggagcacaagctgccattcaccgttccactttggcgagagcccgaacagttggatgcggctctgatctcgaatcacaagcgtgggccaagccaaaggtggctatgagcgtgatgtcatgcgttttttgcaagacgcgggctacaaggtcatccgcgtaaatcccttacgagcccggaacttcgctgactcgatgggcgtcaaggccaagaccgacgctatcgacgccgaagtattggcccattacgccgaggtcattccagaccagcctgccttgaaaatcagccctgatagagcgcttctgcgagagctgctgcaacagcgtgatcggctggtccagcagcgagacgatgaccggcggcgcctgaaacaagcccagtcactggtcgtggccgatttccttaaagccaatctccagtacttccggtcgcagattaagttggttgagcaagcgatcaggcagcaggccgaaaagcttaatgatgagcgagtcgctcagctgacccaagtgaagggtattggggtggtgacagcaagcaagctggtagcgcttctgccggaactgggtcgcgttgagtccaaggaaatagcctccctggtcggtgtggcgccctttaactacgacagcggaaagtccgtgggcaagcgctctatctcaggaggccggtttgaagtcaggccggcgctgtacatggctctgcttgtggctgtgagatacaacccggcccttaaggaccgttatgaggcgctgcgtggtcgaggcaaagtggccaaagttgctctggcgtgtatgagaactttcatcgtacgtctgaatgcgatgctcaagacgggtacaccctggcgagatttgatcttgcctcagccagcagatgcgacgcagatcggaaaagcagcgtgatcggcgtcagcacgggcgggcccgcgaagcaggctatgcagaggatggcacgagcttcgcccgtattcgcgggcaagcccgctcccacagtgattgcgctaacttgtaggttgttgtggaagacagtt

SEQ ID NO: 8598 - DNA, 1496 bp, unidentified
  source 1..1496: mol_type = unassigned DNA; note = element_d7b13cb
  misc_feature 1..2: note = core
  misc_feature 3..246: note = LE
  misc_feature 247..1476: note = CDS
  misc_feature 1477..1496: note = RE
  misc_feature 6..243: note = bridgeRNA
ctaatggcttctaccgggtcggttgatagggcaggctcggttccggtagcgactggcgggtcagcactcttcggatctggccttggaggtctcgcggcagaccgtgcgctcgttggtcgtgaggaggcgtaaacccctactgggatgtcgtgccccgtcgatgatggtgagcacttggaccattagatcgctggtagtcctcctccgcgctgctgaccatggtgagtcgaggaggaaggcgaggcgatgcttttcatcggagatgactgggccgaggatcaccacgacgtcgagctggtcgacgacgagggcctggtgttggcccgcagacgattggtcgagggtatcgcggggctgcatgccttggtcgccgaccacttgcccgaggactggaccgagctggaacccgagcaggtccaggcgctggtcaaggtcggcatcgagaccgaccggggaccgtgggtcgcggcactggtcgcggccgggtacggggtcttcgcgatcaaccctctgtcggtggcccgctaccgcgaacgtcactcgacctcgggtgcgaagtccgacgccggcgacgcccacgtgctggccgagatcgtccggctcgatagggctcatcatcgtccgctggctggtgactccgaggaggcagaggcgatcaaactagtggctcgcacgcaccagagcttgatctgggagcgcagccgacatgtgctgcggctgcggtcggcgttgcgggacttctttcccgccgcgctggaggccttcgccgacctcgacgcccccgaggccctcgagctgctggcggccgcacctgaccccgagcgtgcccgtcggctgacccggcgccggatcgtcgcggcgctgcgtcacgcccaccggcgcaacgtcgaggtcagagccaccgagatcgtgcagatcctgggtgccgagcagctgcacagatcggctccggtgcagtccgcgtacgccgcgatcgtggccagccaggtcgccatcatcgagaccctcaacactcaggtcgaccagatggcggcggtggtggacgcgcattttggccagcacccggacgctgagatctacaccagccaacccgggctcggtgtggtcctcgccgctcgggtgctcggcgagttcggcgacgacccccaccgctacaccgacgccaaggcccgcaagaacgacgccggcacctccccgatcaccaaggcttcgggcaagaagaagatcgttctggcccgctacgcccgcaaccgccgactcggcgatgcgttgcagcaatgggcgttctgctcgctgcgcggatcacccggagcccgggcctactaccaacagctccgcgcccgcggcaccggtcaccaagccgccctacgccagctcgcgaaccgcctcgttggaatcctccacggctgcctgaagacccacaccacctacgacgaacacaccgcctggaggcaccacatcaccagcgccgcttgacgccgcagaacctgggatgt

SEQ ID NO: 8599 - DNA, 1437 bp, unidentified
  source 1..1437: mol_type = unassigned DNA; note = element_d7b2342
  misc_feature 1: note = core
  misc_feature 2..223: note = LE
  misc_feature 224..1426: note = CDS
  misc_feature 1427..1437: note = RE
  misc_feature 14..238: note = bridgeRNA
ctactagacacgatggcctcaggaccggtgtccggccagactcggtccaggtgctcggcgggacgctctccatgcggctgcccaccatcaattggtgtggctctctaccggtctgcggtcccgttgggcgccgtggcgaggcgtggctccagaggggactgcccagctcgtagtagcaatgcccgcctcgcaatccctcattggaacggcggaaggcgaacgcatggtgcaggtgttcatcggggtcgatccccacaagctgtcggccaccatcgaggtgatcgatgatcacgagaaggtgctggcaaccggacggttcgccacgggcaaggccggttatgcggcgatgctcagacacgtcgggacgtggcctgatcgagtctgggcggtcgagggcagcaacggcgccggtcggccgctggcccaacggttgctggccgatggcgagcacgtggtcgacgtgccggccaagctgtcggcccgggcacggttgttcgacaccggtcacaaccgcaagaccgacgctcatgacgcgcacgcggtcgcggtcgtcgcggcccgcacaaccggtttgcgggtgctcgcccacgatgacgagctcgaggtgttgcggatgctggtcgatcgacgtgaagagctcgcccggcagcggatccagaccatcaatcggctccaccggctgctgtctgagctgaccccggggaaggcgaagaaggacctcactgccctgcaggcgaaggcgattctcgcctcggtgcggccccgtgacctggctgggaagacccgtcgtcggctcgcggccgaacagctcgccgagctggtcgcggtggagaagaagatcaaggcctcgaccaaggagctcaaggtggtggtgctcgcccgcgggtcgacgctgatggacctgcgcggggtcgggccagtggtcgcggccaggatcctggccgatgtcggtgacgtgtcccggttcgccgaccgcaaccggttcgcgtcctggaccggcaccgcaccgctggacgcatcgtcgggtgagcagattcgccaccggctctcccgcgccgggaaccgcagagccaaccacgtgctgcacattgccgcggtcagccagatccgcctcgacaccgaaggacgcgcttactaccggcgcaagctcgccgccggcaagacgaagatggaagcgatgcgctgcctcaaacgcaggatctctgatgccgtataccgacaactcgtcgccgacgcccaggtcgctgagagccagggcactagcacgggcccgggagggcactgcggggcgactctgaaatccagcgcggtcgacctgcccccgcacatcgacacttcggatcagccacttcccggacccgcagaaccgacgctacaaccgcggcgacaaggtcggaagaaggcacctcttagcgccaaccgttgacagaggggagc

SEQ ID NO: 8600 - DNA, 1351 bp, unidentified
  source 1..1351: mol_type = unassigned DNA; note = element_d7b6826
  misc_feature 1: note = core
  misc_feature 2..63: note = LE
  misc_feature 64..1110: note = CDS
  misc_feature 1111..1351: note = RE
  misc_feature 1131..1345: note = bridgeRNA
taatggcatggtccgccgcctcaagcccttcggggctataagaggtgggacagtaggcggtccatggaaatcgacatcatcggcatcgatctgggcaagacggtgtttcacctggttggcgtcaaccggtctggcgaggtggtggtgcgcaggaagtgttcgcggtcgcagctgctgcggttcacagccaacctgcgcgtcaggctgatgggcatggaagcttgtgcgggctcccactttctcggccgcagcctgcgagagcagggccacgaagtgcgcctgatgccggcccagtatgtaaagccctacgtaaagacgaacaagaacgactacatcgacgccgaagccatcgccgaagcggtggggcgtccgaagatgcgcttcgtgcccatcaagagcgacgaccagctggatatgcagtcgctgcatcgggtgcgggatcggtgggtggggcgcaggacctcggtgatcaaccagattcgcgggctgctgctggagcgcggcattaccttccgcaaaggacgccgctatgcggtggcctccctgcccggtgttctggaagatccggagaacggactgtcgggtgcgctgcgcatgctgctggcacagctggagggtgaactgagacagctgcagagtcagatcgatgaggccgatgcgctgattgccagggcagccgacgagcacgaaccctgtcgccgtctgatggcgatccccggagttggaccgctcacggcaacggcggtggtagcgtccatcggcaacggcgcctccttcggcaagggccgctccttcgccacctggctggggctggtgccggggcagtactcaaccggcggcaagcagaagctgctgggcatcagtaaacgaggaaacggctatctgcgaaggctgctggtgcacggagcccgagcggttgtggagcgcagggacaaacagtcgcctggtctcagcgcctggctgaaccaacttgcagcgcgtacccacagcaacgtcgtcaccatcgccctggccaacaaaacggctcgtatcatatgggcggtcctttccaaagcagaggcctatcgtcctccgctgctggcatgcccgaccaacgcagtgccccgctgacaatcaacaaccgctatctgccaggtctgctggcgaacggcgagatggcaaaacggtcgaccccggcgctctcgaaacctgtcatacggaaaagcccttcaaggctgggaaactaagtaggacgagagcgcagcgcattccatcaaggtcccgagcctcggctcactcaaagaccggatacattggcgcagaccaaccgccatcttcacttttcgcttgcagcacggcggcggaccataca

SEQ ID NO: 8601 - DNA, 1400 bp, unidentified
  source 1..1400: mol_type = unassigned DNA; note = element_d7b7329
  misc_feature 1: note = core
  misc_feature 2..229: note = LE
  misc_feature 230..1387: note = CDS
  misc_feature 1388..1400: note = RE
  misc_feature 14..241: note = bridgeRNA
ctacttagagacttggcgcaggatcggtgtctggccagactcggtccaggtgcccggcgggacgctcccacattgcggctgcccgccggtgtcattggcgtggctctctcatggcctgcggtctcgccgggcaccgtgcaaggagaggctcgaaaggggtttgcccagctcgaagtagcagtgccctccttgccctgacatggccaggtgagtcaaggagggtcacagcatgggcgtgatcatcgggatggacccgcacaagcgctcggccaccatcgagatcgtggatgagaaggccgcggtgctggcggcgggcaggttcggcacggacaaggccggatatgcccagatgcttgcggcgggacggaagttcagtgaccggatctgggcagttgagggctgtaatggaatcggcaagcacatcgctcaccggctggtgcacgacggcgagaccgtggttgatgtgccgccgaagctgtccgcgcaggtccgggtgttcgcgaccggcaacggccgcaagaccgacccggtcgatgcgcactcggtggccatggtcgcccttcgcgccgcgggcctggtccatgtcgaggtcgatgatgacctggtcgtgatgggaatgctcgctgaccggcgcgacgagctgggccgcgcccgcacccaggccatcaaccggctgcaccggctgctgctggagctgttccccggcggtgccaagcaattcctgtccgcgcagcaggcccgcgcgatgctcgccacgatccggccccgcgacctgcccggcaagacccgccgccggctcgcggccgagctgatcagcgagctcgaggccaccgacaagaagatcaaggccataaagaaggaactggctgcgctggtcaccgcccgcggatcaaccttgatggacctgcatggcatcggccctgccagcgccgcccggctgctggccgacgtcggtgatattcaccggttcgccagccgggacaagttcgcgtcctggaacggcaccgcgccactggacgcctcctccggcaaccaggagcgtcaccggctatcgcgggccgggaaccggcggatcaaccgcacgctgcacatcatggccatcgtccagctacgcaatcagacccccgggcgggcctactacgacggccgcaaagccggcgggatgccctcgatgatggccatgcgcgccctcaagcggcgcctgtccaacgtcgtgttcgcccgcatgctcgctgatcagaaccagcgcgaagcgggcccgggcgggcaatcggggacgactactgactccagcgtgaccgacctgaccccggacatcggctcttcggacaagccacatcccggacccacctgccagactacagccacgctccggaccgtcccttgacataaaggggtgc

SEQ ID NO: 8602 - DNA, 1654 bp, unidentified
  source 1..1654: mol_type = unassigned DNA; note = element_d7b79e9
  misc_feature 1: note = core
  misc_feature 2..269: note = LE
  misc_feature 270..1520: note = CDS
  misc_feature 1521..1654: note = RE
  misc_feature 13..289: note = bridgeRNA
cctgttactatatatttgccccttgatttatggcagccagccataggcatgggacatctcgttgcctaaactgctagaatagtgaggtaatggtctgaccttcacctccaagggcttgaacgtccgtatgaaagtcagtcagccatcctcctattcgcagtgttcgatttgtgcaggtagagccggagcgttcgcgtcagcaaacagatagaatcggcaatgggtaagatggcatttgtccattgcaaattctaaacgggagtgatttcatgaacgcagcaggtattgatgtttccagcagaaagagtacagtagctgtactccgtccctttggtgaagtcgtccatgtgccgttcgatgttgcccacaacacggaaggactggctttccttgctgaacagttgaaggaacttgacggcgaaacccgtgtcgtgatggaacacacaggacgctactacgagccgattgctaaggcgttgcacgaggccggcctgtatgtcagcgcagtcaatccactgctcattaaggagtatggcggaaattctctgcgaagagtaaaaaccgacaaagcggatgccataaagatcgctcgatatgcccttgacaactggacagatctgcgagactatacccctatggatacaattcgctatgatttgagaaccttgaaccgccagtttcagcttgcctccaaacagcgaacagtctgctccaacaatttgattgctcttttggagcaatcctttcctggcattcgtaagtgctttgacagccctgtacgaaacgatgggacgcaaaaatgggtggacttcgctcataccttctggcatgtggactgtgtgcggaagcagagcctcaacgccttctctgaacgataccggaaatggtgtaagcgacacggctatttcttcaagcaggacaatgcagaagaggtgtatactctttccaaaaacgcccttgtgctggttcccaaatccgaggtaaccaaggtgctcgtacaggaagcggcaaaccaactcaccagcatctcacgctctgtggaaacctaccgtgccgagatggagcggcttgcatccatgctgccggaatacccagtggttatggagatgtatggcgttgggaaatcctctgggccgcagctcatggcagagattggcgatgtgcgccgttttgaacggaaacaggcgcttgtcgcttttgccgggattgatcccatgccgaatcagtccggtgaaaggaatgtgcgaagcaataaatcctcgaagcgcggctcaccgtatctacgcaagacgctgttcaatgtgatgagcatttacctcaaatgcgctcccgctgacgagccggtgtaccaatttctcgaccaaaagcgctctgagggtaagccgttctatgtctacatgaccgcagcatccaacaagttcctgcgccgctattacgcaaagataagggactatctcgcaacattggaaaatctgccgccggtggacatggattctaccgggctgcaaggaagcgactgacgctatccgccatacactttctaagccagcactccgtggtgacttttttgtgttgcccttttgacctacctactactacctacaaatttttcttttctcaagtcctgtttgagacttgactttttatttgcagg

SEQ ID NO: 8603 - DNA, 1307 bp, unidentified
  source 1..1307: mol_type = unassigned DNA; note = element_d7c3bf5
  misc_feature 1..2: note = core
  misc_feature 3..189: note = LE
  misc_feature 190..1152: note = CDS
  misc_feature 1153..1307: note = RE
  misc_feature 32..202: note = bridgeRNA
cttgtgtctacaaaatctgccagaatgtgcgaacgggcggttctcagaaaccgcccgttgctggatctgagcccgttcgtgctcgaaggcccgagagcctgtcgggaagcgagggacagacccggtgtcttccttaaacccgaacagttgcatgggctttgagcccggaccgagcaaggaagggagtggatgatggcacaaaatgatcgcgttgtcgtcggcatcgatgtcgccaagaacaagatggatgcgtgcattcgcgcgacctcgcaacgacggacgtttgaaagcagcgcgcagggacggcggcagttgatttcctggctgcgcaagcacaaggcgaccacggcggtgatggaggcttccggcggctacgagcgggactgggccaaggtgctgcgcgaggccgggcttgaggtgcggatcgtcgatccgaagcgggtgcgcagcttcgcccgctcggccgggcggctcgctaagaacgatgcgatcgatgcggagatgatcgcctggtttgccgagacattcggcgaagccccggcccaggcctatgatgcggaccgcgagcagctgctgtatatcgtaaatgcacgtcaggctttggttgacgtccagaccgagttgcaaaaccggaacgagcattcgctgcccgacgtggtgcagaaagtgcaagcacggctgttgaagcgaatcgccctcgaactggccaagctcgaagcggcgatcgcagccatgatcagcgcgaccgcgcattttgccgaactcgccgagatcatcgagagtgtgccggggcttggcaagggaacctctgcgggcctgatcgcggcgatgccggaactgggccaggtcagcaacaaggttgccgccgccctgctgggtgtggccccttacgacgatgatagcggcaagcggcgaggcgagcgccagatcaagggcggacggcgcaaggtccgcaacctcttctacatggcctgtcttggcgctgcgacactgcacaatcctgtgctgaaggccttctatcgtcggctaattgccaagggcaaagagaagaaggttgccctggtcgcctgcatgcgcaagctgatcgtcattctcaacatcatgatcggccgcggcgagaaatgggacgccagtcgctatccggtgggctaacgagcgctgctctggcgctcggactccggccgagcgcctgcagagccaaccagaccggtgagcgggcggggtcaaggccgccagccgccggcggcggtggcgcgcagcgccagccttgagcccgggccgatcactggtctaactcaacacagttg

SEQ ID NO: 8604 - DNA, 1380 bp, unidentified
  source 1..1380: mol_type = unassigned DNA; note = element_d7c5001
  misc_feature 1..2: note = core
  misc_feature 3..87: note = LE
  misc_feature 88..1119: note = CDS
  misc_feature 1120..1380: note = RE
  misc_feature 1150..1368: note = bridgeRNA
tgatgctgtggacggctcctccgccggcacgagagtgccaaagattgggggcaccgaggaggctcccacgattcggaggagcaaaccatgcatacggtcacgacaattggtctcgatattgccaagtcagtgttccaggttcactgcgttgatgtcacgggtcatgtagttatacgccgccaattgaagcgtcgctacgtcctggcgttctttgagaagctgccgccctgcctggtcggcatcgaggcctgtgcttcgtcacaccattggtcgcgcgaactgcaggcgctcggccaccacgtgcggctgatgccgccggcctacgtgaagccctatgtcaagcgacagaagaacgatatggccgacgctgaggcgatttgcgaagcagtcacaagggctaatatgcggttcgtgccaaccaagacgcccgaacaacaaagcgggctggtgttgcatcgcacgcgccatctgttcatccgccagcagacctcagtgatcaatgcgatccgcgctcaccttgccgagtttggagtcaccgcaccggtcggacgcaaaggcatcgaggaactgctgcgggtcatcgccgatccgaacgataaacgggtgcccgatattgtgcgtgcatgccttgccgcgctgggcagccaattgctcagcctcaaaaagcagatcttagattttgatcgaatgatcctggcatggcaccgctccgatcaaacgagcaagcgcctcaattgcattccaggcgtcggtccgctgctagccaccgcgcttgtcgcgagcgtcgccgatcctaaagccttccgatctggtcgcaacttctcggcctggattgggctggtacccaaacagcattcgagcggggggcggaacaggctcggcagtatcagcaaacagggggaccgttatctgcgcagcttgttcgtggccggcgcattcgccgttatccgttatgccaagctccatggcaccaagtatcgcccttggctcgcagcgttgttggcaagacggccgaccaaagtcgctgccatcgcgctggccaacaagcttgcgcgaatggcctgggcgatgatggctaggggcgagcgatacaattatccagccgcgctgagggtctgacgagatcgcgtcgagtaccatggcgtgatgtgaaggttgggagggcgaacagcacgtaatgcagagccggtcgatccggcgatcaggacaacccacatgggccacagcattctcgaatgcgaggttttgaccgggacctgatccgcggagagcattatggccagcggtcatgtgaaccgcactcaaaggccgaacacatggctgcaccgaccaagcctgcaacgtgaagattctccttgccaactcggagccgtccacaca

SEQ ID NO: 8605 - DNA, 1437 bp, unidentified
  source 1..1437: mol_type = unassigned DNA; note = element_d7ca775
  misc_feature 1: note = core
  misc_feature 2..128: note = LE
  misc_feature 129..1154: note = CDS
  misc_feature 1155..1437: note = RE
  misc_feature 1196..1437: note = bridgeRNA
gaattgaaatgaacgcgtcccacccgaaaccgtgagagcagaggaagtgggtggatcctcacgggccaacggcatcgaagtgcccaagtggaaaatgcacgcatttcccggcaaccggaggatccacgatgaacagtatggcagtgggcgtagatatcgccaagaacgtgttccaggtgcattacgtcgctcagggcagcggagagatcgtcaacaagccgatcaagcgggcgaagtttctggagcacttcgcgaaccgtgcgcggtgcctgattgggatggaggcgtgcggcggcgcacaccactgggcgcgggaactgacgcggctgggtcatgaggtcaggctgatgccagcggagttcgtgaaggcattcaacatccgcaacaagaatgatgcggcggacgcgcgggcgatctggctggcggtgcagcagccgtgcaagccggtggcgatgaagacggaaatgcagcaggcgatgctggcgctgcaccggatgcgcgagcagttggtgaagttccgcacgatgcagagcaacggactgcgcgggttactgacggaatacggcgaggtgatgagccgggggcgagcgaaactggacaaggccatcccggcggcacttgaccggctcgcggagcgcctgccggcggcgctgatcgatacgttgcgggagcagtggagcgggagcgggttggcgaggctggacgggcagatcgccgagatcgaacgccggatgcgtgaatggaagaaggaggatgaagcggttgcggcgatcagcgagattcccggcgtggggctgctgacggcaacagcggcggtggcgatgatgggcgatccgaaggcattcagttcggggcgcgagtttgcggcgtgggccggcctggtaccgaagcagaccggctcgggcggcaaggtgaacctgcacgggatcagccggcgcggcgacacctatctgcgaacactgctgattcacggcgcgcgaagcgtgttgagtcatgcgaaggagcccggcccgtgggtcgagcagatgaagaaacggcggccagcgaatggggtgatcgtggcgctggccaacaagatggcgcggacgatctgggcggtgctcgctcatgaccggccgtaccggaaggactacgtgagcgtgaagccagcttgagtggctcacgcaagagtagaaagatcaacgcttaacacagggtgaacgtcgaaaggttgcgcagcaatcgagtgtgatgacaaatcaggtaggaccggggctcgctaaacctgaatggcttgaagagctccgaaagctcgccaggagaatgaggtgcgagtcagcgtatttcataggggcccgcagcggcaggaccggctgcaacaaggccggatatagagctgcagcccatcctgtccgttaaaacacacgaaaactgttgcaaacgggacgcgttcatata

SEQ ID NO: 8606 - DNA, 1170 bp, unidentified
  source 1..1170: mol_type = unassigned DNA; note = element_d7dc669
  misc_feature 1..2: note = core
  misc_feature 3..203: note = LE
  misc_feature 204..1025: note = CDS
  misc_feature 1026..1170: note = RE
  misc_feature 3..179: note = bridgeRNA
cttgtatgtttagacttgaaggggtgggcgggactaaaagctcgattccgactctagccagtacggaccgtgggagacttctcgttccgccctttctacctaaagcgccgataaggaattcatcggtaaaaccgacgatagaggcaagccagcgcaaaggtagaccccgacaagcacctaaaccctagctccgaggattcgtcatgacaatccttaactcaccaacggttattggtatcgatgtagcgaaggccgaaatcgtcgtttaccgcgaagacctgaaaatcactcaagccatcgccaaccaccgcgaagctcttggccggtggctcaaaacgctaccagcccaaagctcgattgcgctggaagccaccagcttttatcacctggacacagctgagctggcccatggaatggggtttcatgtttacgttgtggatccttatcgggtggcccattaccgtgaaagtattgggctgcgggctaaaactgatccttgtgatgcgcgtttgctggctcggtatctaacgaacgagcaagcaaggctgcgtatctggagcccacctccagaagcctacaaagtgttaaaaaacctgcttagaaaacgtgcggcactcatcaaggcccgcgtcagtatcgtgctgagtttttcgaacgaaccgtgtctgaaggacatcttggcccggcagttggaggtcttcaaagagtccgatcaggccattcagaaactaatgcgtgaggccagccaagcggcagggatcactgaaaacatcaaccgctgcaaagccatcgaagggattggtgaactgacggccattggcttggcgaccgcattcatgcgcggtcactttgtcagtggcgatgcattcattgctttcttggggatggatttgcgtccaaaagattcaggggaagaagcacagtcctcgtcacttgagcaaaaaaggggacggggagctacgacgcctggcgcacaacgccgcgatggcggcctgtcggtctcctgcctggaaaccttactatgaggccttcttggcacgaggcctggccagaactcaggccttggttatcctcgcccgcaagttgtgtcgggtagcattcgccctgatgaaaaatcagagcgaataccaaccaaattcacggttgcagggttcccctgcaacatagaat

SEQ ID NO: 8607 - DNA, 1607 bp, unidentified
  source 1..1607: mol_type = unassigned DNA; note = element_d7dfead
  misc_feature 1..3: note = core
  misc_feature 4..272: note = LE
  misc_feature 273..1442: note = CDS
  misc_feature 1443..1607: note = RE
  misc_feature 13..253: note = bridgeRNA
cttatataatgtatttaggttgttagaggtaacctataatcctttttcaactaaatattattcagttttgctgtataatattgttagatagagtgtactcgtttcctccttgagatttaatctcgtacttgaaagagtgagtcctctaatcttttaactgtttacgaataagttagatgttgaccctttcagggtacttcggatttaccataaggcagtaacgttattagattttgaggtgtctatctaaaatatttttttcgaggtatcttatgttttatttaggtattgatattggtaaaaatactcatgtagcttcattaattgatgataagaaaaaagttattttcaaggctttttctttctctaactctgttgatggtgctgaaagtttaatctgtaaattagaacctttcaaaagtgaacttgaagtcggtatggaagctaccggtcattattggataagtctatactcataccttagcgaaaagaacttcactgttcatgttatcaacccaatccaaactgatggttggcgacaaggtatagaaatcagaaaaagaaaaacagatattatcgattctcttttaattgcagatcttcttcgatacggtgattttgttgagacatctctttctaatgaagactatttttctttaagaaatctttctagattcaggtcttatctaatttcttcaattggtgatcttaagagaaaaaccattgctcttttagatcaagttttccctgaatacgcttcttcttttagtaatatttttggaaagacttcaaaacaaattctagagaacttttcatctccatctgattttgaagatattagttctgaagatttacagtcttttttagacaatgttactataaaaaaatttgctaccagaaaacttgaagaactctctaagaaagcttctacatcttttggtgttaatttctgcatagattcatttagttttcaaatcaaaatgcttattcaacaaatttcttttattcaaaatcaggtttcagatgtcgaaaatgaaattgagattttacttgaaaaactgaattctccaattacaactattccaggtattggttctgttaatgcagctacaatattaggtgagattggagatattaaaagattttctaatccttcaaaacttgttgcttacgcaggtcttgatgctagtatttctcagtctggagagtttgaatccacttctaatcatatgactaaaagaggttctccttatttaagacgtgctttgtttcaatctgctcttagagccgaattttgtgaccctgttttttctgcttattatcaaaagaaaattgcagaaggaaagcatcatctggttgcaacgaatgctgttgctagaaaactttgtcatactatttttgctgttttaactaaaaatgaaccttatcaagtccaaagttagttttgcttgactgtaaactaatttttgaaaagcaaaaactttactaaccctattttaaaaatcttaaactctagggtctttttttcatgcttatttttattcagtttttttcaatatcaatccttatatttttttcattttacctcttgacttttaatagttagt

SEQ ID NO: 8608 - DNA, 1363 bp, unidentified
  source 1..1363: mol_type = unassigned DNA; note = element_d7e62a9
  misc_feature 1..3: note = core
  misc_feature 4..72: note = LE
  misc_feature 73..1110: note = CDS
  misc_feature 1111..1363: note = RE
  misc_feature 1097..1351: note = bridgeRNA
tgatggcgaagacggccccgctcctgacaagggaccgtatgatggtcctgctttgcacaaggagcttttccaatgaccccaatgaccccaatgaccccaatgaccgtgggcctcgatctggccaaaaatgtgttccatgtccatgtcgccgatgcgtccggcaggatgctcgaaagtaagaagctcgtgcgtcgccatgtattggatttcttcatggctttgccgtcctgcttggtgggcctcgaggcttgtgcgactgcccattattgggctcgccagttgcgggatctaggtcacgacgtccgtctcattcctccgggctacgtcaagcccttcgtccgacgcggcgcgaagaacgacgccactgatgccgctgcgatctgtgaagccgtcacgcgccccggtatgcgcttcgtcccgatcaaatcgcgccagggccaggcttttctgatgctgcacagagcccgcgcccttttaattcggcaaaggacgatggccgcctgcgcgttccgggcgcacctggccgagtatggcatcgttgtcgcgcaggggcggcaccgggtcgaagtcctcaccgaacagctcgatgagttgcgagaggatctgccggaagatgcctgcttcgccttggatgctctcgtcgagcagttggacgcgttgaaccggcagatcgcggttatcgatgcccgcttggctgagaggcacaagaccgacgcgatcttccgcttgcttgcgaccatcccagggatcgggccgatcactgcaacggcctttacagcgactatcccggacccgtccgcgtttcgcttgggtcgcgaatttgctgcctggctcgggctgagcccacgccaaaactcgtccggcggcaagcacaggcttggcggcatcaccaagaaaggcgaccggtatcttcgccatctgctggtcttgggagcgcgaaccgtcgtgcgctatcccaaggcccgttcgcgcgtcgatggtccgtggatcgaggggctgctggcgcggcgtcggcccatggtcgttgccgtggcagtcgctaacaagttagcgaggacgatctgggccatgctctctaccggtgaggtcttccgacccgcgcaactgtgagagccatgaacgaagcggtgtagagatggcacaagtgcaatgacagcgtgatgggaatcggcagagctgaggatcgagcaagcccggagagctttaagcgcgccacagcgcgtcccgttgatgaggcctcgatccgcggacaccatcagggccagcagtcatgtacgggctgcgcaaacaggccgaatacatgaacgcacccgccgattaagatcacgatcagaacacttgcgcctgcggggccgtctataca

SEQ ID NO: 8609 - DNA, 1567 bp, unidentified
  source 1..1567: mol_type = unassigned DNA; note = element_d7e7f4f
  misc_feature 1..2: note = core
  misc_feature 3..269: note = LE
  misc_feature 270..1436: note = CDS
  misc_feature 1437..1567: note = RE
  misc_feature 3..245: note = bridgeRNA
cttgtatgatgttattagaagcaaaaacaacatacttcctttcttttttttgtttcgtggtttaatacattcagatactgtgacttttgatttttttctgtagctttgactactcaacaggagtgtattgccatctcttttatctgaattgtttattagctggatgttgccagagcgtttgctcagagtacttatttcaatcaagtctacgatgataattgttggtggataccacggtatcagactttatgaaagggaggtacaacctcatgatttacgtcggcattgatattgccaaacttaaccatttcgccgctgcgatttcttccgacggcgagatactcattgagccgttcaaattcacaaatgactatgatggcttctatctgctgctttctaaactggcaccacttgaccagaacagcatcatcataggtcttgagtcaacggcacactatggtgacaaccttgttcgttttcttatcggcaaggactttaaagtgtgtgttctaaacccgattcagacttcttctatgcgtaaaaataatgtacgcaagactaagactgataaagtcgacacgtttgttattgctaaaacccttatgatgcaggactccttacggttcttgaccctggatgatctggattatattgaactcaaagagctcggcagattccgtcagaaactggtgaagcagcgtacccgtttaaaaatacagctgacttcttatgtggatcaggttttccctgaactacagtatttcttcaaatctggactgcatcagaattctgtctatgccctccttaaagaggctccgacaccaactgccattgcttctgtgcatatgacccatcttgctcaccttctcgaagttgcttcccacggccatttcggtaaggagaaagccagagaattaagagttctcgcacagaaatctgtcggggtcaacgacagttctttatctattcagataactcacaccattgaacagattgagttactggatagtcaattgtttcacacagagcttgaaatggcaaatcttgtcacctgcctgcactctgtgattatgaccattcccggaattggtttcatcaatggcgggatgatccttggtgagattggtgatatacaccgtttctcagaaccaaagaaactgcttgcgttcgccggactggatccatcggttcatcagtctggtaatttccaggcacagagaaccagaatgtccaagcgaggttcaaggatattacgctatgcccttataaatgcagctcacaatgttgttaaaaacaacgctactttcaaggcttattatgacgccaagaaagctgaaggccgaacccactacaatacccttggacattgtgccggcaagcttgtcagagtcatctggaagatgctcactgacgaagtagaatttaacctcgaataagaggtctgcataccataatcaatagattttgaaaaagggcttttagggagctttgttaaagttacccttttttacacgaaacaaaaaaactgaatttctggctaatttatacttgacttttcatagctggt

SEQ ID NO: 8610 - DNA, 1428 bp, unidentified
  source 1..1428: mol_type = unassigned DNA; note = element_d7ebbbe
  misc_feature 1: note = core
  misc_feature 2..40: note = LE
  misc_feature 41..1111: note = CDS
  misc_feature 1112..1428: note = RE
  misc_feature 1204..1422: note = bridgeRNA
taatgagatggtccgccgcccggatcagccctgaagtgggatgatttggggccacacggaggatcatcgcatggatgctaccactatcgcttcgattggcatcgacctcggcaagaccacgtttcacctcgtcgctctcgattgtcacgcaaaagttatcatccgcaagaagttctcgcgcacgcaactgctggcttacaccgcgaatctgccctggtcgttgatcggcatggaggcctgttctggctcgcatttccttgccgccaagctccgcgcccaaggtcatgaagtaaagctcatcccggcgcagttcgtgaaaccctatcgcaagtcgaataagaacgatttcatcgatgccgaagccatcgccgaagcggttacgcgccacaacatgcgcttcgtgcccatcaagactgacgatcagctcgatctgcaggcgctacatcgtgtgcgcgaacgtctcgtgcgtcggcgcacagctctgatcaaccagatccgcgggttcctgcttgagcgcggcctggtgttcgcccagcggccggccaacctgcgtcgtcggttgccatttgtgctcgaagatgccgaagcccatctcacgccactgtttcgacgcttactcgccgacctctggcaggagtggcagcacgtgcaagccgacattgccgtcctcgacgaagcgatggaacagatctgcagcagcgatgagaactgccgtcgtttacgcgagatccccggagtcggaccgctcgtggccactgccatcgtcgccgcgatcggcaacggcgctgccttcggcaacggacgcgagttcgctgcctggctcggcctcgtgccacgacagtactcgacgggaggccgaacgcaactgttcagcatcagcaaacgcgggaactcgtatctgcgacgcatgttcatccacggcgctcgcgccgtgctctggcgagtgaagtacgacatcggcgtgctgcgagagtggacgacccagttgcagtcgcgagccgcaaagaatgttgtagctgtggcgctggccaacaagctggcacgcatcgcctgggctgtgctcagcagcggtgaacattatcggctgaagcccgctgtgacggcagcctaaaccagcggtggaaaagatcgctgcgcttggaaaacgctgcgcgtttcccactttcccaccgcacgacggctactggaaacacaatttcttttcagggtctgcaagaagaacaacggaatgaaacaacagtcaaacggcgtgccggaaaacctgatgttggaaatggttgagaaaaccgtcggatttatcaggaccggcacgcgcgcatcatcattatgcgcccggagccaccgctccacctagaggccgaatacatttgcgcagactacgtttcgttccagcatgttctcgcttgcaaacggacggcggaccataca

SEQ ID NO: 8611 - DNA, 1790 bp, unidentified
  source 1..1790: mol_type = unassigned DNA; note = element_d7ebceb
  misc_feature 1..2: note = core
  misc_feature 3..73: note = LE
  misc_feature 74..1108: note = CDS
  misc_feature 1109..1790: note = RE
  misc_feature 1566..1777: note = bridgeRNA
tgttggggtggacggccccacggcatcgcgtgccagacttgggtttgttcaccaaccaagaccggagccgtccatgatccagtataaacgcatagccatcgacacgtccaaggcggtgttcacgcttcacggcgtcgatgaaagcggccgcgccgtgcttcgcaccaacctgcgccgtgcgcagatagcgccgttctttaagaagctgccacccaccgggatcgccatggaagcctgtggcggcgcccaccactggggccgtgagctgaccgcgcttggccacgaggtgcgcctgatcccaccccagtatgtgaagcccttcgtcaggcggggcaagaacggccgcaacgacgccgaagcgatctgtgaagcggcggggcgccctggcattcattgcgtgccggtgaagtcagccgtgcaacaggctcaggggatggtgttgaaaatacgcgccaccctggtggatcaacggaccgtactggtcaacacgctacgcggccacgccgccgagttcggcgtgatcgccgccaaggggatcagccaggttggcccgttgctcccggctattgaacaggagaccgccatcccatccgaggcccgggacatgctggatctgcccggtgaggagatcgcgcatctcgacatccggttgaagacgctcgatgcccgcctggcggcggcgcataaggccaacccggtgagccagcgtctggccgccatccccggcatcggtccggtcaccgcgctgacgctggcggcggaggccggcccggcggcgttcgcatccggccgtcacctcgcggcgtgggctggtctgaccccgaaggagcattcgacgggcgggaagcagcggctggggggtatcagccgcgctggcaatgaacggttgcgccagctgctggtgctgggggccaccaccgtgatcaaggtggccacgcggccgggcaacacgctcgccaccgcctggctgttggctctgttgcagcgcaagccacgcaaactcgccgctgtcgcgctcgccaacaagatggcgcggacggtctgggcgatgatgacaagcggcgcggtgtaccggcgccagcccgccagtgccgcggtgtccgcgtgagcggctcgatccgcttcgcggctcaagcgtcacgtaacgtttgggagtggaaccatgccccgtccaacgatcggtgacagacccatgaccggcgctgagcggcaggccaactaccgggccgcgcgcgcgggcggcacaccggtgatccgcacgcgccgtccggcggatcaccgcggccgcgcccgccgctggcacgacgctgtcgcggaactgatggtcttgcagagtgagtacgtgtcctggctggaggcgctgccggaaagcctgcaaggcagcgccacggctgaggcattgcgggtgatttgcgatctggacctcggcgaaatccaggcgatcgaaccgccacgagggttcgggcgtgattaaacagcggcatggcccatacggcatgggccaaggtaacgggcgggaaaacacggccggcagggtccggccgctgtcccaccgcccgtcgatgccaggatgtgagagctgaatgagatgacgatcggtcgaaccgtcgatccagagaacccgttccggtcaatggctttcgaagccgccggcttgcttgggactggatcgcggaacccatctgggccagcggccatgacgccgcgccaacaggccggacacatgaccgcaatcgacatgatcgccggaagccttgttttgctcttgcattcgaagggccgtccacaca

SEQ ID NO: 8612 - DNA, 1376 bp, unidentified
  source 1..1376: mol_type = unassigned DNA; note = element_d7fe734
  misc_feature 1..2: note = core
  misc_feature 3..89: note = LE
  misc_feature 90..1121: note = CDS
  misc_feature 1122..1376: note = RE
  misc_feature 1106..1364: note = bridgeRNA
tgatggagtggacgctccctgctcaccggcatcaaagtgccaaagggtggtcgtggtgaagatcgccacaaggagagggagcgtccgccatgcagattaccacagttggtctggatctggccaagcacatcttccaggtgcacgccgttgatgcgactggccaagtcgtcgtccgcaagcggctgcgccgaggggaggtgctgccgttctttgctggtctgagcccgtgcctgatcggtatggaggcgtgcgcgaccgcccaccactgggcccgtgagttgatcaagctgggccatatggtcaagctgatgccgccggcttacgtcaaagcctatgtcaaacgcggcaagaccgatgcagccgatgcggaagcgatctgcgaggccgtggcccgtccgagcatgcgcttcgtgccggtcaaatcggccgagcagcagagcgtgctcatgctccatcgcgtgcgggctctgctgatccgccagcgcacgatgctggtcaatgctctgcgcggacacctggccgagttcggcatcatcgtcgcgcaggggatcagccgcatccgcgagttgatcgcaatcctcacagacgagagtgccgatgccgtgctgccgccgctggcccgccgggctctggcgcctcttgttgatcaactgctcgatctgcagccgcggatccgggcgcttgaggccgaactcctggcttggcatcggcagagccaggagagccgcaggctggaaacgatcccaggtgtcggcttcatcaccgccacagcaatcgcagcgactgtgacagatccctcgcagttccgctccggccgggagtttgccgcttggctgggactgaccccacggccgaattcgtctggcggcaaggagcggttggggcggatctcgaagatgggcgatggctacttgcgaacgctgctggtggtcggcgccacggcggtgatccgttatgctcacaaaaagactgcggcaggcagtgcctggatcgcagagctgctcgcgaggaaaccagctcggctggtctcggtggctctggctaacaagacagcccggatcgcctgggcgcttttggccagaggagaggtttaccaagctccggcaccagctgctgtctgagcaccaccgctggttagggttcttagttcgggaagggtgatgaatgacgtgatgcaaaccggtcgagccgggatcaggaaaacccgcgacgttgtcagagcctcgagctcgataatgtgattgggacctgattggcggactttcatcagggccagtggtcaaatgaaccgcaccaacaggtcgtacatatgaccgcacccgaccattttgcagacacgttcaacaaaacccttgccggcagggagcgtccacata

SEQ ID NO: 8613 - DNA, 1140 bp, unidentified
  source 1..1140: mol_type = unassigned DNA; note = element_d8032d5
  misc_feature 1..3: note = core
  misc_feature 4..261: note = LE
  misc_feature 262..1026: note = CDS
  misc_feature 1027..1140: note = RE
  misc_feature 1..250: note = bridgeRNA
cccattaccatgtttggtaggctccgatggtcggggccgggtcgccggttcggtatgactttcctgccctgtcgttgatgatccgggggtgttgtcgccgggaacggggacgcccgatgaccgctgataggaaccaggccggctacacggacgcttcaggggcgcatggcgcaggtctcgtcgtaatgtgggtgcggtgccggacgtccggactcctccgagtccacggcggccggaaagaccttcatgacgggaggaacgatgatgaccccggacgacatcgacgtgtgggccggcctggacgtgggcaagagcgcgcaccacgcgcacgccctcgaccgggacggcgccaccctgtacgacaagccggtgagacaggacgagaaggccatccgctcgatgctggaacacctctccaggcgcggccgcgtattgctggtcgtggaccagcccaacaccatcggctccctgcccctgacggtggcgcgggacatggggatcgcggtcgcctacctgcccggcaccggcatggccgagaccatcatcccctccatcgcccacgacatcaaggccatcaaggaccggcggcgcgaggtcgggcgccaggtcgggaagctcctggaggaccaccctcttctcacggtcccggcgtcgatgcccgggataggcgtcaggaccgcaagtaacatcctgctcggcatcggcggcgacatcgccaacttcaaaagcgcggcccacctggccgcctacgccggcatcgcaccggtcaccggccagtccggcaccagcatcaagggcgagagacctgcaaggggcggcaacaaacgactcaagaacgcactatggcagtcctcgttcgtcgccagcaccaaacatcctccctcgatcgcctactacaaacgcaaacgcgaacaaggcaaacaccacaacgccgccatcatctgcctcgcccgacgccgatgcgacgtgatctacagcatgctcaaaaacggcgccctctaccaggaaccagccctcgcctcctgaaccgggccacacgggaaaggacgccggacgccaccggcagggcgaagcacgcccacgacaaccaaccggaaaccaaaacgccagccctacagagttgacaaaaacataggaaca

SEQ ID NO: 8614 - DNA, 1445 bp, unidentified
  source 1..1445: mol_type = unassigned DNA; note = element_d808722
  misc_feature 1: note = core
  misc_feature 2..232: note = LE
  misc_feature 233..1426: note = CDS
  misc_feature 1427..1445: note = RE
  misc_feature 8..233: note = bridgeRNA
cgttaccgtttaggtggtcctgaaccgcggggccacggtcgccaagttcggtatgacttctttcccctgtcactgtcatgatccggggggtggtgtcgccgagcctggtggcgtcgatggaccgctgatagggacagggccaccgcagtggcggtaggtctcctcgtaacgtgggtgtcgggtatcgacgccggatcggcgaccggccggaccggacgaaggacactgctacatgaacacgagttacgccgtgttttgcggcatcgacgtgggcaaaggcgaacaccacgccgtcgggttggacgcctccggaactcgcctgttcgacaaggcgctacggaacgacgaaacccgactccgggcggtgttcgacgggctcgccgtgagcgggcccctgctggtgatcgtcgatcaaccgaacaccatcggcgcactgccggtcaccgtggcccgggcctgcgggcacgacgtcgcgtacctgcccgggctgtcgatgcgccgaatcgctgacctgtaccccgggcaggccaagaccgatgcgcgggacgcgttcatcatcgccgataccgcccgaaccatgccccacacactgcgccgggtcgacaccggcgacgagaccctggccgagctcggtgtgctcgtcggtttcgacgacgacctcgccggcgaggcgacccggaccagcaaccgcatccgcggactactcaccggcatccatccggccctcgaacgggtcctcggaccccgtgtcacccaccccgccgtcctcgagatcctcgcgcgcctcggcgggcctgacgggatccggagagccggcaaacgcaagctgacctccgtcgcggtcaaacatgctccctggatgggtgcacggctggcagacgagattctcgctgcactcgatgcgcagaccgtgaccgtgcccggcagcaaggccgcagaaattgtcctgccgcacctcgctgactccttgaaggaggttctgctgcaacgtaaacgcatctgcgaggacgtggagaggatgcttgatgaccaccctctttcccacgtcctgatctccatgcccggtgtcggggtcaggaccgcagcccggatcctgctcgaggtcggtgacgcttccgcgttcaagtccgccggccacctcgccgcctacgccgggatcgcgccggtgacccacagatccggctcctcgatccgcggcgagcaccccgcccgatcaggaaaccgcaaactcaaacgtgccctgttcctgtccgcgttcgccgccctgcacgacccgactagccgcgcctactacgaccgcaaacgcgccgaaggcaagaaacacaacgccgccctcatctgcctcgcccgacgccgatgcgacgtcctctacgccatgctcaagaacaagaccctctaccaaatcccagccgccgctgcggcttgacaggaaccatagggacacc

SEQ ID NO: 8615 - DNA, 1653 bp, unidentified
  source 1..1653: mol_type = unassigned DNA; note = element_d812913
  misc_feature 1..3: note = core
  misc_feature 4..298: note = LE
  misc_feature 299..1564: note = CDS
  misc_feature 1565..1653: note = RE
taacatcacattcctttcgctgtgctcaaggcacaaaatagaatgaaaaatttttacttaagctaccctctgtagtaaaatataagtgggtatgcaggtatactacagagcacggggaggtgagtgtgacaaccaaactttgagttgtccgtatattaacatgtgccgttcgctctctcaagtacaaataagtgtgccatcgagcacgaacactaatctttgttttaaacaaagctcttgtttatattgagtggacagtcaatgcctgcatccctaaatatttacaagggtgaggttgatgcttaagattgtctatcccatctgttgtggaattgatgtccacaaaaagtttgtaattgccactattgccaccaccaatgataaaaatgttacttcctatcaaacacgtcgttttaatactttcaaaaatgatctaatcgctctcaacaactggttagtagaaaacaagtgcaaagatgtctgtatggaatccaccggaaagtactggattcctgtttttaacgtgctcgaggatttctgcactattacccttgcaaacccgagatacgttaaaaatatcccaggtaagaaaaccgataagcgagattcaatttggcttgctgacttacacaagcatgcattggtaaaaggtagctttatcccatctaagcctatacgggagttgcgggatttaattcggtacaagtctaaacttaccaacgtctcttccagtgagaaaaaccgggtgcaaaattcgcttacagtttcaaacatcatgcttgccaatgttgtttccgacaccttcggcaagtctgcttcctcaattattaagcacatgatagagaatcctgatatcatcgactttgattattcttcaatgctccacaaaagtctgaagaaaaaatcggatgaaattgaacaagccgttgctggtaaattctctaaggagcaagcggcaaaattgtctgtatgctatgagcactataacagcgttgaaaaatgcatcgaaatactggaagctacaatactcgagctatctttacctttcaaagaacaaattgacatcatcgctactttacctggtattaagcaggcatcggctacagctattctttcagaaatcggaaccgatatgtccgtcttcacctcggacaagcatctttgttcctgggctggccttacaccccagagtaatgaaagtgccggtaagaagaaaagtgtccgtattagccgcgccggtgtctacattaaacctttacttgtccagtgtgctaatgccgctgtaaaggacaagtcctgcactgttttcaaaaaccgctatgaagcgattaaaaaacgtcgtggtcacaaacgtgctattattgctaccgcaagaatgattttaacctgcatctatcacatgctctctaaaaatgagccattcaatccattgctgtatgatgacaatgcgaaatctaagaagcgtaatcagcaggattctctaagtattgagcaggccatcgcatttttgcaagccaatgggtatactgtgaatatttctgatctagtggcaataacaaactaatagtgtaattccagtttcatccacagtcctaggtattccttaagggcttgctttgttgcggccttcgcgggtcttttttattttcacac

SEQ ID NO: 8616 - DNA, 1391 bp, unidentified
  source 1..1391: mol_type = unassigned DNA; note = element_d821327
  misc_feature 1..3: note = core
  misc_feature 4..88: note = LE
  misc_feature 89..1117: note = CDS
  misc_feature 1118..1391: note = RE
  misc_feature 1088..1377: note = bridgeRNA
agatggggtggttgccgtcctccccgaacggcatcgcaatgtgccaacgtggtgattgtgaacagccacggaaaagagaggacggcagatgaaggatacagtgattggtgtggatctggcaaagacggccttccagattcatgcgccttccctgacgggcgaattgctatttcgtaagaaggttcgtcgtccacaatttctccagttcatggcgagtcagccactagcgctggttgtaatggaagcgtgtggcagcgcgcattactgggctcgggaactgatgaatgcagggcacgaggtgaagctgattgctccgcaatatgtgcgcccgttcgtcaagcgacagaagaacgatgctgccgacgcggaagcgattgtcattgccgcccgccagccggagatgcgtttcgtagtgcccaagagcgaagatcagcagacacgcgctgttctgttccgctgccgggagcgcctggttcgtcagcgcaccgaactggttaatgccctgcgcggcatgctttacgagttcggcctggttgtccccaaaggcatcgctcatctcaaacgtattgaggaactcgttcgagacgacagcatcgaactgccgacgctcatgcgaaaagaatgtcaggatcttctggcgcagatcgatgagcaatcgatccgtatcgcggaaaagacccgcgccatggtcgggctttcgggagatagtggtgttgcacagcgtctggagacgatgccaggcgtcggaccgttgacagcactggccgtggaagccttcgccccatcgatggagcattttcgcagcggccgcgacttcgcggcatggctcggccttgttccccggcagttttcatccggcggcaaggaacgacttggccgcgtctcgaaggctggccaggccgatattcgacggctgttgattatgggcgctatggcgcctgtgagttgggcaagccgcaagccacccgtgcagggcacgtggatggcgcgaatgcttgtgcgcaagccgcgcatgctggtggcgatcgcgctggccaacaagatggctcgcacgatctgggccatgctgacgaagcaggagaattatcgggatccggtcctgtccgtggtggcatgagatagcctcagtcgcgcgcgaacggaaccggtaagggggtgtgagaaggcgacgacccatatgggcgcatgatcaagccgatccggattggaaaaaccagcagtcttctcggtactgtttaaagtacgccggacagatttggacccgatccgcagatcaccatatcggccagcggcttctgaaagcgccgcgttcaaaggcctgacagaagagcgcattcgatcacacgttcaatgagtcagaaacttcttgcaaaacggacggcaaccacaga

SEQ ID NO: 8617 - DNA, 1523 bp, unidentified
  source 1..1523: mol_type = unassigned DNA; note = element_d8213dc
  misc_feature 1..3: note = core
  misc_feature 4..246: note = LE
  misc_feature 247..1377: note = CDS
  misc_feature 1378..1523: note = RE
  misc_feature 3..220: note = bridgeRNA
cttatattatatttaacgcagttagctactgccaaagcccaagtggtatacttggaataagccactgtggattagttcatttcctccaatcgcttgacgatttccgaaagggtctaaccacagctttttgtttcaattggtaatgagtttgataacgcatagacgttttatctcgtctaaggtaacaaggcaaaaagttcgtggataaccaagtagacttgaaatactatatctggaggtactcccatgctttatgtgggcattgatgtcgctaaaaataaacacgatgttacagccttgaatgttccaggaaaaactgttcttaaaccactcactttttcaaataataaagctggttttgaactcttagatctgtcttttcgacagctcaaccaagactgtctcatcgctcttgaagatactggacattatgcctttaatctactgaacttcctgcatgaacaaggatataaagtttacacctacactcctttgctcatcaaggaatttgccaaatcattatcacttcgcaagactaaaacggataagaaagacgctcatggcatcgctcttaaacttctttctgaccccaatcgtgaacaatttcaacacgataatcggcaagtagaactaaaaatactggctagacatattcatcgtctcaagaaaaaacagtctgattggaaagtacaatacactcgttgtcttgatatcatctttcctgagttggataaaatcgttggaaagcattcagaatatacctaccaactcttgacacgctaccctaatcctcagaaaaggcttgaggcaggatttgataagctgatagaaattaagcgattgaccgcttctaaaattcaggatatcctctcagtcgcacctcgttctatcggaacaacatctcctgctcgtgaattcgaaatcatcgaaatcatcaaacattacaagaggctcattgacaaggcgaaaaaatgtgtcaatgacttgatggctgagttcaactcggtcatcacgacggttactgggattgagaatcgtttaggggcggtcattttagccgagattcgaaatattcatgcctttgataatcctgctcaattacaagctttcgctggactggattcttctatttatcagtcaggtcagattgatttagctggaagaatgatcaaacggggttcccctcatctgcggtgggcactcatacaagctgccaaagcatgcgctcgcttttcacctgcttttaaggcctatcttaagactaagttagaacaaggaaaacattacaatgtagccatcatccaccttgcaaaaaaacttatccgaaccctgttttatatcctaaaaaagagctgccatttgacgaacaaaaagtgatgtaatttctgaaattaacacaggattacctttgaaaaaatggactttttcaatagctttttgccgtgctctaaaatcatcgccaaatcatcaaattgaaataagaaatagtttagataaaactattgacttttcttatagtttgt

SEQ ID NO: 8618 - DNA, 1574 bp, unidentified
  source 1..1574: mol_type = unassigned DNA; note = element_d824e29
  misc_feature 1..2: note = core
  misc_feature 3..247: note = LE
  misc_feature 248..1429: note = CDS
  misc_feature 1430..1574: note = RE
  misc_feature 3..223: note = bridgeRNA
ctcgtataataagttagttgttcaagagcacgtttcatagtattgttcttgtacaaaacatacagacgctgtgggctggtataacctcctaccgcatagacggtttcctaaaggctccagccacagctttttacttgaccggtgattagtcagataccgcttcgacggtttatatataacgaggatccgttggtaaaaagtatgtggtttcccagcgtgctgtttctttttgaaagtggggatggtcttgatttatgttggtattgatgttgccaaggataagcatgactgctgcattcttggcgattctggcacgtgtctgcgggagtctttctccttttcgaacgacaaggaaggtttttcaaagctcattgccgccatttcggctgtttccggaaagagcgcagactcttctcagataaggacaggacttgaagctaccggacattacagcgcaaaccttgtggctttcctccgttccagcggatttcaacccgtggtgttcaaccctttgcgcgtgaagctttatcgacaggcaatttcactgcgcagaacaaaaacagacaaggccgacgcaaaatgtatcgcggggatactgatgtcagaagtctcaagtcctgtcactgtatcttaccagattcaggagctaaagtctcttacacgccacaggcacaggctagttgccatttgcagcagatcaaaggtttccatgtccagaatggtcgacttgctttttccagaactgccctctttagggctcagaacggggcaggcgtctacactggcgcttatggcagaactgccgggggcggatatgattgccgcgtgtcgcatcgaccggctgacaaatatcctgcgttacgcatcaaagggcaggtatgggagagaaaaggctgaggcaataaaatcaatggcgaagaattctattgccagaacaagcaaggctctttctttagaactctctcaggtcattgagcagatacgtttctttaaacgacagatcgcgtttttggacagacagatcgcggctatggtcgctgaaataaatacgccgctgctgacgattcctggtattggctttcgtaccgccgccgtcatacttgcggagataggcgatatacgacgcttcaaaaaacctgaccagcttcaggccttcgctggacttgacccgtccacatatcaatccggcaagttcaacgcggcgaacacgcctatggtcaaacacggttcgacatatctgcgctggtctctgatgcaggcggcaaggctctgttctatccactgccgtgactttcgaaactatatggagcacaagattgcccagggaaaacattactttgtcgctttgggacatctttcaaaaaaactcatacgcgttatattccacatgctttatacaaacgaggtattcgtttcaatggctgcctgatttaggatgccatcacaaactacttctcgtttctgacttctggcttgggaagaggtcaatttctgtatgcttttgtcaaggtacgatgttttcctagttcttttactcttttttgttactttcctcttgacttcgtatagtcagt

SEQ ID NO: 8619 - DNA, 1470 bp, unidentified
  source 1..1470: mol_type = unassigned DNA; note = element_d830a39
  misc_feature 1: note = core
  misc_feature 2..253: note = LE
  misc_feature 254..1453: note = CDS
  misc_feature 1454..1470: note = RE
  misc_feature 1..254: note = bridgeRNA
cgttaccttcttcgtgaccccagagacaaggggttctggtcgccggttccggcatgactgactgcccctgtcgtaggcatgatccggggggtgttgtcaccgggaccggcgggcgtgggacgaccgctgatagggacagggccaccggcacgtcgacgtgctcgtcgaggacggtaggtctcttcgtaacgtgggtgccggcatccttcgccagacttgcgaccagtcgccgcacgcgaaggggaagtagacgatggatcgacccgactacgccgtgttccttggcctcgatgtcggcaaggaggagcaccacgccaccgggctggacccggccggtagccgggtccacgacaagccgctgccgcaggccgaggacaagatccgtgacctgctccaggccctgaccgaacacggccgcgtgctggtggtcgtggaccagcccgcatcgatcggtgcgctcgcggtcgcggttgcccgggccctgggcatcgacgtggcctacctgcccgggctggccatgcgcaggatcgcggacctgcacccgggcaacgccaagaccgacgcccgcgacgcctacatcatcgccgaggcagcccgatcgatgccgcacgcgctgcgccgggtcgacaccggcgacgaagccctggccgatctggaggtcatcgtcggctacgacgacgacctcgctggtgaggtcaccaggatcagcaaccgcatccgcggcctgttgacccaggtcaaccccgggttggagcgagtccttggcccgaagatccaacggccggcggtcctcgagctgctgatgaggtttgggggcccgacaggcctggccgccgcgacccgccgccagctgatcgctgcgacgaagacccgcgcaccgcgtacgtatgaggcgctcgtcgatgccgtgcagcaagcgctggctgagcagagcgtgaccgtgcccggcacccgtgccgctgagatggtcctgccacagctggccactcaactggccgggctgctggcccaacgcgcggccgcggcggcgcagatcgaggagatgcttgatgcgcaccctcttgccaaggtcctgacgtcgatgcccggcatcggcgtcaggaccggagcccgcatcctcctcgaagtcggtgacggcacctcgttcccgaccagcggccacctggccgcctacgccggactcgcccccgtcacccgccgatccggcaccagcatccgcggcgaacaccccagccgggccggcaacaagcaactcaaacgcgccttcttcctggccgcgttcgccgccctgcgccaccccgccagccgggcctactacgaccgcaaacgagcacagggcaagaagcacaacgccgcactcgtgtgcctggcccgccgccgcatcgacgtactccacgccatgctcaaacacggcaccctctacgacgaccgatcaacacccgctgcggcttgacgaagaccatagggaca

SEQ ID NO: 8620 - DNA, 1405 bp, unidentified
  source 1..1405: mol_type = unassigned DNA; note = element_d8310c6
  misc_feature 1..2: note = core
  misc_feature 3..79: note = LE
  misc_feature 80..1123: note = CDS
  misc_feature 1124..1405: note = RE
  misc_feature 1123..1392: note = bridgeRNA
tgttgggatggacggcccccgaacggcatcgaaatttgccagagtgagctgttaacgatctcaaacgaaggagccgtccgtggatcagattatccgtattggcatggatacgtcaaagcatgtctttcaattgcatggtgtgaacgccggcgagcaaccgatcctgcgcaagaagatgcgccgtagggagatggtggatttctttgcgaaatgcccaccgaccgtgattgcgatcgaagcctgcgccgcttcgcatcactgggcgcggttgctgacagggtttggacatgatgtaaagttgatcgcgccacaattggtgaagccctacgtcaagcgcggcaagaatgatgcagccgatgccgaagcgctatgcgaggcgatgagccctccgactatgcggttcgttccggtgaaaagtgcggatcagcaagccgcgcttatgctggtgggcctgcgtgagcgcgccgtcaccgcacatacgcagctagccaatacgattcgtggctatgcagctgagttcgggctaaccgcggccaagggcatgtctcatattccgctccttctggaacgcatgttgattaatgacattatcccggctttggcgcgtgatctgttcgcatcactcgctgaggaatttgcgcagttgggtgagcgtttgaaagaggtggaggcaaagctgatggcttggtatcgcgacaatgaatgctgtcgccgtcttgcaaatatccctggtgttgggccgataggcgcagtcttgctggtgatgaaagcgccagcaccggaacagttcacatcaggaaggcagtttgccgcctggatgggcctgacacccaagtatcattcgactgcgggcaaagtcaggctcggtgttattacgagggctggcgatgaagcattgcgtaagacgctgatcgtgggtgcaacctcatcgcttcgacaggtcagagcgggacgaggcaggaatgcttcattatggctcatcgagttgctcaagcgcaagccgccaaaactcgcggctgtcgcgttggccaacaagattgccaggatcgcctggaaaatgatggtaaccggcgaggtttataagggtaatgctgcgcgatcggctatggcctgcgcggcgtgacgagatcagtcatcacggtaagcatgatacagacgataccgtgctgagctgatgcgtgaacttgcatgaaacaagtagatggtgtgatcgatcgatccgagacgtggtccactccgcagatgccaatggcccaacgaggccgaataaatgtttggaacccacgtcgcggaacccatcttggccagcattcatgtgtgaatgtaccaaaaggccggacatatgaacgcaagcgatccgatcaaatcatcaaaaggttcttgcaacgagggggccgtccacata

SEQ ID NO: 8621 - DNA, 1169 bp, unidentified
  source 1..1169: mol_type = unassigned DNA; note = element_d83ae5f
  misc_feature 1..2: note = core
  misc_feature 3..203: note = LE
  misc_feature 204..1166: note = CDS
  misc_feature 1167..1169: note = RE
  misc_feature 3..179: note = bridgeRNA
cttgtatgtttagacttgaaggggtgggcgggactaaaagctcgattccgactctagccagtacggaccgtgggagacttctcgtcccgccccttctacccgaagcgccgataaggaattcatcggtaaaaccgacgatagaggcaagccagcgcaagggtaaaccccgacaagcccttaaaccctagctccgaggattcgtcatgacaatccttacctcgccaacggtaatcggtatcgatgtagccaaggccgaaatcgtcgcttaccgcgaagacatgcaaaccactcaacacatcaacaacgaccgagagactcttgggcgttggctcaaagctctgcctgcgcaaagctcaattgctttggaagccaccagcatttaccacttggacacggtcgaactggcccatgaaatgggacaccgggtttacgttgtggatgcttatcgtctgagccactaccgcgaaagcattggccaacgggcgaaaaccgacccttgtgatgcgcgcctgctcgcgcgttacctgtctagcgagcaggatcgactgcgcctctggagtccacctccgcaggcctacaaggtgttgaaaagtctgcttcatagacgcgcagagcttatcaatgtgcgtgtgggcatgacgctgagttggtcaggtgaaccgcttctgaaggatgaattggcccggcaattgaagtccttcaaacaagcggagcaagccatccagaaattactgcacaaagtcagtaaaaaggcaggcatcaccgaaaacatcaagcgctgcaaagccattgaggggatcggtgagcttacggctatgggcttggcgaccgcattcatgcgcggtcacttcgccaacggcgatgcattcattgcttttttggggatggacttgcgagcaaaggattcaggcaagaagaacagccctcgccacctgtccaaaaaaggcgatacggagctgcggcgcctggctcacaacgcggcgatggcggcttgtcggtctgccacctggaaaccgtactatgagtcctatctcgtcagaggcttggcaaaaacccaagccctggtgatcctcgcccgcaagctatgccgggtggcattcgctctcatgaaaaaccagagcgaataccagccaaatttaaggctgcagggttcccctgcaacatagaat

SEQ ID NO: 8622 - DNA, 1149 bp, unidentified
  source 1..1149: mol_type = unassigned DNA; note = element_d84295d
  misc_feature 1..2: note = core
  misc_feature 3..218: note = LE
  misc_feature 219..1142: note = CDS
  misc_feature 1143..1149: note = RE
  misc_feature 14..196: note = bridgeRNA
cttgtgtcaaataagggtctatcgttgtaggtgagagcggagtgcggcaggccgtttagccgcagtgccaagcaagcacgagtaggagtcagcgccgccgcactccggttctcctgcctgacaagcccgaacagttgcccgagtgacgagctcgaactccacaagcatgggcatcggcaggagcgctctcgtccatgagtctactgcggagaacgtctatgcggcgctatgtcgggatcgatgtatccaaggccgaactggtcattcatgtcctgccggacgagcaggcctggacccagcccaatacgccacaggggcagtgtgcgctggcccaacgtctggctgggctgggctgcgagcggatcgtgctggaagccagcggtggctacgaacgtgccgtgctgcaggtgctccgaaaggcaggcctgccggcggtgcggatggccgccgatcgtccgcgcaagctcgctcaggccttgggcctgcatgccaagaccgacgccctggacgcgcgcctgctggccatggctgcccagcgcatcccgaccacgcccacgcccgtggtgcccgagcaccagcagtctcttcgcgaactgctggacctgcgcgccaccgtggtcggtcagcgcgatgcccatcggcggcgcctggagcacatcacccgtcctgaggtgcaacgccactgccgagaggtgatcgccctgctgaaccagcagatccagacgttgacgcaggagatcgagcagcagggcaggacctgctcgaccctgccaaaggtgcctgggctcggcacgatcctgcgcgcggtcctggccgcgcggctgccagagctgggcacgctgccgccacgcaagctcgctgccctggtcgggctggccccgttcaatcacgacagcggctgctggaaaggccaacgccgcatcaaaggcggccgcgccgacgtgcggcgcgtgctgtacatggccacctgggccagcatccgcgccaaatcccccttggccaacacctacgcgcgcctgcgcgcagcgggcaagccggccaaggtcgccatcgtcgcctgcatgcacaagttcctgcgctggctcaatgccatcgcgcgcgatcaggccccgtacgctcctcctgtcatcgcaggtgcatgacagttga

SEQ ID NO: 8623 - DNA, 1187 bp, unidentified
  source 1..1187: mol_type = unassigned DNA; note = element_d8444a7
  misc_feature 1..2: note = core
  misc_feature 3..209: note = LE
  misc_feature 210..1172: note = CDS
  misc_feature 1173..1187: note = RE
  misc_feature 6..214: note = bridgeRNA
cttgtatgttctagaccaggccagcccggtagagtccggatgctgtcaaggcagccagaccggcccgtgcagcttggtatcggctggggtgttcgagcccgtctctgagtacagagcgcacggccgccgagctggtcttcctgaagcccgaacggttacgcgtgccggctgctccgagcgcgcatgcacaagcaagggatccgaagaccatgtctgcttcctcagtggtggtgggcatcgacgtggcgaaggcacatgtcgatgtctcggtgctgggcgccaagttcgaggcccagcggttcgacaaccatgccgatgggcactcggcgctggccgcggtcctcaaggctctggaggtggcgctggtggtgatggaggccactggcggctacgagacggaactggcctgcgcgctgcagagcgcaagcttgccggtggcggtgatcaacccgcgccaggctcgcgacttcgccaagtccatgggtcgtctggccaagaccgacaccatcgatgcgcgcatgctcgccgagctggcggcggtgctggtgcgtcgcgaggacttggggcgcttcctgcgccctctgaccaacgagcagcagcagtggttggccgcgctggtcacgcggcggcgccagctgctgaccatgctgctcagcgagcgtcagcggctgcagatcacgcccaagggattgcatccgagcatcgaggcgatcgtggcggcgatcaaggcgcagctcgacgacatcgaggcccagatggtcggccatgtccgcgagcacttcggcgaactcgaccgactcttgcagtcggccagcggtatcggcccggtggcaagcgccacgctgatcgccgagttgcccgagctcggccggctcaatcgccgcgagatcgctgccctcgtgggcgtcgcgccgatggccaacgactccggcacgacccgggggcgaaggcgcatccagggcggacgcttcgagatccgccgcgtgctctacatggccgcgctcaccgcctcccgccgcaacccgcccatcaaggccttctacgaccgcctgctggccgccggcaagctgcccaaggtggccctggtcgcctgcatgcgcaagctgctgaccatgctcaacgccatggtcaggaccaacagatcgtgggacaactcgcttcacggcgcttgacttcggagacggtta

SEQ ID NO: 8624 - DNA, 1200 bp, unidentified
  source 1..1200: mol_type = unassigned DNA; note = element_d854556
  misc_feature 1..2: note = core
  misc_feature 3..222: note = LE
  misc_feature 223..1185: note = CDS
  misc_feature 1186..1200: note = RE
  misc_feature 28..198: note = bridgeRNA
cttgtatgttcctcccggctcctacgcggtatgtaggagccagggtggagggaccgtcaacatgatatctgcgggtagcagccgacagacgagccgagcgatccccatcccgcaccttaacgtcgataaaggatctagcggcctttgaggaccgccgatgtaggcaagccaacgtggtgcggtaccaccccagcccctcaacaatagctgggagttacgcagatgtcagatcgtttggccgtcggcatcgatgccgactcaaagagccttgtggtggcgcgccatggcaccaagggcagcactcgaatccccaattcagcgtcggccatcggtaagtggctgtccggcctgccgaccaggactcgcattggggtggaggcgaccaatcgctaccacgagcttgtggctcaatctgcccagaaggccggccacgcggtctttgtgctcaatccgcgcgacatcaagcattacgccaagggggtggcttgccgcggcaagaccgactctggcgacgcacaggttatcgcgcgctacatcgccaaggaggccgacaatctgcacgagcatgtcgcccgttcgcctgcgcaggagcggctgcatgtactgctccagcaacgtgacagcttggtcaggagcaagacgaagctcaatctctcgctggggtcgggagcatcagaatccgcactcttcggaggggttttcagtagcctgaaagaggccatcgccctgctggatcaagagatccaacggttgtgccgcagtggtgaacagcacgatctgtatcgacgaatcatgaccattccggggatcggaccgacggtggcggcgttcattacccatcacatcacgcgctggcccttggccagctcggacgcctggattgcctgcaccggcctggatccgcgacccaacgaatccggcgcacggatcggtcggcgtcgcctgtccaaacgcggcagcgccggtttgcgtcagatcctctacatggcagccatgggcctgacccgctcaaagggtggcaagcctctctacaacgccatccgcgagcgcggccacagcagtactgccactttcaacattctggcgagaaaactagccaagatcgcctggggcgtcttcaagagcggccgggactttgacccagccatgctgaaaatgggtcaagcctgcttccagcaggcttgaccgcgaacataggat

SEQ ID NO: 8625 - DNA, 1498 bp, unidentified
  source 1..1498: mol_type = unassigned DNA; note = element_d855e7f
  misc_feature 1..2: note = core
  misc_feature 3..387: note = LE
  misc_feature 388..1167: note = CDS
  misc_feature 1168..1498: note = RE
  misc_feature 1198..1382: note = bridgeRNA
acatggggtaatcgcggcgcgattgtccaagctccatttataagatgatggctggcgtgggtggttgcccccggtaagatggaaattgcgggctcacgattggcaccgggcccaaacatcaagtggaggcaaccatggaccaatatatagggctggacgtttcattgaaagacaccgcgatctcgatccgggaggacgggaagcggatctggcgggggaagtgcccttcggatccaaaacttctggcagagatgatccgcaagcatgcgccgcacgccaggcgcgtcgtatttgagacggggccgttgtcgacgtggttctatcacgccctgacagccgaggggatgccggcgatctgcatttgaagcgcggcacgcgcaaaaggtattggacgagacgctcaacaaaaccgatgccaatgatgcagatggcttggcgcaactggccgaagcgggcttctacaaggtcgttcgagtaaagtcatttgacagcatgctgacgcgcacgctggtcggggcccgcaaccagctcctgaacatctcaacccaacttagcaaccaaatccgcggcctgatgaagacattcggtcttatcgtccccaaaggaactggtcgggtgtttgatggcaatgtgagagagcttttggctggtaataacgaccttgcacggatcatattgcctctgcttgaggcgtggcgcgacatacgcaaacgcgcggccgatcttgatcgccagttgctcgcagtggcacggcagagccagtctacgaagcttctgatgacgatcccaggcatcggcgccgtcacggctgtgtcctacatcgcagcgattgaagatccagaaaacttccgaacgtcgcgctcggtaggagcctggctcgggctaacaacgcggcgctaccagtcaggtgaggttgactataatggccatatctcgcgaagaggtgataatcacctgcgggggttgctttatgaagcggcgacagtgcttctcacgcgcgccagtgtcaggaccgagagcagcctcaagacctgggggcttaagctgcgtgagcggttgggctttaagcgcgctgcggtggcagtcgcccggaagcttgcggtcattatgcacagcatgctcaggacaggagaagtcttcaacgcatcggttggcgccaccgcataagcgaccgccagccttcttccctcagaacgtcaaacctcgtttgacgcactgagcgtccctgccgcggacgccggttggatcattccgctggtgagtggctgcagctcgttcgagactgcgcgctacacataggaaggtcctacctgcgaagacccatcatgcggcgacattttgtcgaccgcgcagacaaccctgctcccggcatccggatagctctgaatcagacaaacgacgctgagatgcaaccccatcgaactccgctgtcgcccctcgcaacggcgaagagagcgaatggccaaagcaaccttgactaaccggatgcgaatagaca

SEQ ID NO: 8626 - DNA, 1613 bp, unidentified
  source 1..1613: mol_type = unassigned DNA; note = element_d861d18
  misc_feature 1..4: note = core
  misc_feature 5..291: note = LE
  misc_feature 292..1488: note = CDS
  misc_feature 1489..1613: note = RE
  misc_feature 26..311: note = bridgeRNA
tttggtacaatataagcgtagccctataccgagcaagacggtatagccagctatgcttatttttgttataataagagagcaatggactgacgggcttttctttgaacttcgcgttcgttaggcaaagcgtcatccgttctcttattataaagattcgattaagcaggttgttccatttttgaaggggtgggcgagcccaccccttcaaaaaatgcgttcgcgtcacgagccaaaatgagtcgtaataagctgaaacggtacattgcagaaacaacaaaaaggaggatttttatgatctgcgttggtattgacatcgcaaaaggaaaaagcaccgtgtgctttttgaaaccgggcggagaggttctgaggacaccttacgacatcgaacacaccgccgaagaaattggaaagctcatacgggatattcgctcgtatgacgaggaggttcgtgtggttcttgaagccaccggacactaccatttacccgtggtagctcagctgcttgaagccaatattttcgtctgtgtagtgaatgctctgcgcatgaaaaagttctgttctcaggacattcgcaaagcaaagacagacaagattgactctatgaagatcgccgccttcggtcttacttattggcaggatctcaaagctgccaagcctacagacgaggtgtaccgtgagttgcggttgctttcaagacagtattttcaacttacttctatgcttaccaaagcgaaaattaccatgggcaacgttctcgacaacgttatgccggggataacaaaactcttgtacgaccgcgctccaaaccacaaattaacggattttgtactcagatatttacattttgacaagatttccgctatgggagaaagaagatttaccaccgactactgcaaatgggcaaaaaaacagggatacattttatacgaacgtcaggcaaaggaaatattcgcccttgttcaaaatggtatccctgcgctccctatgactgcatccaccacgatcgtcgtcaaggaagctattcgagttgtgcgagaacttgagaactcccgcgcatctattttagcacaaatgcagacgtttgccaagtcccttcccgaatattctttaattcgcagtatggcttgtgttggagatacgcttactccgcttgttattgctgagataggcgatgttagaaactttcactccaagcacgctctgattgcgtatgcaggaattgacgcgccgccctaccaatccggtggcttttacggaacggagcgacatatttcaaaacgcggcaacggttatttgcgcagagttggctttgagattatgcagtgcaaacttcgtttcaagcccgagggcgacgttgtgtacgacttcgttcagaagaagcgctccgagggcaaatgcggtaaagaggctatggtcgccggtattaacaaatttcttcgcatttactacggcaaggtcactgagctttaccgtgaattagaggcttaattacatacaaccgaatacctctcgggcgaaaaattttatctgttttcgcccttttggtgcttctcccattgacttgaaattttgttgaattattttcgaaaaacctattgacttttcttagcagg

SEQ ID NO: 8627 - DNA, 1587 bp, unidentified
  source 1..1587: mol_type = unassigned DNA; note = element_d86962b
  misc_feature 1..3: note = core
  misc_feature 4..262: note = LE
  misc_feature 263..1459: note = CDS
  misc_feature 1460..1587: note = RE
  misc_feature 28..282: note = bridgeRNA
tttggtacagtataagtgtagttgtataactagaattattagttaacagttacacttattttaatttataattaagagagtaattggtctggcgtcttcttttttggattaaccacatccgtgtcggaaacagtcaaccatctcttattataaacattcgattaagcaggttgaaaccgttaaggctttcgcgtaactaaccaaaatgaatcataataagtgtaggtggaaacagttactaataaaattttggaggttgtttatgataagcgttggaattgatgtatcaaaaggcaaaagcacagtgtgtatcatgaggccatatggtgaagtcataagtatgccctttgatgtaaatcatacggaaagagagctgtctgagcttgctgcaatgatcgagcgattaactggtgaaactagaattattatggaggcaactgggaattatcaccttcctattttaagctttttaaaggaatataattgttttatcgcagttataaaccctttagtaatgaaaaaatatgcaagtactatgttacgaaaaggaaaaacggataaacttgatgcaattaaaatttctaattatggattagataattggtttcgtttaacagattatgaagtcagtgaagaaatttatgttcaccttagattgttaggtcgccaatatgcacactataataagcttagagtagagagtaaactttctttaacaacattgctagatatggtaatgccgggaataaaaaagtcattgagtggcaaatcatactattcaaagaaagataaattaagtgattttgttgaggaatattggcattttgataacatcacagttaaaagtgaaaaaaggtttattaacaattataaaagctgggcgaagaaaaatggataccatcaaagtgaatcgaaagccataaaaatatatgccttagctcaagatggtatcccaactttagattccaatgccccatcgacgaaaatgttagtattggaatcagttcgagttctacgagaagtagaaaagactctatctaaaatattaacacaaatgcaaaatttggcaagaactcttaaggaatacagtactgttagagaaatgaatggagtcggtgatattctagccccgaggttaatagccgaaatcggtgatgttagaagatttcataagggaaaggcactaattgcatatgcagggatagatgcaccaccctatcaatcaggaaattttgttggaactaaacgacgaatatctaaaaggggttctgcaaatcttagaaaaacaggctatgaagtaatgaagtgtttaaagtgtaataaacctgaggaagatgctgtttataactttatagtaaaaaaagaaaaagaaggtaaagcactaaaagttgcaaaaatcgcaggattaaataaatttctaaggatttattatgcacgagtaaaagaactatatcaataagtaaacaaaaaataaaaactgtaaaaccagaacgaaatagagatgggttctggttaattgatatgcaaaaaaataagagtttagatcacaaaagatctgttagataagtattgacttttcttagcagg

SEQ ID NO: 8628 - DNA, 1453 bp, unidentified
  source 1..1453: mol_type = unassigned DNA; note = element_d869ad1
  misc_feature 1: note = core
  misc_feature 2..589: note = LE
  misc_feature 590..1438: note = CDS
  misc_feature 1439..1453: note = RE
  misc_feature 11..236: note = bridgeRNA
cccattaccgttgcggtcgcctcgcaatggggcgccccgccttcggagttggcatgccttctccccgtgtcgatcgcattgtcttggggtggtgtcaccggctccgggaacatcgacagaccgctgatcaggggcatgaccaccggccttttcgcaggtcgggaggctcttcgtgatgtggatggggcaatcggtgccgtgggacggccgggcgatggggacgaccggaggacgcacgtgatcgacatcagcggcaccggcgccttcctcggcctggacttcggcaagggcgaacaccacaccaccgccgtcacaccggccaggaagagggccttcgacaagcggccgccccacagcgagcccaagctccgcgaggtcttcgggaaactgcaggccaagcacgggaccgtgctggtcgtcgtggaccaaccggcttcgatcgacgctctgccgccggcagtcgcgaggacatgggctgcccggtggcctatctgccggggctgacgatgcggcggatcgccgacctctatccaggggagccaagactgatgcctgcgacgcgttcgtcatcgcagacgcggcccgtgtcatgccgcacacgctccgctcggtcgatctcgacgaagagaccatcgccgagctggagatgatcgtcggcttcgacgacgaccttgccggtgaggcaacccggatcagcaaccgtctgcggggcttgctcacgcagatccacccatcgctggaacgggtcctgggcccacaagtgcagcacccagccgtgctcagactcctcgaccagttcggttccccggcccaaatccgcagggccggacggcgtcggctcgtgaccttgatacgtcccaaggcgccgcggatggccgagcggctcgtccaggacatcttcaccgcgctggacgagcagaccgttgtcgtcccgggtacggacgcggccgcattgatcgtcctcagcctcgccagctctctccaggcagtccctgacccgcggaaactcctcgccacccggatcgaggaactgctggaggaccaccctctttccaaggtcctgacgtccatgccggggatcggcggcaggaccggagcccgcatcctcatcgacgtcggcgacggcagatcgttcccgtccgcagcccgcctcgccgcctacgccggcctcgccccgacgacccgaagttccgggtcctcgatccgcggcgagcaaccgtcccgccgcggaaacaagcagctaaaacgggccttcttcctctccgcgttcgccgccctcgccgacccggcctcccgggcccactacgacaagaagatcagccagggcaaacaccacacccaagccctcctctgcctcgcccgacaacgagcctgcgtcctcctcgccatggtccgcgacggcaccttccacaaaccccaacccgccccatcaccttgaccaaactcatagggg

SEQ ID NO: 8629 - DNA, 1446 bp, unidentified
  source 1..1446: mol_type = unassigned DNA; note = element_d872f49
  misc_feature 1..5: note = core
  misc_feature 6..235: note = LE
  misc_feature 236..1429: note = CDS
  misc_feature 1430..1446: note = RE
  misc_feature 1..239: note = bridgeRNA
cccccgttaccgtcttcgtggtcccgtttcgcgggactgcggtcgccaagttcggtatgacttcttgcccctgtctctcgaatgatccggggggtggtgtcgccgaacctggtggcgtcgatggaccgctgatagggacagggccaccggaaactgcggaaggtctcctcgtaacgtgggtgtcgggtatcgatgctggatcggcgaccggactggccggacgaaggactgctgaatggacacgagttacgccgtgttttgcggcatcgacgtaggaaaaggcgaacaccacgccgccggactgaccgccgccggaaagaagatctacgacaaggcgttgccgaacgacgagacgaagctgcgtgcggtgttcgacggcttggccgcgcacggaccggtcctggtgatcgtcgatcaacccaacacgatcggcgccctgccggtcaccatcgcccgcgcctgcggacacgacgttgcctacctgccggggctgtcgatgcgccgcatcgccgacctgtaccccggacaggcgaaaaccgacgcccgcgacgcattcatcatcgccgacaccgcaaggaccatgccccacaccctgcgccgcgtcgacaccggagacgaggcgctggccgaacttgaggtcctcgtcggcttcgacgacgacctcgccggcgaagccacccgtatcagcaaccggatccgcggactgctcacttccatccacccagccctcgaacgggcgctcggtccccgtgttacccaccccgccgtcctcgagatcctctcgcgctgtggcggacccgccggaatccgacaggccggcaaacgcaaactcaccacgctcgcggtcaagcacgcaccccggatgggtgcccgcctcgccaccgagatcctcaccgcactggaaacgcaatcggtgacggtgcccggcagcaaggccgccgagatcgtcctgccgaagctcgccgactccctgaaagaagtccttctgcaacggaaaacgatcggcgatgacgtcgaaaggatgctcgatgaccaccctctttcccgggtcctgacctcgatgcccggcatcggtgtcaggacggcagcacggatcctgctcgaggtcggcgacggttccgcgttcaagtccgccggacacctcgccgcgtacgcgggcattgccccggtcacccaccgatccggctcctccatccgcggtgaacaccccgcccggtcaggcaaccgcaagctcaaacgtgccctgttcctgtccgcgttcgcagccctgggcgacccgaccagccgcggctactacgaccgcaaacgcgccgagggaaagaagcacaacgccgccctgatctgcctcgcccgacgccgatgcgacgtcctctacgccatgctcaagaacaagaccctctaccaacccccagtaaccgcagccgcttgacgaaaaccatagggaca

SEQ ID NO: 8630 - DNA, 1380 bp, unidentified
  source 1..1380: mol_type = unassigned DNA; note = element_d883015
  misc_feature 1..2: note = core
  misc_feature 3..81: note = LE
  misc_feature 82..1107: note = CDS
  misc_feature 1108..1380: note = RE
  misc_feature 1084..1367: note = bridgeRNA
tgatggtgtggatgcctctcccgccgggatcgtactgtcgcgaggcagaaaaagcgaaatccgcagtattggagaaacaaaatgaatgaagtcagcattatcggcgttgatttggcaaagagcgtttttcaggttcatggagctggacccgatggaacagcccacttccgcaagaaactcactcggattcagttcttgccattcctatcacaacagccgaattgcatcgttgccatggaggcctgcgcgaccgcgcacggttgggctcgtgcgatttccgagctcgggcacgaagcgaagcttatcccaccccaatatgtcaagccgttcgtcaaacggcagaagaacgatatggcagatgccgaggcgatcgcggaggccgcgagccggccgaccatgcgcttcgtcgagattaagtccgaagacagtcaagctcgcgcgatgatctttcgaacccgacaaatgctggtccatcagaggacacagtccttgaacgcgctacgcagccatctagcggaatacggcgttatcgcgccaaagagcaggttcaggacagaccaacttgcgcgtctggtcgaagacaaagacgccacccttccagacttggtgcgggccacaggtattatgtacctcgagcacattgaggccctgacaagtcgaatatccgagctgaacgatcagatcaaagaggtggtgcgctcgtcgaagaccgcgaagaggctgcagtcaatgcccggcgtgggtcttcagacttcgatagcaatcgaggcattcgcgcccgatatgaggtgtttcaaatgtgggcgggacttcgcggcttggctcggcttggtgccgaagcagcattcgtcgggcggcaaggaacggctcggcaaggtctcgaagcacggccaacaagacatacgaaccaatctgattagtggtgcgatgtccgtcatcgtggcgataactcgcttcggaaagcaacccactgaatggctcgcgcgcatgctggaacgaaagccgaaaaagttggtcgcaattgcactggcgaacaagatggcccgagcgatctgggcaatgatgatgaagggagaagactatcgaaatccggtggcaacggcgtgaaccagaaatcacgccattgacgcctgatccgtcgggcgtgtgaggagctactcaactatgcatgggaattgatcggtcagatccggattgggaaaaccagtgtcgaaccaggaactcagagtccgaatgactgatttggacccgatccgcgcatctccataccggcccgcggtcgttgaaagtgccgcaacaatgaggccttatacatgaccgcagccgatcacacgccatgaagttggaaaaccaacttgcacgaaacgaggcatccataca

SEQ ID NO: 8631 - DNA, 1167 bp, unidentified
  source 1..1167: mol_type = unassigned DNA; note = element_d888c17
  misc_feature 1..2: note = core
  misc_feature 3..216: note = LE
  misc_feature 217..1155: note = CDS
  misc_feature 1156..1167: note = RE
  misc_feature 12..222: note = bridgeRNA
cttgtcttatgactatcccgcttctttgtgagaaaaagaagcgccggctcgggtagccgcccttgccggcgatgggggatggatcggagacacgcaggccgccattctgacgaatgccgggccgaactaaagtttgatcgcccccatcttttccaatcgtcctgaacggatacccgagttttgaggctcggatgacaagcatgggagacggaaaagatgcatgagattaccatcggcgccgacatctcgaaagaccatatcgaccttcatcgcctgccgggtggtgagaggctgcggatcaccaatgaccgcaaggggtttgccgccatccttcggtggatcggcgacatgccagtcgagcgcatcgtctatgagccgacaggcgcctaccacaaggccttcgaacgcgtcatgcttacccatggcctgccgctttccaaggtcaatccgcgccaggcgcgacgatttgccgatgccatcggaacgttggccaagacagaccgggtcgacgcggagatgctggcgcgatttggtctgctgctgagcccgcgtcttttgcacccgaacactgcgtctttcggtgaactcaaggagttgcatgctgcacgcctggcgctggtgaaggacaggacggcggcgaagaaccgcggcaagaacatcaaccagcccctcctcaaacggcagaaccttgcccggctgaagcagatcgaaactcagctcgcccaggtcgagcaggccatcgccgcccgtatcgcaggtgacgaaagcctcagggcgcgcttcgacatccttgtctccattcccggcctgtcgaagattacggcctttacccttctcatcgagatgcccgaactgggcgaactggatgaaaaggccgccggcaagctctcgggccttgcgccagtcgacaggcaatccggacgatggaccggacgtgccttcatcgctggcggaagggccatcgtccggcaagccctctacatgccggcgctcgtcgccatccgcttcaatcccgatctcaaggccaagtacgacgagctcaaaaaagccggaaaagcttcgaaagtcgccatcacagccattatgagaaagctcgttgtcctcgccaacgcactcctgcgtaaacagcaaaaatggactccaaagagcgcttgatcaagacggata

SEQ ID NO: 8632 - DNA, 1660 bp, unidentified
  source 1..1660: mol_type = unassigned DNA; note = element_d889734
  misc_feature 1..2: note = core
  misc_feature 3..153: note = LE
  misc_feature 154..1191: note = CDS
  misc_feature 1192..1660: note = RE
  misc_feature 1409..1655: note = bridgeRNA
agatggggtaacgggccggccgccggatcggccgctcgcccaagagctgcggcttcggaatggcggtaaagcggccgtccctcaaagatggtgtcagtgactgattcggagtcgggcaatcccgcccgctccaagcatcatcgagggacgaccatgaactattatgccggaatcgacgtgtcattgaaagaatcatgcgtgtgcgttctggacgctggcggcaaggtgattcgcgagacgaaggtcgcgagcgagcctgaagcaatcattgcctggttcgctcagctcgggctggcgatggagctgatcgggctggaagctgggccattgtcgcaatggctttttgcggcgatgaagcaagcaggtcttgcggtcgagcttctggaaacgcggcatgtgcgcaatgcgctcaagacgatgacggtgaagaccgaccgcaaggatgcgcgcgggattgccgagttggtgcggattggctggttccggccggtgcattgtaaatcgatatctgcgcaggagacgcgtgcgatcctgaccgcgcgcaagctggtcgacaccaagctgcatgatgttgagatgagcctgcgcggtattctgcgcggcttcgggctgaaggttgacaagacgacagcgacgtcatttgcagcgcgcatcagggagctggtcgatgggcacccgactttgcaagggttggtcgatgcattgttgtcaatacgcgaagtgctgttgcgcgagttcaagggcttcgagaagcgcgtacgcacgatggcgcgccataacgagcaggctaagctgctgatgtcgaccaccggggtgggcgcgattatttcgctgacttatgccgccgcgatcgacgatcccgcacgatttgagagctcgaaggtggtcggtgcgcattatggaatgacgccgaagaagtatcagtccggacagaccgattataatggtcgcatctcgaagatcggcgatgcgagcgtgcgcagggcgctctggcaggccgctcatgtgatacttacgcggtcggtcaaggactcggcgctcaagacctggggattgagtgtcgccaaacgtaaaggcatggcgaaggcgaaagtggcgctcgcgcgcaagcttgcggtcgtcatgcaccggatgctggtcgatggaaaaagcttcgaccccgcgctgccgaaacaagcggcagcggcctgaatgcgatcgccccgaccccccagcgtggcagcgtgctcgtcgccgtcaaggccgctgcgcgccgccttcggcggtggcctgcggccagccttgcactgcgactgcgcgcgttgcctgcgccagtgggcaggtcgggacggagaaacgcactccggtcgaacaaagaaactggctgtcgtgctaaacttccacacgagctgaaaaggagagttcaactggtttcgggcgggtcttgacaccagccttcccgaagcgaatgtcccctcgccgggacgaggatcaggtcagcccgcgcccacccatgtggctttagaccacgctcaccgtagattgggacggcctatccttttcgaaccccatcaggtggcggcctgcgccttgcggcgttgcaccgaccccgtacagaagcgagtgccggcgagagggatgtttgcaaaagggggattgaccaaacctggcccgttacaga

SEQ ID NO: 8633 - DNA, 1384 bp, unidentified
  source 1..1384: mol_type = unassigned DNA; note = element_d88cdd9
  misc_feature 1..2: note = core
  misc_feature 3..211: note = LE
  misc_feature 212..1180: note = CDS
  misc_feature 1181..1384: note = RE
  misc_feature 41..217: note = bridgeRNA
cttgtattagcgcgaaggattacactggcatcgttccatgaggaatggcccagcccgggtggccacccaggctgggccgccgatcgatcggatcgatgcccaccgaagccttgaaggctgtcttccgtagcaggatcgcgatcggcacttcatcgggacccgaatggttgaaggaacccagggttcgcatcacaagggagggtcgacgaagatggccaagcgtaccacgatctgcgccgggatcgataccggcaaacggaagctcgacatagccctcgacggcagcttggagcagttgcaggtcgacaacacgcctgagggttacaaggtgttgtcggactggcttcggcggcatcgtgtcaagcgtatcggcatcgaggcgagcggcggctatgagcaggccgttgttgccgagctgcggcgccagcgatttgtcgtggtggtgtttcagccggcgcaagttcgcgcctatgccaagttccagctgcagcgggccaagaacgacaagatcgatgccgccctgatcgcggcctgcactgctgcggtcaagaagatccacggtccgccagatgcccggctgctgccgttcgccgagcatctgacgatgatcgatcagatcggagaggatgtcgcgcggctcaagaaccggctcgagacctgccgcaaccaacggttcaggcaacactggaaagaggatatcgcccgtctggagaagcgcaagaagatcgagctcaaggcactggtggcggcaatccgagagcatcgcgatctcgccgagcggctcgatctgatctacagcgtcggcggcaccgggatgccgaccgcggtcgctatcctggtgcggatgccagagatcggccagctcacccgtgagcaagccgccgcactggccgggcttgctccctatgacgacgatagcggcgatcatactggcgtccgtcacatcgaaggcgggcgtgaacggctacgccgcgcgctttataccgcggccctgccggcatcctttcgctggaatccgcagctcatcgccctctacaaacggctgattgccgccggaaaagagcacaagcgcgcgctcatcgcctgtgccaggaagctgctcattttcgtcaacactgtcgtggcgcggggcacgccgtggcaaaatcaaccgcctccactcgccgcaatcacctgctgatcatccgtttctttgttcgactgaagcgccgtttcttcgtcccgacctgccctcacaacgacgtcgcgcgcagacgccgtcaaggatggtcgtcgctccgatgctgccccgcattccgctatcgaaagaccacgccttgacggtgccaagcgcggcgtcatcctgccatagtcgggggcctatcagccccagctttaatggttg

SEQ ID NO: 8634 - DNA, 1356 bp, unidentified
  source 1..1356: mol_type = unassigned DNA; note = element_d8968b9
  misc_feature 1..2: note = core
  misc_feature 3..75: note = LE
  misc_feature 76..1101: note = CDS
  misc_feature 1102..1356: note = RE
  misc_feature 1077..1344: note = bridgeRNA
tgatggggtggacgccccccgacggcatctgtgtgccaaggtgacggtgtcgaactgtcactgaaggaggcgtccgtggaacaaactatcacgatcgggctggacatcgcgaagtacatcttccaggcgcacggggcggatgccgccggccatgtgctgttccgcaaacgcctcacgcgagccaagttgcttgggtttttggcgacacaagcgccctgcgttgtcgcgatggaagcttgcgcagggtcgcactattgggggcgggagatcggcaagttgggccacacagtgcggctgatcccgccggcctacgtcaagccgttcgtgaagcggcagaagaatgacgcggctgatgctgaggcgatctgcgaggcggcacagcggccaagcatgcgctttgtgaccgtcaaggacgaggcgcagcaggcgaacggcgtcgtattccgggcccgcgatcttctggtgcgccagcgtacccaatgcatcaatgccttgcgcgggcacctctgcgaatatggctatgtctttcgccagggcatcacgcatgtcgggaccctgatcgcccatgtcgaagatccgaattcatctttgccagaaagtgctcgggtcatcctcaggctgctgatcgacagcttcgccgcgctggaggcgcggatcgcggaactggatgccgagatcaaccggcgctcgaaggcagacccagttgcgcggcggctgatgacgatcccgggcgtgggtccgattactgccaccgcagtcacggcgctggtgccggcgccgggaagcttccgaaccggacgcgatttcgccgcctggctcgggctgacgccactgcagaagtcgaccggcggtaagcagaaactcggcgccgtgtcgaagcggggcgagcggaccatccgccgcttgctgatactcggagccagcgcggtggtccggcaggcctgccggcgtggggcaccaaccgggtcgtggctagcgcagatgctgacccgcaagccgaagatgctgatcaccgtggccctggccaacaagatggcccgtgtcgtctgggctctgttggtcaaaggcggcgtttacagagctccggccgcgacagcctaagctgatcgcggtcgcgagggcgtagggcgagcggaaggagagtatggcgcaacagtcggcgagacggggtcgggaaaaccagggctttccagagtgcttcgagcacgctttgggtgacatggaccaggcccgcgaactcccatacaggccggcggcagctcaacgccgcatcagaggccggacagatggcagcatccgactacgcaccacggcaatcccgaagttttctcttgccaccaagggggcgtccacaga

SEQ ID NO: 8635 - DNA, 1401 bp, unidentified
  source 1..1401: mol_type = unassigned DNA; note = element_d8992b6
  misc_feature 1..2: note = core
  misc_feature 3..87: note = LE
  misc_feature 88..1131: note = CDS
  misc_feature 1132..1401: note = RE
  misc_feature 1163..1399: note = bridgeRNA
tgatgtgatggacgactcccgccacccagcgaggggtttatgccaaagtggagaagtcgtgacctccacggcaaaggagcgttcatcatgaacatagcgactgttggactggacctggccaagagcgtgctgcagcttcacgcagtggattcgcatggccaaatcgttgtacgcaaacagctcagacgcgcggacgtacttcggtatttcgccacgctgcaaccgtgcgtaatcggcatggaagcatgcgcctcgtcgcactactggggccgcgagctcgcaaagctcggacacaccgttcgactgatcgccccgcagttcgtccggccttacgtaaagagtaacaagaccgacgcggccgacgccgaagcgatttgcgaggcgataacgcgaccgaacatgcgatttgtaccggtcaagacgcaggcgcaacagacagtgctgtcgctgcatcgcgcacgtgccggtctggtcaagtcacgcacagcactggccaaccagatccgcgggcttctcggcgagttcggtatcgtgctgccacaaggtatccggctgcttggccaacgggccatggcggctctttccatccgggacggtgaacattctgagccgttccgggcgttaatccagatgctcgtcgagcacttgcgcgaacttggcagcaaggtggctgagctcgaaggtcgtatccgcgcaatccatcgcacggatgcgcccggtcaacttctcgaaacaatacccgggatcgggccgctgaccgcttcggccctggcagcctcgatcggcaacgcccgagcttttcgcagcggccgtgaacttgctgcatggctgggcttggtgccgcgtcagcattcctcgggcggtaccccacatctgctgggcatcagcaagcgcggtgatacggcattacgaacacttctgattcacggcgcccgcgcggttattcgtatggcagccagcaagtccgagatggctgattcctggctgatgaaactgtgtcggcgccggcacaaaaatatcgctgctgtggcgctcgcggcaaagaatgcacggacggcgtgggccatgctgatacgaaatcaggcctttcaggcaaaccatgtgcctacgcgatccagcgtgacgggttgacaggcctcgcaattggcagcaaaacagcgttcactttccagaggttgcttgagcagacttcaattcgatgacagaacggtcggaccgtggtgggccaaacccgctttgcaccatgggcaaacaagcccgaggttctgatggggtacccattcgcggatatccatcgtgggcctgcagcgagtgctgccaactgagcccggatacatggctgcaacctcgacctgatgccagaaaactgagactgcttgacaacagggagtcgtccataca

SEQ ID NO: 8636 - DNA, 1568 bp, unidentified
  source 1..1568: mol_type = unassigned DNA; note = element_d89d225
  misc_feature 1..4: note = core
  misc_feature 5..286: note = LE
  misc_feature 287..1450: note = CDS
  misc_feature 1451..1568: note = RE
  misc_feature 37..268: note = bridgeRNA
tcacgtataattaaaactatctcgaaaggggtagttttaattatttctcccttctttaaaatttgttatatttgcaggattagctacctgcggtataataaagacaagcactgtggatttgtatctataactttacagctctgactggtttgaggtgactcaaaccacagtggtttgtctgaaatggtaattagttagttaacgctttgacgtttctatttgcgtgaatacattgacaagccgtctgtggaaaacagcagtgcaaaaatatcaaaaggaggaaaccatgtattttattggtatcgacatttcaaaattcaaacacgactgttctgtaattgacgacttcggagaaattgttactccttcgtggtctttcacaaatgactcagagggatttgcacagttgaaaatattgcttgattcccttgatgcagaaacaagaatagggcttgaatctaccggtcattatggtatgaatctaaagctatatcttgaatccaacaacttctcattcatggagttcaatcctctgcttatcaatcgtttcgttaaatccaagtccctcagaaagactaaaaatgattctattgattgcatgatgattgcccgttatttaatgacggtagagtacaagccctatccgccattattatatcacattgagaagctaaagtcactaacaagattcagagattctcttatcagactcagaagccgtcagcttgttgagcttacaaacatcttagataaggtatttcctgagtttaaacctttctttggcggtaagttttctgttacggcattatacatactttctaattactcgtcgcctgaaaagattgctaacatgaactctaaatcttatgaagcactgcgcaaattatctcgcggcagattttcaacagtagattttgcaaagcttaaacaacttgctaaaaacactgtaggaaataccgaagattatcttctgcaagaaatgcagattgttttggaactttacagccaattggattcaaaggttgatgaaacggaagtttctatcaaggaatgcgtttccgatatgaatccgcctatactttctgttccgggaatcggtattgaatctgctgctgtaatcttagctgaattcggtgatttctctaaattcaaaaatgcttctcaaatgctttcctttgccggattagagccgggatacttccaatcgggaacatccgaaacaaccggcaaaatggttaagcatggttcatcatatttgcgttatacacttatgaactgtgctcaaactgttgtaaattatgagccgacatttgctatgttttacgctaagaaacgtgcagagggtaaacctcatcgtgtggctttatcgcatgttgttaaaaaactgctgcgtgttatctatacgctgcaaactaaaaacactgcatatgatgctgattttgtaaggtagttactaacctgctattttttaagtccttgcaatacagggcttatttgccatgcacttttttagtttcttaaaaaattttgaaaaactttttaaaaaactcttgacttttaatagttag

SEQ ID NO: 8637 - DNA, 1362 bp, unidentified
  source 1..1362: mol_type = unassigned DNA; note = element_d8a0764
  misc_feature 1..2: note = core
  misc_feature 3..79: note = LE
  misc_feature 80..1117: note = CDS
  misc_feature 1118..1362: note = RE
  misc_feature 1120..1358: note = bridgeRNA
ttaatgagatggtcagcctgaccgaaatggcccgatcggcttacgctaatcgggccatctcgtttttccggaggccgtcatgatcaacgcgacgctcatcggtattgatctgggcaagcattgcttcttcgcgcatgcgcatgcgcatgcgcaggacgcacgcggcacgcagatttggcgcaagaagatgacgcgcaagcagctctacgcatgtttggctacgtgtcccgccgctgttttagcgatggaagcttgcgctggcgcgcattggctggggcgcaaaggtcagtcgtatgggcatcaggttcgcttgattgcgtcgcagtttgtccggccgttcgttaagggcaacaagactgacttcgccgacgcagaagcgatttgtgaagccgcctctcggtccactatgcgctttgtcgccgtcaagacagccgaacagcagacgctgctcgcgctagatcgggtgcgcgaatcacttgtgcgcgaacgcaaggcaaccagtaatcagattcatgcgttcctgctcgaattcggcatcgatctgccaatcggcgcgctggccaccacgcgcttgccggtgcttctggatgagcctaggcatgcattgccgcccacgatggtggccttgttgctgcgcttgcatcagcgctacgcaaggtggagtcaggaaatcgtcgagcttgagacgcaaatcaagcagcagacgctcgaagatgaagccggccagcgcctgctcacgattccgggaatcggtcctgtcaccaccagcagcttgctggccatggccggcgacgcgcgtgcattcaagtgtggtcgtgacttcgctgcttccttaggactggtgccgcgccagcatttgacctgtggccaagcgaccctcctagggatttcgaagcgcggcaacaagcagttgcgcagcctgctggtccaaggcgcacgcgcggtgatgcggtttgccgagcggcgaacggacgcgctcggtcgctggctacgagccctgctgcgtcgccgtcacagcaatgtcgtcgcctgcgcacttgccaacaaaatggccagaatcgtttgggcgattctggccaaaggtggcgagtaccgggcgcaaccggctatcgcttgaacagcttgcccgcctgcttttgcgaccactgacctgtgatgaagacaaacggctcacggcccaattgaaaacccgacataaaatccagtcgtgcagactgaggggtttttgaggatagttgggtgcggcttctcatcgagggccgggcgctccgatccgcgcccatttcgagcgggatacatttgcgcaagcccttctatcttaggtcacagatcgaggttgcagaaatcaggctgatcatacat

SEQ ID NO: 8638 - DNA, 1503 bp, unidentified
  source 1..1503: mol_type = unassigned DNA; note = element_d8bf733
  misc_feature 1..2: note = core
  misc_feature 3..243: note = LE
  misc_feature 244..1482: note = CDS
  misc_feature 1483..1503: note = RE
  misc_feature 6..236: note = bridgeRNA
ctaatgggttctaccgatcctctgacaggctcggttccggtagcggccggcgggtcagcactccactcatctgatcgttgaggtcttgcggcagaccgtgcgcccgctggtcgtgaggaggcgtgaccgctgctgggatgacgtgcccccagatcgtccgggtgagcacttgaccattagatcgccggaagtcctcctccacgctgctgcaacgatcgcaaccaggcgaaggaggaagtgccgatgttgttcataggtgatgactgggccgaggaccaccacgacgtcgagctggtcgacgaccagggacggatcctggtgcgacgacgcctgcccgagggtcttggcggggtgacccggctgcacgcactggtcgccgagcacgcaccgcaggaatgggccgacctggacccggccgaggcggccgcccaggtggtcgtcggtatcgagaccgaccgcggcccctgggtcggggcgctggtcgcggccggctacaccgtgtacgggctgaacccgatgtcggtcgcccggtaccgggagcggcactccacctccggtgcgaagtcggacaccgccgatgcgcacctgctggccgagatcgtgcgcctggaccgggcccaccaccgccaggtcgccggtgacagcccgaccggggaggcggtcaaggtcagcgcccgggcacatcagtcgatgatctgggaccggacgcggcacgtgctgcggctgcgcgcggcgctgcgggacttcttccccgcggccctgaccgcgctcggcgacctggacgagcccgacaccctggctctgctggcgcaggcgccggacccggacaccgccgccaggctgtccaaagccaagatcgtccgcgccctgacggcggcgaaccggcgcgacgtacccgcccgggccgacaagatccgccaggtgctgaccgcaccagagttgcggcaaccggggccggtgcaggacgcctacgccgcgatcgtgacctccgaggtggcgctcatcaccgtgctgaacgctcagatcgagcggctcgggcaggtggtggccgagcattttggccggcaccgggacgctgacatctacaccagcctgcccggtctcggtgtgatcctcggcgcccggatcctgggtgagttcggcgacgatcgccaccggtacgccgacgccaagggtcgcaaggcctacgccggcaccgcccccatcaccagagcctcaggcacacgaaaagtggtcctggccaggtacgcccgcaatcgccgcctgggcgatgccctgcagcagtgggccttctgctccatgcgcggctccgccggcgcccgctcctactaccaggcgctgcgatcccgcggcgtcggtcaccaggccgcactgcgccagctcgccaaccgctgggtcggcatcctgcacggctgcctacgccacggcactctctatgacgagaacaccgcctgggagcaccacctcgacaatgccgcttgacagacccagaacctgggatgt

SEQ ID NO: 8639 - DNA, 1509 bp, unidentified
  source 1..1509: mol_type = unassigned DNA; note = element_d8c51bc
  misc_feature 1..2: note = core
  misc_feature 3..246: note = LE
  misc_feature 247..1473: note = CDS
  misc_feature 1474..1509: note = RE
  misc_feature 45..226: note = bridgeRNA
cttatattaggactgttgcgaataatcatagatgaagtgattttatgtaaacccgatttcaagagcttgctggctgaggaccttccttccccgatcccatcgaggatcgcgtcgagactgtcccgaccagcaaaagaacggagccaaaggttcaatagaaagtcgtccctgggaggaccgatataaggcgaactttccgttcacagcacgtggaataggtaataaacaaaacaggaggatgagagattggcgcgatattatttgggagtggattgggcggatcaaagccaccagctgtatgtgagtgatgagagtggaagaaaaataagagagctggaagtccaacagaccgctgacgggctggctgagctcggacggtggcttgaggagagccgcggtcagggaattgagctttgggcagcgatcgagaagcctgaaggccgggttgtggattttcttttggatcacggtgtggtggtctatccagtcaaccccaaggccctggatcgggctagggatcggtttcgcatgagtccatcgaagagcgatggtttcgatgcttatgtgctggcggagtttttgaggaccgatcatgctcatttgcgcgctcttgagcccaattccgccgagggccaggagcttaagatgctgactcgggatcaccagcggctggggcggcagaaaacccggctgctcaatcagatcgggataacgcttaaagaatattatcctgttcccttggaggtctttgagagtttggacactaagatcgcgctggattttctcaaagcctatcctaccccgcaggctctctccaagcttacgcgccgcggctggaagcgctttgccaagcgcgaccaccacctcagtgaagcccgctgtagcgagctttgggacaagctcaacaaacctcagctggcggttcccgcacatgtggtccgagccaaggccaagcttctggcagcgctggtcatgcagctggaggcctcggttaaagccgtcgacagctacagccaggaggttcaaagttttttcgccgctatgccggcagctgaaatcgccaagacgctgcccggcggaaaaagcggcaccacggtagcgagcatttgggctgagctgggcgacgctccaaagcgttggaactcctttaggcaccttcaggctgaggggggagctgtccctgtcaccaaggccagtggcaaaagccgtatggttcagtttcgatttgcctgtaacaagcatctgcgccaggccatgtattggttttcctttaactctctgcagcgatctgagtgggcgaagaagtactatcgcaatcaacgggctaaaggtcacagcaagcatgagtcgctgagagctctgggagcgaagtggctcaagattattttcgtgatgtggcgagaccataaaccttatgacgagaattaccacttggctaacatcgccaggcagatgatgcgccaggcggcataaaaaatttggcggcacttgacaaccatcatagaaagt

SEQ ID NO: 8640 - DNA, 1496 bp, unidentified
  source 1..1496: mol_type = unassigned DNA; note = element_d8cfa64
  misc_feature 1..2: note = core
  misc_feature 3..219: note = LE
  misc_feature 220..1476: note = CDS
  misc_feature 1477..1496: note = RE
ctaataagagttaacgggtcggccgtgcggcagactcgggtccggtagccgccggcaggtgagcactgttgcctcccgggctcttttgggaagccccagcgttagatcgtgcccctgccggtggccgggagagtagatcgctgctgggatgtcgtgcccgccaggtcggcgtgagcacttgtttattaggtcgctgatggttctcccgcgggctgcctgatggttgtggtgccgaggatgggagagcgcgtgctttttctgggcgatgactggtcggaggaacatcatgacgtcgagctgatggatgccgcggggcgggtgctggccagggcccggctgcccgagggcgcggcggggatggcgcggctgcacgcgatgatcggcgggcagctcggcgacgccgacgatgcggaggtggcggtcgggatcgagaccgaccggggcctgtgggtgcaggcgctggtcgcggccgggtatgtggtgttcgggatcaacccgctgcaggcggcccggtaccgggaacggcatggggtgtcgggcgccaagagcgataccagcgacgcgcacatgctggcggacatggtgcgcactgattcgcatcagctgcggccggtggccggcgacagcgacggcgcgcaggcggtcaaggtcgtggccagggcgcataagacgctgatctgggagcggacccgtcacgtccagcggctgcgtcatcagctgctggacttcttccccgccgcgctgtcggcgttcgacgacctggacgcccctgacgccctggagttgctggccaaagcccccgacccggcgtcggcggcgaagctgagcaccgcgcagatcgacgccgcgctcaggcgtgcccgccgccggaaccgggcggacaagaccgccgccatcaagaccgcgctgcgcgccccgcagctggcccagccgccgcaggtcaccgccgcgtgcgccgcggtggtccggtcgctgaccgcggtgatcaccaccctcagcgggcagatcgctgtgctcgaaggccaggtgagcgagcattttcgggtgcacccggacgctgagatcatcttgtcccagcctggcctgggaccagtcctcggggcccgggtgctcgcagagttcggcgacgacccgcatcgttacgcctcggcgaaggcccgcaagaactacgcggccaccagcccgatcacacgccagtccgggaagaagaagaccgtcatggcccggtacgtgcacaacgaccggctccgcgacgccctcgacggccaggccttcgccgccctgaccgcctcgcctggtgcccgcgcctgctacgacgcccaccgggccgccggagcaggccaccgcgccgccctccgcaagcttgccaaccggctcgtcggcatcctgcatggctgcctcaagaaccgcacctcctacgacgaagccatcgcctggcccgaatacgccagccaggaaatcaaggctgccgcttgacattcaagctcctgggatgt

SEQ ID NO: 8641 - DNA, 1594 bp, unidentified
  source 1..1594: mol_type = unassigned DNA; note = element_d8d2fde
  misc_feature 1..2: note = core
  misc_feature 3..99: note = LE
  misc_feature 100..978: note = CDS
  misc_feature 979..1594: note = RE
  misc_feature 1328..1529: note = bridgeRNA
agacataatgtattaaacctgtccaacttaaagaacgtgggttaagctttaaggtagagaaaccaaaaggcccagagccacaattaaggaggacaggttatgagaaattttagcacatttatcggtatggatgtacatatggaaacgatagcaattgcaaccgcagggaagcatggagcgccccgatactatggcgagattgccaatacatccgaggcgctgacaaagctggtaaagaaagtcattccctctggaagtcgggctgttttttgttatgaggctggtccgtgcggatacggagtatatcggcaaataacggacatggggcatcgatgtgatgttatagctccttcactgataccgaagaaagctggaaatcgagtgaagacagatcggcgcgatgctgtgactctggtacgtttacttcgagcaaatgaactgacagcggtgtgggttcctgatcagcagcaagaggcgatgcgggacctaacccgaattcgtgaagatatgaagagcatggaacggcgtgcccggcaacggttgaacggctttttgttgcgcaataagaggatctacaccggccaaaataaatggacgcaagcacatttccgctggttggaaaagatcagctttgaaaacccaatccagcagatcgtctttcaagagtatgtggatgcagttaaacaccttcagggacgcgtggtatcgctggaagaagagatgagcagagcgcttagtggatggtcgttgggaatcgtcgtagtagcattgatggcattacggggagtgaaccttgtaactgcgatgaccattgtatcagagataggagatataagccgtttcaaaagtcctcggcaattgatggcctatcttggattagtaccgagcgaggattcaagcggcaaacgtaaaagaagaggagaaatcaccaaaacaggcaatggacatgtgaggagagtacttgtagaagcttcctgaagctatcggctaccggctcgaaagacggcccatctacagcgcaaggctgaaaaggcgagtgaagcagtgcaggcaatcgcgtggaaagcgcaaaaacgtttgtgcggccgatactggcatctgacacaaaaagggaaactaaaagtacaggcatgcacagccgtggcaagggagttggcagggtttatttgggctattggttgcgaagttatgggaaagaacaatacccctgtggtgaaagttgcataacatgcagacgtgcacagtaaaggaaaatctgttgcctatggaggcttcgtaagcatgaatttgtttttctgcacctctaaacaactacggacattgatccgacaggtgtgcatttcggccaggatagcagccggttgggagaaccctcgaaagaactatgaggcgccttcttacaggctgacccccgactttagacagaggcagctccacgacgaagacaagtcatgcggtatccaacccgcgtatatcagagtgatctaccgtcgtttatcgctgctatcctgacccaaatgtataatccaaaaaggaggttatgacaaaaaacaaagacgccgaccatcagcacttgacaggtttaatacatatc

SEQ ID NO: 8642 - DNA, 1245 bp, unidentified
  source 1..1245: mol_type = unassigned DNA; note = element_d8d6c9c
  misc_feature 1..2: note = core
  misc_feature 3..83: note = LE
  misc_feature 84..1004: note = CDS
  misc_feature 1005..1245: note = RE
  misc_feature 1019..1231: note = bridgeRNA
gatggggtggatggctcccgctcccggcgtcgcaatgcgccatactgcaggtgtcagaatctgcgatcgagaggagccaccccatgcaagttaccaccgtcggcctcgacctggccaagaatatctttcatgtccacggcgttactgaaacaggagaggttgctttcaaccgccccttgaggcgggcgcaggttctggcgttcttcgagcgactgtcgccctgccttgtcggtatcgaggcctgcgcttcgagccatcattgggcgcgggagctttcgaaactcggccataccgtcaggctgatgccaccaatgtacgtcaagccctacgtgaagcgtggcaagtccgatgcggtcgacgccgaagcgatctgcgaagccgtgacacggcccaagatgcgcttcgtcgagatcaaatccgaggaacagcaggcgctactgtccttgcaccgcgcgcgtgactttgtcgtgcgccagaggacgcagctgatcaacatggtccgcagccttgcagcggagttcgggatcaccatcgctcggggcgtcgcgcgcgccctcgagttcgccaaggcagtcgtcgatggcaagcagtcccggctgcctgatctggcccaggacgttctgcgcgtcctcagccggcagctgatggatcttcacaaccgccttggctggtatgaggccatgttgcgcattcaggcgcgcctcagccggcaggctcaactcctgcagaccattcctggtgtcggcccggtcaccgcctctgccgtggctgcgacgatcgggtccggccaacaattcaggagtggccgccagctcatcgtggtcggcatgacgtcgcgtgtccgacaagtcgcgacccatcccgagcgtgccgatccttggctgacgaagctgttgcagagaaaacccgcaaggttggcgactgtcgccatggcgaacaagacggcccgggtcatgtgggccgtactgacaagagacgagccctacaaaccgcacgccatatgagacggcgcgcgcccgcgagatagcaagaccaacgatgtgatggtgtaccattcagccgcaacgatcaggacgctccgacgaatgtcccgggcgccattgcccgcaaagcagataggaacctgatctgcggatcccatcagggccagcggcaatgaccgcgtcaacaggccggacacaagaccgcttctgaacaggtacacgagatcatttacggcttgctatgcgggagccatccacacag

SEQ ID NO: 8643 - DNA, 1355 bp, unidentified
  source 1..1355: mol_type = unassigned DNA; note = element_d8d8df3
  misc_feature 1..2: note = core
  misc_feature 3..79: note = LE
  misc_feature 80..1093: note = CDS
  misc_feature 1094..1355: note = RE
  misc_feature 1101..1342: note = bridgeRNA
tgatgtcgtggacgacctccgcaccagcgtagctgtgcaatgatgtggtcgttgtaggtccacgtctaggagtcgttccatggagcaggaggttgtcaccgtcggattggatctggcgaagactgtgtttcaggttcatgttatcgccgctgatggcgcagtgctgatccggcgtaagctgcgcaggaccgaggttattcggttcttcgcgaaattgtcgccttgcctggtcggcatggaagcctgcgcgtcggcgcatcactgggcgcgcgagttgatagcgattggccatgaggtgcgcctcatgccgccggcctatgtgaagccgtacgtgaagcgcgggaagaccgatgcggcggatgccgaagcgatctgcgaagcggtcacccggccgacgatgcgcttcgtcgctgtgaagtcggtggagcagcaagcggtgctgatgctccacaaaagtcgcgacctgattgttcggcagcgcaccatgctgatcaacgcgcttcgcggccatttggctgagtacgggatcgtgacgggcctgggcgccggcggcgtagtggatgccctgaaggcgctgtacgaagagcaggacaggtttcccgcacacgcgcgttcggcccttcatggcattgccgctcaactgagggcactagcgagcgagatcgatcggcttgaagcgcaaatcctcgattggcaccgtaacgacgagacgagccgcaggctggctacgatcccggggatcggcccgattacagcttcggctattgcagctgcggtgcccgatccatcgctgttccgatcaggccgtcagttcgccgcctggcttgggctgacacctcgagcaaacagctcgggtggcaaagagcgcctcggcggaataaccaagcagggcgatggctatcttcgccggcttctggtcgtcggttcgactgctgttatgagaatgacgcgcaagaatccggctcgccaaccctggatggcgggcctgctcgagcgcaagcctacgaagatcgcgacagtggcgctcgccaataagacagcacggattgcgtgggcagtgatgacgcggaaggaggtctacgccgccgcataaggagatctccatcacgcgataatcgcgtgataggatgcgttggagcagcttagtagtgatgacgaaccggtcagaccgggggttagtgaaacccagggggtcacagcgcttcgagcgcgatgacgtgattagggagccagcctgcggacttcatcagggccagcagccatgcggtgctgcgcgaacaggccgaacacatggatgcacccgaccgaaatcatcaatgccaaaaagctcttgcgcagcggaggtcgtccacaca

SEQ ID NO: 8644 - DNA, 1566 bp, unidentified
  source 1..1566: mol_type = unassigned DNA; note = element_d8dd484
  misc_feature 1..3: note = core
  misc_feature 4..244: note = LE
  misc_feature 245..1438: note = CDS
  misc_feature 1439..1566: note = RE
  misc_feature 6..264: note = bridgeRNA
attcgtaatatataagtagaggtttaataacttctacttattttttataatgaaggtgattggctaacggacttttagattgggacaccacgcccggcgataaatgtgttagccaaccttcattgtcctgcgttcaattaagcaagttgggatgatcttatcactcccgtttaactcacgaatatgaatggatcttgaagagttggaaacaatcaaaactaataagtattaaggagggaccattatgattgcagttggagtcgatatttctaaaaataagagtacagtagcaatacttaacagtgattgcagcgttcgtgctaaaccgtttgatatgcaccataatcaaacagagatgaatgcacttgtgaaatatctgaaaaatctaagcgaaccactaattatcctgatggagtatacaggccattaccactacccggttttaaagaagcttcaagctgaaggattccaagtttgccttgtcaacccataccaaatgaaaaaatttggagaagttgaaatccatacatctaaaacggataaaaaagatgctattcgcattgcgactttcgctctagaaaaatcatatatgctgaagccctacagtcctttagatcggaaatatgaagacttaaagtttctttctagacaatacaaacaaagaatatcatatcttacaaagactaaagtacagttaacaaatcttttggatgaaactatgccgggaatcacttcattgcttaagcttactagtcgacatccagagagatgcgtattactgctattcataaaaagatatggttcatatgattccattataaaaatgggtaaaaagcgttttttagctacttactcaacacttatgaagaagaccaacgatcgttatgcaccccaaaaaggcttagctatattcgaacttgcaagtaatggtattacgacacgtggagataacatttataccttgtctgctcagaatcagttggtggatttagtatcagcagcacaaaatgctgcagatgaagtgatttcccagatgcagaatatagcggaaactataccagagtacaaaattctacgagcaatgaatggtgttggtgatcggcttggtccggttatcttggctgaaattggtgatattagaagatttcatagtggcaaagccttgaactcattcgcaggaaatgatgctcctccataccaatcaggacagtatgagagtaagaatcgacacatatctaaacgtggcagcgctacattaagaaaagcttgttacgaggttatgcagtctcttaaagtatctaaaccccttactgatccaatctatctcttcatggtaaaaaaagagcaagaaggtaaaccatttaaagttgctaaaatggcaggcgttaataagtttcttagaatttattatgctcgtgctatggagctttatcaataaattcaattctatattttatcaaaaatctaccttgtagtaggtctattaaggttgtccatttttatatttagatgatgacaatgatttttctggaacagttaattaaggggttgacaaacattagcaag

SEQ ID NO: 8645 - DNA, 1358 bp, unidentified
  source 1..1358: mol_type = unassigned DNA; note = element_d8e08ae
  misc_feature 1..2: note = core
  misc_feature 3..74: note = LE
  misc_feature 75..995: note = CDS
  misc_feature 996..1358: note = RE
  misc_feature 1077..1344: note = bridgeRNA
tgatggggtggacgccccctggcggcatcgcgtgccaaagtggtgtcgttgatcatcacttgacggaggcgtccatgttggaagttagcacaatcgggttggatcttgcgaagaacgtgttccaggtgcatggcgcgaatgcatcaggagcggtggtcttccgcaagaagcttcggcgcgatcgggtgctcgacttccttgccgtgcagccggcttgcacggttgccatggaggcctgcgccagcagccattactgggggcgcgagattgcgaagctggggcccgtagtccggctcatcgcaccggactacgtgaaaccgttcgtcaaacggcagaagaatgatgcggccgatgcggaagcgatctgcgaagccacgcagcggccgactatgcgtttcgtggcggtgaagggcgaggagcagcaggctggcgccgttatgtttcgcgctcgtgaccttctggtccgtcagcggacccaaatcatcaatgcgatccgtgggcatctgactgagttcgggatggtggttgcaaagggcccttttcacgtcgctaagctcgtggcggcgatcgaggacaaccacgccggcgttcccgcgatggcccggccaatcctgcgcctgctcgcagaccagctcaggtcgctggacggaagggtggttgtgctggaccgggagctcgcgcggcgcgccagggaggatgaggaagccaagcggctgacgacaattcctgggatagggccgatcacggcgacagcgctcgttgcactggcgccggcagctcaggccttcaagagaggacgcgactttgcggcctggctcgggctcacaccgctacagcgctccacgggcggaaagcagaagctcggcgagacctcccgcatgggcgaacgaaccttgcgccgactgctgatcatcggagccagcgcgaccgtgcgctttggcaatgcgcaagggctcgaccacacagccgtggcttgcgcgcatgctgaaccgtaagccacctatgctggtgattgtcgccctcgccaacaagatggcgcgcatcgcctgggcattgatggcgagaggcgaaacctatcgggctccggcgatggcgaagtaggtccgccgccggtcctgaaggtgtgagaaggtcaaacggagagtatggcgcaacggtcaacgagacgggatcgggaaaaccagatcatggatacgcgccttgagcgcgcgagattgaattggacccgctccgcgaactcccatacgggccggcggcatgtgacaagccgcatcagaggccggacacatgtcagcacccgaccacgcgccgtgctcttcgaaaagattcttcttgcaccgatgggggcgtcccacaca

SEQ ID NO: 8646 - DNA, 1371 bp, unidentified
  source 1..1371: mol_type = unassigned DNA; note = element_d8f59ab
  misc_feature 1..2: note = core
  misc_feature 3..82: note = LE
  misc_feature 83..1108: note = CDS
  misc_feature 1109..1371: note = RE
  misc_feature 1085..1358: note = bridgeRNA
cgatggagtggatgcccccgcccggcggcatcgtgatgtgccagagtggttgtgtcagcagccacatcgaagggaggcatccatgggtgaaactaccatcatcggcgtcgatctcgccaaaagaacgttccaactccatggcgctgcggcggacggctcggtcgtgttccgcaagaaggtctcgcgggaccagctgctggagttcctcgcgcggcagccgcaatgcgtcgtcgcgatggaggcctgcgccagcgcccaccactggggccgcgaaatcatggaactcggccatgaggtccggctcatcccgccgatctatgtcaagccgtacgtgaagcggcagaagaacgatgctgccgatgcggaggcgatcgccgaggctgcgtcgcgaccgacgatgcgcttcgttgcggtgaagagcgctgaacagcagggcagcggaatgctcttccgcacccgagatctctgggtacgccagcgcacccagacgatcaatgcgctgcgcggccatcttgccgagttcggcattgtggcgccggcggggcacgcccgcacggagcggctcgcgcaggcggtggaggatgatgcgtccgccctgcccgagacggtgcgaacgctggcgcggatgctgctggagcagattggcgcactgaccgaacgcatcgatgcgctggaaaaggagattcgccggcgcgcgccgaaagaccccgaattggcccggctgatgacgatccccggcgtcggcgctatctgcgcgacggcggtgaaggcgttctgtccgtccatgtcccaattccgcagcgggcgcgacttcgctgcctgggtcggactcaccccaagacagaattcgaccggcggcaagacacggctcgggcgcacatcaaagatgggccagcgcgacgtccgcaggctcctcatcatcggtgcctcggccgtggtgtgctgggcggcgcgtaagggcgcccgtccgggatcgtggctcgcgcgcatgatggcgcggaagccgcacatgctggtggtcgtggccttggccaacaagatggccaggacaatctgggcgctgtccacgcggcaggaagaataccgggatccggcaatggtggcctgatcggtcatcagcggccgggacgccgggggtgcaagcagggcaatgagaaggtaagggctgcagtcgacgagacgggatcgcgcgaacctgaaccgcgccgggcgcttcgagcgcgcaaatccgatagggacgcgatccgcatatctccatacaggccagcggcgcatgacggccgcatcaacaggccggacacacgaccgcacctcactgcacgaacctcacccgattcagattccgcttgcttcccagggggcatccacaca

SEQ ID NO: 8647 - DNA, 1428 bp, unidentified
  source 1..1428: mol_type = unassigned DNA; note = element_d911f90
  misc_feature 1..2: note = core
  misc_feature 3..221: note = LE
  misc_feature 222..1412: note = CDS
  misc_feature 1413..1428: note = RE
ctgatatacccccttgtggtggtcgatgatgccatcgactccacggggagaccggcgcccggctatccggcagatgaccgttgaacctagtgtccggcccccgacctccggccgtgaacggtgatcgggatccggcggctttgaccggtgatcggatacatcagctgacgtcgaccggggcgagcgggcgcccctggggtccgcggaaggagggtgcctggatgacgatgatcgggatcgacatcgggggacggacgcacgtggtggcccgctgccgggatggccaggctcgggccgaccgggagatcctccgggtgagccaggaccgagccggctttgccaccctcgatgcctggctcaagcgccagccggaggacgtgacgctcatcacgatggagtcatccggccattactggatgccgctcgcgagccacctgcggcgacgggagatcccggtcgcagtggtcaacccgctcgcggcgaagtactttgccaagagtcgcctgggccggacgaagtccgacccggccgatgcccggagccttgccgagatggccatgcgcgatacgccccccgctcgcgagccgctggccggcgtcgagctgcgccaggcggcccgcttcgcgatgaccctggtcaccgagcaggcgaaggtctgccagcggctcatccgcctggtcgatctcggcttcccggggctcggcgagctgttcgacgacccgacctgccggacggcccgggaagtcctccggatcgcccccacggcccgggcggcgacccggcggcggacagccaccctggccaacgccaacgccagtccaggtcatcgccgcctcgggacggcgaaggccgagcggctccaggccgccgccgcggactcgatcgccgtgcccgagctcgacgccgaggtcgccttcgaggtcggtctcctgctcgaccagttcgacctgctcgagcggcagatcgaggaagctgaccggcgcgtcgcgacgctcctcgacggcgagacggcccgtcgcctacagacgatccctggcgtcggcccgtcgatcgtcgcgaccctcctggcggagatcggcgacatcgagcgcttcaccgacttcgaccaactcctcgcgtacgccggggtccatcccgccgaacgaagttctggcaacaaagggtcgaacccagagaccagctggcatatgagcaaggccggcaacagccaccttcgggcggcggcctatcggatggccgtcgtcggggtccagcacaacccggtcatcgcggtccactacgctcgcaaacgagctgccggcaagagcaagatgaacgccctcggccactgcatgcgcaaggctctcagcatcgtctggggtgtctggcgcaacggccacgacttcgaccccaattggggggtcgaggcttgacaagaccctatgggat

SEQ ID NO: 8648 - DNA, 1359 bp, unidentified
  source 1..1359: mol_type = unassigned DNA; note = element_d912877
  misc_feature 1..2: note = core
  misc_feature 3..71: note = LE
  misc_feature 72..1088: note = CDS
  misc_feature 1089..1359: note = RE
  misc_feature 1113..1349: note = bridgeRNA
ttatggatggcccgcccctcccgccgccgctggtgtaggctgtcggcgttcaaaggaggaaggagcgaaccatgagcattgtgatcctcggtattgatctcggcaagaacagctgcagcctggtggggctggatgacagcgggaaggtagtgctgcgacgtcggatgcgtcgtgacagcgtgatcgccttcgcatcgaaactgtcgccctgcacgatggcgatggaggcctgctgcggcgcgcatcacatgggacgagcgctggcggcgctcgggcacgaggttcggctgatgtcgccggaatatgtgcggccctacgtgaaggcccagaagaacgatgaccgcgatgcggaggcgatcgccgaagcggcaacccggcccaccatgcgcttcgtggaactcaagagcgaggagcagctcgacgttcagacgctgcatcgggtgcgcgaccgcctggtcggcgaacgcacctccctgaccaaccagatccggagcctattgctcgagcgcggccacaccgtggcgcagggccacgccaagctgcggcacaaactgatcgagttgctcgaccccgacacggcggcagtgagccggcgcatggcattcctgctcgaagacatgcgccgacgatggacggagctggaccagcgcatcgccgccttcgacgccgagttcgccaccatggcgcgcaccgacgaccgggcccggcggctgaccggcattcccggaatcggcgcactgaacgccacggcgctggtggccgcggtcggcgacgcggccacgttctcgaaaggccgggatctcgcggcatggctgggccttgtccctcgccagatgacgaccggcggaaagcccaagcttctcggcatcaccaagagaggcagccggtatctgagaaagatgctgatccaaggcgcgcgctccgccatgcccgtcgtgtcacgaggagacaccacgaccggcaggtggctgcgtgcgctgctcgcccgagcacacccaaacgtcgccgtcgtggcgttggccgcgaaaatggcacggatcgtgtgggccctgcttcatcatggacgcaacttcgaggctgctcgataacggcgaactgaaaaatatcgaaccggcgctcggcgcgaacgccgccaagcgcttcaagctgcgagtggtgataggaagatggcctgacagtcgaccggtgtcccgaaagcctctggcgcaaaatggcccgacgaggccggcccctttatgaggatcgggatgcgcggatctccatcttggcagcggccgaagagccgacatgccggatacgtttgtgcagactgctcacaccatcacccaatcggcgcttgcaaccggggcgggccatacg

SEQ ID NO: 8649 - DNA, 1487 bp, unidentified
  source 1..1487: mol_type = unassigned DNA; note = element_d919660
  misc_feature 1..2: note = core
  misc_feature 3..158: note = LE
  misc_feature 159..1373: note = CDS
  misc_feature 1374..1487: note = RE
ctcctaatatataagtgtagggtttcagtacccaacagccagttgggacttaatcctctcattgtttaagctgtataatgattaggcattggtatgacgacacctcctaggaccactttaggtgtccgcaagaaagccagtcagccagccacattaggatgtacaacgctgtcggtattgatgtctcaaagggcaagagcaccatcgcagtcctgcagcccggaggcgtcattgtcaggaaaccctttgatgtttttcacacttcccaatccttaaaagaactatcaaattatctggcttcacttgaaggggatacaaggattgtaatggagtgtactggcagataccatgagtccatggctaactccctctctaatgccgggttttttgtaactgtcgtcaatccgcatctgattaaaaactttggtaacaatacgttgcgcaaggtcaaatctgaccctgctgatgctaaaaagatagcacgctatacccttgacaactgggctgaactgcggcagtattcatgtatggacaatacacgtaaccaattgaaaaccttaaattcacaattcagcttctttatgaagcaaaaggttgccgcaaaggcaaacctgattgcactgttggataatacataccccggtgtaaataaactgttcaacagccctgcccgtgaagatggcagtgaaaaatgggtcgattacgcttactcattctggcatgtggactgtgtccgtaaaaccggcttgaaagcttttacagtgcgctatgaagctttctgcaggaaacaccattatatttatcagccttccaaaccagaagaactgtttaacgcctctaaagagcttgttgccgtgttcccaaaggagacgtcctataagcttctgatccagcagagtatccagcagctcaatcttgcctctgcccatatcgaacagctccgcagggagatgaatgcacttgcttccacgctcccagaatacgaggttgtcatgggcatgtatggcgtgggcaaaacttacggtccccagctcattgctgagattggcgatgtttcaagatttacccatcgggaggcaatcactgcttttgcaggtgtcgatcccggtgtggagcagtcagggcagcacaactcaaagagcaacaaagcttccaaatgtggaaccggcaggctccgtaagaccctgttccaggtcatgaccaccctgctccagaatgccccggagaatgaacctgtctaccagtttctgaaccggaagcgttccgaaggaaaaccttactatgtgtacatgactgctggtgcgaataagttcctccgcatctactacggcaaggtaaaagcacatctgcgcagtctggaacaaaacgaataatcattccgtctattacggctttctttttgaccggctgatgaggcggtcttagagttgtgccataaaatcacttcacaaaaattttcaaaaagtgcttgactttttattagcagg

SEQ ID NO: 8650 - DNA, 1508 bp, unidentified
  source 1..1508: mol_type = unassigned DNA; note = element_d91dee8
  misc_feature 1..4: note = core
  misc_feature 5..241: note = LE
  misc_feature 242..1492: note = CDS
  misc_feature 1493..1508: note = RE
gtcactagggcaccatccttagcaggggcaccgatacggtgctctttgtagggactcggcgggagccggggtgacggtctgtggcggtcgccggaaaacggccagcatgacaccaccgcccccggctttcgcggggctgcagaccggcaacagtgggacgcgccgcagagcgccagttagtgaccgcccgggagccagcttcgccgccgccgggccgtcgctgccaccttgaggagttaccgtgtcttttgcgctgcctgaagcgctgttcttcaccgggatcgactgggccgccgagacgcacgccgtgtgcgtgatggatgccgggggcaagatcgtggccgggttcaccatcgagcattccgcggacgggatcgcgctgctggtccgccgcctggccaggtacggggaggccggcggcatgccggtcgcgatcgagcgcccgaacggccgcctggtggacctgctgctggatgccgggcacccggtggtgccggtcagcccgaacgcgatcaaggcctggcgggacggcgaggtgctgtcgggcgccaagtccgacgccggggacgccgcggtgatcgccgagtacctgcggctgcgcgcgcacaagctgacggccgccgacccctactccgatgagaccctggcgctgcgaaccgtcgtgcgcacccgtggcgacatggtggagatgcgggtcgctgccacgaaccagctgtcggcgctgctggacgcgcactggccgggcgccaaggcgatcttcgccgacgtcgagtcgccgatcagcctggaattcctcacccgctacccgaccccggccgccgccgcgcacctgggcgagaagcggatggccgcgttctgcctcaagcacggctactccggccggcgtcccgccgccgagctgctcgcccgcctccgcgccgcccccgcgggcaccagccgcgaatccctcaccgaggcgctccgcgacgccgtgctcgctgccatcggcgtcatcacggcactgaacgcctcggtaaagaacctcgaccgctcggtggccgcccacctcggggagcacccggacgggaagatcttcacgtcgctgccaaggtctggtcaggtcaacgccgcccaggtgctcgccgagtggggcgactgccgccaagcctatgccgggccggactccgtcgccgcgctcgcgggctgcacgccggtcaccaaggaatcgggcaagcaccgggccgtgcacttccgctgggcctgcaacaagagattccgcgccgcgatcaccaccttcgccgacaacagccgccacgccagcccctgggccgccaaggtctacgacgacgcccgcgccagcggcaaggaccacccccacgccatccgtatcctggcccgcgcctggatccgcgtcatatggcgctgctggctcgacggcgtcccctacgaccccgccacgcacggagccgccgccgcgctcaccgaacaatcggccaagcaaatcgcggcctgaggttgacacagggggt

SEQ ID NO: 8651 - DNA, 1140 bp, unidentified
  source 1..1140: mol_type = unassigned DNA; note = element_d942771
  misc_feature 1..2: note = core
  misc_feature 3..221: note = LE
  misc_feature 222..1130: note = CDS
  misc_feature 1131..1140: note = RE
  misc_feature 37..200: note = bridgeRNA
cttgtgtctctagaatcatgcatgatcgggttggcgggtgacccgggtcatgaccggatcacccgctgcggcggaagcccgtacaccccttggtatgagtccgtggttgagcaaggagctccgtcgcatcttccatagcccgaacggttgccagggttcgaccccgcaccagcaaggaagggatcagaggatgacacagattgcgtttcatgtcggcatcgatgtggccaaggatcgactggacgtggccattctggaaacaggggagttgttcacagtcgacaacaccgaagccgtatgcggcgttggtcgagcggctgtcggacaacgagatcggtgccatcggtgttgaggcgagcggcggctatgaacgcgctgtactcaaggcgctgtggcaagcaggacttccggtgcgtcgcatcaatccgcacaggctgcgccagttcgcgcgtgcagccggcatcaacgccaagaacgatcgcatcgatgcccgtttgatcgcccgcttcctggcgacgctaccggtgcatccggtggagctcgatccaagcctgcaactggtgatcgaactggtcacggcacggcgccagctccaggccgagctcagccgcgtcaacaatcaggccgagcacgtgcgcgatgctgctctcaagcgcctggccaagcggcgtgcgacccggctcagtgccgatatcctgctactcgacaaacgcattgcccaagcaattgcggccgatcccgctctggctcagcgcgaccgcctgctgcgttccactcccagcgtcggtccggtcctgagtgccacactgatcgcgctgctacccgaactgggtcgcctgtccaaccggcagatcaccgccctggtcgggctcgccccctatgaccatgacagcggcaagctcaaaggcaagcgatgcatttggggtggccgcgagcctgtccgcaacgtcctctacatggccgcgctcagtgccggagttcataaccccgtcttcgccgctttccgccagcggctgcgctccaacggcaaggtagcaaaggtcgccatcgtcgccgtcatgcgcaagctcatcacaaccctcaacgctatggtgcgcaccaacaaaccctggaatccggcttccgtttgaagcacggttg

SEQ ID NO: 8652 - DNA, 1434 bp, unidentified
  source 1..1434: mol_type = unassigned DNA; note = element_d956f7a
  misc_feature 1: note = core
  misc_feature 2..292: note = LE
  misc_feature 293..1318: note = CDS
  misc_feature 1319..1434: note = RE
  misc_feature 100..259: note = bridgeRNA
cctttagatttgcatttccaataaattaatcatattaaaattattattatgtattatatggggggtccaggggggtgttgaaaagtgttaattttgtggaaaagttgagtcaaagtgtggcaaattaaccgtggtcaaggtaaaacctatcgcctgttttaatccacactttgctcaaaaggttaaaaagacagatagaaaattagggtaaaacccattaacaaggtaatcgtccttcacctttttactcaacttgttttaaaatttgttaattcctaaaaccattttaatcatgttaaagttcactatcggggcagacatttctaaagacaagatcaatttcgcactacgttatctaaacgactttcttcttgaaagagaggtagaaaacactacttctgctcttaatagatttatcaaagaagttttgtcatttgttaaaaagtttgcaaaagaaaataagtcgatacattcaatagattttattatggaacatacaggtatctacggcaaccttcttattgaatgtttggcgggacacaagctaaatatgtatgttgtttctggtcttgaaataaagaatagtactgggatcagccggggtaaaaatgataaaattgatgctaaacgaatcgcagattatgggctcagatttgcagataaattaaaaccttataccttgtgtgataagatgttgacagaacttaaaggtttgaataccaaaagagcacaactggtgagaataaagtcccagctgacacaagccaatgatgacaacaaaaaatttataagtaaagatcttttaaagaaattaaacaaaatcgatgaaccaattgtaaaaaatttggaagatgccattgagaaaattgaagctgaaatgttagatttaataaaaagcaatacagcgttttatgacaattataagattgctcaatcagtgccgggtgtaggcaagattatagcaatagcttttatttgcgcaaccaataatttcaataaatttgaatcagcaaaagccttaggaagttattgcggagtagtaccgtttggtaaggaatcaggaaggtataaaggcaaagacaaagtatcacctattgccaacaagacattaaaaacgctactacatctgggagcattagcaagcattggcggaaaaaatgcattcgcagcatattaccaaagaaaaatcacagaggagaagaagaacaaaatgcttgcaatcaacaatgtaagaaataaaatattaaaaacactctttgcgtgtattaaaaataaaaccaaatacacagcagattattcgttcaaatttgcagcataaattttagaatgtggataactctgtgaacaggacatataaatccaattttattaacccaaaaaagtcatttatgtattaaaaaattatcaattaatacttggtcaaaccatagaaaa

SEQ ID NO: 8653 - DNA, 1679 bp, unidentified
  source 1..1679: mol_type = unassigned DNA; note = element_d95d191
  misc_feature 1: note = core
  misc_feature 2..273: note = LE
  misc_feature 274..1497: note = CDS
  misc_feature 1498..1679: note = RE
tcgtataatacatttatcgttcaattagttaaaataagaacgagttcattaaaactcatagctctcacaaaggttaataataaacaagtttttttcctttctggattaaatataccagcacaataaacgtcttgtgttaacctttaaaaaatcatctataggatgctaaggagaaagtaatatttctaccttttataacacgaagctatgagattttagactaacactaggtgtagaaaactctacaacaaacaataagattggagaattattatgtattatgttggaattgatgttgcaaaagagaaacattatgtatgtgtattagatgaagataaagaattagcttgtaaaccattctggatctattcagatataactggactaaatgaactggttaaaagattaactgaattatctgatgattatgaacagtttttattagctatagaatcaactggagcttacagtgaaaatatctatgagtatttaaccgatatggaactaaagactattttattaaattcatatcaaactgctaagtatagagatttttctactatgaaaaaagtaaaaaatgactcaattgatgcttatgtcatagcagaattaattgcaagtgataaatacaaagagagtcatataagtagtgaaacttatcatactttaaaagttttaaatagatcaaagaagtcattagatgataagattaaaactattcaaagagagatatcaactgttatggctattgtaaatcctgaaataacattagtatttaaaaatatatttacaaaaactgcaatagcaatcattaaagattatcctactgctaaagacttacaagtaaccacacccaagaagttatgcaaaatatttagacatattaaaggtaacaactttaatgaggacaaagctaaaatattaattgaaaatgctattaattcaatctattcaggcagagccaaatatgctagatctttaatgattactactaatattactatacttgagcttttaatgcaagaaaaatcatttttagaaaatgagattcaaactttaatagacaataatcaagatgataattttaataatggtattaagaatattaaaactataccaggtattgctgataaaacaatatctgcaatactaggtgaatgtggagacttaacaaggtttgatactgctaaatcatttataggctatcttggactatatccaacacaatatcaatcaggtaattcacatacagttggacgattagctcaaagaggcatacctattgctaaacatgcactttatatggctgctgtttcatcagttagacacaacacagagatgttaaaaatatttagagataaagtatcttctggtaaatctaaaaaagaagccttaattattatttcaaaaaaattagcatcaatgatttactctatatttaaatataatacaacatataatcccaacagagttttagtttcctattacaggaaataaaactagttagtttaacatttgtgagaacaatgagttgttaatgaacttgaccaattaataaatgtattgttaatcttttttatttgatcatgtgaacatttttttaaaatgctcaaaaaatcaaagaataaagtaatgcctaaaaaaatagctactcgtttaagctattctttataggatgg

SEQ ID NO: 8654 - DNA, 1195 bp, unidentified
  source 1..1195: mol_type = unassigned DNA; note = element_d9630b3
  misc_feature 1..2: note = core
  misc_feature 3..205: note = LE
  misc_feature 206..1183: note = CDS
  misc_feature 1184..1195: note = RE
  misc_feature 12..211: note = bridgeRNA
cttgtcttatgacttttgctgtcgctgcgtgcgataaaggaccgttgctaccgggtggccgcccggaagcaacgggaaggggacgggtcggtaacacccgggccattatgggccgttctagagtatgaccgccccttcttttccttgtgccctgaacggatacctgaggtctggcctcggacgacaagcataggacatggaaaagatgaagcctatcacttcaactgccaagcctctcattgtggaagcgccgatcacgatcggcatcgatgtttccaaggatcatctcgatgccgcgcgctacccaaccggcgatacaacgcgtgtcgccaatacgcggaagggccacatggtgctgttgcgttggatcagcaagaaccaggtaacgcgtgtggtattcgaggctaccggaacttaccacagaggattggaacagcggctcgatgccgccgggttgaccatcgccaaggtcaatccgcgtcaggcgcgacgtttcgccgaggccacaggcaagctggcgaagactgatcgtgtcgatgccctgatgctggcgcggttcggtgccctgctcgaacctatcgcccgtctggttcgtagcgaaacacaaaaccaactcgccgaacttgtagccgctcggcgcagtctgatgcgggatcgtacggcaaccctcaaccgggctcaaatcctgacaatcgatctcctcaggcgtcatgcccggcatcgtctgcggcaaatcgaagcccagatcacgtccttggacgccaccttggacactatcatggcgaatgatcccgttctggtccgacgacgtgaaattctcttgagcattccaggcctgggttatgtcacagcccaggctcttcttgccgatatgcccgaacttggaaccatggatgaggcgcaggccgcatcgctggcaggcctagccccaatcacgcgccaatccggcaaatggcagggtaaaagctttatacgaggtgggcgcgcttgctttcgacaggcgctctacatgcccgcgctcgtcgccatgcggttcaatccagacctgaagcgggtctacagtcggctcgtcgacagcggcaagcatgccaagctcgccattaccgcggtcatgcggaagctcatcatcctcgcgaacgcgctgctgcgcgataatcggatttggaccccaaaaggcgcttgatcacaacggata

SEQ ID NO: 8655 - DNA, 1454 bp, unidentified
  source 1..1454: mol_type = unassigned DNA; note = element_d9634be
  misc_feature 1: note = core
  misc_feature 2..236: note = LE
  misc_feature 237..1439: note = CDS
  misc_feature 1440..1454: note = RE
  misc_feature 9..235: note = bridgeRNA
cgttaccttcttcgtggccccgcaatggggttcccggcctcccggcccggcatgactgagatccctcgtcgagcatgatcgaaaaggtggtgtcaccgggctcggaggcgtcggcagaccgctgatgaggggcttgagcgccgatcccgcacctgggtgaggcaggctctccgtaacgtggatgccggcacgccgatgccgcagggccggggagagcgagacctggggaggggcagttgaccagcagcgatggcacagacctctatctcggcctggacgtcggcaagggcgaacatcatgccaccgcgctcacgccggccggcaagaaggtcttcgacaaggcactgcccaacagcgagcccaggctgcgtgagctgttcacgaaactgcaggccaagcacgggacgatgctggtggtggtcgaccagccggccaccgtcggagcccttccgctggccgtcgcccgcgacgccggctgtcgcatcgcctacctgcccggcctgaccatgcgccggatcgccgacctctatccgggcgaggcgaagaccgacgcgcgcgacgcgcacgtcatcgcggacgccgcccgcgccatgccgcacaccctgcgcgacctggcgcccagcgacgagaccgttgccgaattggagatgatcgccgggttcgacgacgacctcgccggcgagtcgacaaggatcaagaaccggctgcgcggcctgctcacccagatccacccatcgctcgagcgcgtcctgggcccacgactcgaccacccggccgtcctcgccctgctcgaacgccacggctccccggcccagttgaggaaggccgggcggcggagagtgatcacgctgctgcggcccaaggccccgcggatggccgagcgcctggtcgaagacatcttcaccgccctggacgagcagagtgtcgtcgtccccggcaccgaggccgccaccttgatcgtccccagcctcgccagctcactcagttccgtgctcgaacagcgcaaactcctcgctgtgaggatcgaggaactgctggaggcccaccctctttccccggtcctgacctcgatgcccggcatcgggatcaggaccgccgcccgaatcctcgtcgacgtcggcgacgcccgcgccttcccgacctccggccacctggccgcctacgccggcctggcacccgtcacccgagcctccggctcctccatccgcggcgagcacccgtcccggcgcggcaacaagcagctcaaacgggccttctacctggccgcgttcgcgtcgctgtcccagccggagtcacgcacctactacgaccggaaacgacgcgaaggcaagcaccacgtcgccgccctcgtcgcactcgcccgacgccgcatcgatgtgcttttcgccatgctcagagatggcaccctctaccaacccccggccgccaccgccgcttgacgaaagccatagggg

SEQ ID NO: 8656 - DNA, 1109 bp, unidentified
  source 1..1109: mol_type = unassigned DNA; note = element_d96d2de
  misc_feature 1..2: note = core
  misc_feature 3..161: note = LE
  misc_feature 162..1103: note = CDS
  misc_feature 1104..1109: note = RE
  misc_feature 1..163: note = bridgeRNA
ccctgtgtcttggaagtctgtcaggatgggttgggtgggaagccgttgggtccttggcgcttgacgccgtgagccggctcggcctcccacccgttccattaccaacctgaacagttgcacgaggctgcgccaacagacctcgcatcacagggacaggcaccgtgatcataccccttcgctacgtcggaatcgacgtctccaaacaatatctcgatatcttcgatgaagccctgggcgtaccggagcgcatcgccaacgcgccgcaggccatcacacagatcgcggcgcgttggcgatgcgatgtgctggtcgtgttcgaagcgacgggggtctatgacctcgagcttcgtgaggcgctgggtcgggccggcatccgcttcgcccggatcaacccggcccgggctcgcgacttcgcacgtgccagcggccggctcgccaagaccgacccgatcgatgcgcggatgctggcagcctttggccgggtgatgcaaccggccacggagcaggcagtcaatcccgcccgcaatgccttggcgagacttgcaaaacggcgggatcagctggttctcatgcgcgcgcaggagaagaaccgacgcagtgaggctgatgaccgcgctttggccgaacgtatcagccgccttatcgaggttctcgacagcgagatcgccgagatcgaggccgacatcaaggaactgatcaaggccgagccggagatcacggacgaggcgcggttgatgcgctcgctgcccggcgtgggtcccgtggcttgcatgcagctcatcgcgaagatgccggaactcggacgtgttggagccaagcagatcgcagcgctcgcaggcctggcccccttcaacgtcgacagcggtgccttccgcggcaaacgcaagatcgccggcggccgaaagcgcgtccgtgacgccctctacatggctgctctcaacgcggttcgtcgggccgatccattcaaggccttctacgaacgactgcgacaggccggtaaaccagccaagctcgccctcattgccgtcgccaggaagctactgaccgtcctcaacgccatgatgcgcgacaggaagccgtacctgcaagccgaaccaacgtaacagttg

SEQ ID NO: 8657 - DNA, 1495 bp, unidentified
  source 1..1495: mol_type = unassigned DNA; note = element_d977bd8
  misc_feature 1..2: note = core
  misc_feature 3..449: note = LE
  misc_feature 450..1475: note = CDS
  misc_feature 1476..1495: note = RE
  misc_feature 6..247: note = bridgeRNA
ctaatgggagctaccgggtcagccgttggcagactcggtgcctggtagccgcgggcgggtgagcactttcatcccctggaccgatgtcgagtcctagggtcagaccgtgcccccgctcgtggtcgggagacggatggctgatggggtgtcgtgcctgccgagaacgttggcgtgagcactggtccattagggcgctgaggtcttccgcgggctgctgacatgggagccgtgacgcagcggaggcatgtagtgctgttcgtgggtgacgattgggccgaagaccaccacgatgtggaggtacaggacgaacatggccgggcgatgcgcaccgcccggttgtctgagggcgtggacgggatggcccggttccatgagctcgtcgcccggttcctgcctgaggacgcgaaaccgtcggatgtcctcgtctgcatcgagaccgaccgcggcccgtgggtacggccctgatcgcggctggctaccaggtctacggggtgaacccgaaacaggcagcccggcaccgtgagctgctgtcattgtccggggccaagagcgacaaggccgacgcgcacaccctggccgacatggtccggacccgtcgccaccagctgcgccaggtcgctgcggactccgacatcgccgaggcagtcaaggtcgtggcccgggcccaccagacgctgatctgggaacgcacccggcacatgctgcggctacgggcggcactgcgtgactacttcccggccgcgctggccgcctaccaggtgttgacgctcacgggcgccgacgctctcgaactgctggccaaggcgcccacgcccgccgcggcggcgaagctgaccatcgggcagatcagcgccgtgttgaacaaggcccgccgccgggacattccggccaaggccgccgcgatacagcgggccctgcgcaccgaacacctgggccaggccgacatcgtcgccggcgcctacgcggccaccgtccgcgccaccgtcgcggtcctgcaaaccctcaacaccgagatccgcaccctcgaagggcaggtcgaggcccattttggccagcacccggacgctgaggtctacctcagccagcccggcatcggcgtcatcctcggcgcccgggtgctcgcagagttcggcgacgcggcaggccgctacgccagcgccaagtcccgcaagaactacgccggcaccgcaccgatcacccgccagtccggcaaatccaagaccgtccacgcccggttcatccacaacgatcgcctcgtcgacgccttacacatgcaggccagcgccgcggtcctgcacgaccccggcagccgcgcctactacgacgaactccgcgcccgcgacatcggccacaacgccgccctacgccaggtcggcaaccgcctcgtcggaatcctccacggctgcctcaaaaccaccaccgtctacgacaagaacactgcctggtcacaccgtgagctaaccgccgcagcttgacacctcagcccctggggtgt

SEQ ID NO: 8658 - DNA, 1213 bp, unidentified
  source 1..1213: mol_type = unassigned DNA; note = element_d97f2dd
  misc_feature 1..2: note = core
  misc_feature 3..223: note = LE
  misc_feature 224..1198: note = CDS
  misc_feature 1199..1213: note = RE
  misc_feature 6..201: note = bridgeRNA
cttgtatctcgactacagcctttcagtgaggttatggttcccgactgatcatcgggggaggagctgcaagccgtgtccacccttaagccttgagcttgcaacgtagattgcgctgcgcccctccacactcatccgctaagtccgaacggtatccagagcttcgagctcgcatcagcaaggttggacggatgcagtgacgatcagcaacccaaaggaggagatgatgagtactgttgttggcatcgacgtcgccaagcacaccttcgatatcgccacgcttcaggccaatggcaaacaccgcaccaaagccaagctggccaacgacccgaaggggtttgaagtgctgctgcaatggctgaacaaacacgctgaggcgcaggcctggatcgtgatggaagcgaccggcatttaccatgaggccttggctgaatggttgtatgagcgcggttatcaggtctgcgtgctgaacccggctcagatcgcgttttacgcccgcagtcagctgcagagagtaaagaccgacaaggtcgacgccaagctaattgccgattatggccatcggcatcagaaagaactgcgcgcctggaaaccggaacagccttcgatcaaacgcctcaaagcgctgacacatcgcctcaaggatctgcaggaactggagcagatggaacagaatcgtctggacgtgacgagcgatgccaaggtagccgcgtcgatccagtcggtactggggcatattcgtcagcagattgctgacacgctcaaggcgatcaagcagcacttcgatgacaacgatgatctgagagggcaacgcgacctgctcaagagtatcgatggcattgccgacagaacagcggcgttactgctggcggagctgggtgatatacaacgcttcgacgacagccgagccgtcaccgcatttgccggtttgaatccaaggctgcaggagtcgggaaagcacaaagggcatgtgcgtatatcgcggatggggtctgcattactgcgcggcggactttacctgccagcggttacctccctgacttacaattcagcgatccgggcaatggccgagcgactgcgagcaaaaggcaagaccggcaaacagatcgtctgcgcggccatgcgcaagctgctatgcatcgcttacggggtgctcaaatccggccaaccctttaacccgcaactcgctattgcgaggtgaaggttaagacggtat

SEQ ID NO: 8659 - DNA, 1550 bp, unidentified
  source 1..1550: mol_type = unassigned DNA; note = element_d987d15
  misc_feature 1..2: note = core
  misc_feature 3..249: note = LE
  misc_feature 250..1449: note = CDS
  misc_feature 1450..1550: note = RE
  misc_feature 19..221: note = bridgeRNA
ctcgtattatagagtagtagttattaacgtccctctccaaggacgaatgtgctacactgtaagggatgctgtggattggttgtaacaccctaccacacgatggtttcagaaaggctccaaccacagcctctttgctagtttgttaatcagttagataccgcacgacggtttatgtagaacgaggttacaagcgcaaggagttctgtggtcccaaacagcatcgaatctatttacgaaggagcatgctctatgatttatgttggtgtcgatgttgccaaggacaagcacgactgtttcatcatgagttcggagggagaaattttgtttgacgttttcactattccgaacagcatgggcgggtttgacgacctgttctcgaagatcacttccgcttccggagatttggaaaaagtaaaggtaggacttgaggccaccggacactacagctacaacttgttaggctttttgcttgacaaaggtctcagcccctttgtcatcaaccctctccataccaatctctaccggaagagcctcagcctcagaaagactaagaccgataaggttgacgcccgaactattgcagtcatgctcgcgtctgatgtaagcctcaaatcctacacagacacagcataccacaacgaagaattaaaatcactcactagataccgatttaccaaggtgaaagagcgggctaagcttaaatcatctatttcaagacttgtaaatatcctctttccggagttggagaagttagtgccttcgatccacatggtttctgtttacgcgctgttgagcgagtttcccggtgcccaccatgttgcatcagcccacatgactcgcttgaaatcgcttttgcatgatgcttcaaaggggcgttatgatagggacaaggcggttgagttccgcgatgctgccagaaactccatcggctctcgtatgcccgctaaatccctcgaaatgaaacacacgataagtctgattagggaactggattctgagatcgaggagattgaatctgcaatcaaagggatcatggatgaaatggcttcccctatccttaccattccgagtatcggctatcgcatgggcgcaatgatccttgctgaaattggagacttctcacgcttcgagtcgcctgataaaattcttgcatacgccggtctatcgccgtcaacataccagtcagggcaattgacatcatcttattcccacatggaaaaacgcggctccagatacctgcgctatgcccttttcaacgcctccaaattcgtttgtcattgggatgtgcacttttgcggcttatcttgcaaagaaacgttcagatggcaagcattacaatgtggcgatttctcatgcagcgaagaaattggtcagattgatatttgctttagaaaaatcccggctgccttacatgcaaactgcctaatccttcaatattcgatattttgaaaatttgcgtttacggaacgctctgtttgtcatgcatatttttactgatttacaaaaactcatagtaatttgaattttagtcttgacttttaatagttagt

SEQ ID NO: 8660 - DNA, 1401 bp, unidentified
  source 1..1401: mol_type = unassigned DNA; note = element_d990c89
  misc_feature 1..2: note = core
  misc_feature 3..79: note = LE
  misc_feature 80..1120: note = CDS
  misc_feature 1121..1401: note = RE
  misc_feature 1118..1388: note = bridgeRNA
tgatggggtggacggccctcgacggcatcgattgtgccagaatgaggtcgttgcagatctcagacaaaggaggccgtccgtggaacagattagccgaatcggcatggatacgtcgaagcgttttttccaacttcacggggtgaacgccgccgagaaggtggttttgcgtaagaagttgcggcgcaaggagatggtcgagttcttcgagaagcttgcgccaacggtgatcgggattgaagcctgcagcgcctcccaccattgggcgcggcttttacggtcgttcggccatgaggtgaagctgatcgcggctcaactggttaaaccgtatgtaaagcgcagcaagaacgatacggctgacgccgaggcgctttgcgaggcgatgagccggccaacgatgcgttttgtgccggtaaaaactgccgaacagcaggcggccctgatgctggtcggcctgcgcgatcggctcatccgcaaccgcacgcagctttcgaatgccattcgcggctatgccaccgagtttggctttaccgccgctaaagggatcgcgcacctcgagccgctgctcgaacacattcaggcggatgagaacgtgcccgacctggctcgcgagctgttcgcggcgcaggctgaagaatatgctcagttgcaggcgcaaatcgccgaagttgccgccaagctcatggcttggcacaaggctgatgaatgcagccgacgtctcgccaagatccctggcgtcggtccgatcggcgcggcgcttttgatgatgaagaccccggcgcctgagctattccagtcagggcgccagtttgctgcctggatcggattgacgccgcaggatcattctacggccggcaaggtcaggcttggcgccatcacccgggccggcgacgaagctttgcgcgccgtgttggtgtcgggggccaccgccgtgatcaggcatgccgttcgctgcggaggacgcgcgtcgccgtggctcctcgatcttctcaagcgcaagccgccgaagctagccgccgtagcgttagctaataagatggcccgtatcgcctggaaactgatggtcacaggcgaaaggtacgccatgacattcccgcctgtcgctccggcgggcgcggcatagagatcagccagccacggggagcaacttaactgcaaccgtgctgagccgatgccggaacttgcaaggtgacaagcagatggtgtgatcgatcgatcctagacgcgagatactccgtggaccccactgaccgcaaaggtcgccggcgtgtttggaactcgcgtcgcggaaaccatcttggccagcgttcatatgcgagcgcgacaacaggccggacatatggacgcaagcgatcagatcaaaccctgtagaaagacccttgtgaggagggggccgtccacata

SEQ ID NO: 8661 - DNA, 1313 bp, unidentified
  source 1..1313: mol_type = unassigned DNA; note = element_d991035
  misc_feature 1..2: note = core
  misc_feature 3..8: note = LE
  misc_feature 9..1079: note = CDS
  misc_feature 1080..1313: note = RE
  misc_feature 1081..1307: note = bridgeRNA
ttaattagatggtacgccccacacctacactaaactcagctatgtcgctgaacttcgggaggtgccatcatattaaaactatcggtattgatctaggtaaatctactttccatgtcgttggtcatgactatgctggccaacaacgttatagacacaaattctctagatcaaagttacttcagtttatctcggttcatgagccagtattaatagcaatggaagcttgttgtggagcgcactggcttgctagaaaatgccaagagtatgggcatcaagttaaactgatccctccacaatatgttaagccctatgttaagagtcataaaaacgacttcattgatgctgatgcgattgctgaagctgcaactcgacctaggatgaggtttgtctcacctaaaactgagcaagcgcagctaggagtagtaatccgaagaatcagaacaggctatattcgagagcgcaccgcagtcatgaaccgtataggctcaatcctcactgaatttgggttcagctttccacgcggacacgcaaatatgaaacggctttttcagtggttggctgatacaggccaacaggttccacctttgcttatttttgagttgcgaaatcagcttgatcattacaatgagcttaataacaaaatcaaagaacaagacaaaaagctagagactctaaatagtggtaatgagttattcacgattttacaaacagtacctggagtcgggcctatgaccgctgcttgctgcatatcttcggtgtccgatcctgaagatttttctaatggccgcaacttcgctgcatggctgggtctcgttccatttcagtattcaacaggtgggaagccgagaatgcttgggatctctaagcgtgggaataaagaattacgagaactctttatacacgcagccagagcagtactctggagagatggaacggctgaaaaatattttggtaagtggctaatagagctaaagcatcgaaagcctttcaatgttgctttggtagcattagcgaataagctagcaaggattgcttggtctgttatggcaacgaaaaagccttttgaaataagaagataaatcaagtttgcatatgaaaatgaaagatgacaaaacggttagaccaccagattgaagaccttgtggacagaacagcaacttagagtgctttctcatttttgaggacaatctggcgcggatctcatcgtagagctggggctaaagtaaattggtctcaattagactctgaatacattagcgcaaaccaactccgtttttttggattttcacttgcaaaacggggcgtaccataca

SEQ ID NO: 8662 - DNA, 1381 bp, unidentified
  source 1..1381: mol_type = unassigned DNA; note = element_d9990c5
  misc_feature 1..2: note = core
  misc_feature 3..86: note = LE
  misc_feature 87..1151: note = CDS
  misc_feature 1152..1381: note = RE
  misc_feature 1150..1369: note = bridgeRNA
tgatgctgtggacggctcctccaccggcacgtgagtgccatagacgtgggtgctgttgaagctcccacgattcggaggagccaaacatgcaagcgatttctacaatcggtctcgacatcgctaagtcggtctttcaagtgcacggcgtagatgatgccggtgaggtagtcatccgccgtcaattgaagcgtcggtacgtgctggcattctttcagaagttgccaccgtgcctggtcggcattgaggcttgcgcctcgtcacaccattggtcacgtgagctcaaagcacttggccacacggtgcggctaatgccgccggcctacgtgaagccttacgtcaaacgacagaagaacgatgccgcggacgcggaggcaatctgcgaggcggttaggcggccgacgatgcggttcgttgagaccaagacgcccgagcagcagagctgcttgatgctccatcgcacacgtcacctcgttattcgccagctgaatgcaataaccaatgcactccgtgcgcatcttgccgagtttgggattgtcgcgccggtcggccgccgaggggtcgaggagctccttaacgtcatcgccgatgccaaggacacacgcgtgcccgaggtagcgcgtgcatgtcttgctgctctcggcgaacaattgtgcgttctcaaggcacatgtgttgaagttcgatcgtctgatcacggcttggcatcggtccaacgagacgagtatgcgattggatgcgctacccggcgtcggaccggcgttggcgaccgcccttgtcgccagcgtccctgatccgaaggcattccgatcaggccggaacttctcggcctgggtgggcctggtgccgaagcagaactcaagcggtggcaaacagagactgggcaacatcagcaagcaaggcgaccgctatctacgcagcctgttcacagccggagctctagccgtaatccgctatgccaagatccatggtaccggacatcggccctggctcactgcactgttagcacggcggtccaccaaggtcgctgccgtcgcactcgccaacaagatcgccaggatggcatgggccatgatggttaggggtgaacgttacagagaaccctgtcgcacttgcggcgtaaacgagatcgcgccgacactcggcgtgatgtgaagagttgggagggcgaacagcacgtaatgcggagccggttgaaccggcgatcaggacaacccacaagtgccattgcatcatcgaatgcgggtgattgaccgggacctgatccgcggaggccattatggccagcggtcatgtgaaccgcacaaacaggccgaacacatggcagcaccgaccagcgacgcggacgtgaagtttttccttgccaactcggagccgtccacaca

SEQ ID NO: 8663 - DNA, 1380 bp, unidentified
  source 1..1380: mol_type = unassigned DNA; note = element_d99a6a2
  misc_feature 1..3: note = core
  misc_feature 4..77: note = LE
  misc_feature 78..1106: note = CDS
  misc_feature 1107..1380: note = RE
  misc_feature 1109..1367: note = bridgeRNA
tgctggtgtggacggcctctcatccccacgtttttatggcgctctaggcgtcacagagagatgagaggaaagtcccaatgaatgttcccgttcgtatcggcatggatacctcgaagtcggtgttccagcttcacggtgttgatgagaatgaggtagtggttgtccggcgccaatttcggcgagccgagatgatccgctacttcgagcggcttccgccggttctcgtcgccatagagtcttgcggcagctcgcaccattgggggcgcctgctccaatcgttcgggcacgaggtaaagctaattcctcctcaatacgtgaaggcctacgtgaagcgcggcaagaacgacgcggccgacgccgaggcactgtgcgaggcggtcacccggcccagcatgcgattcgtaccggtgaagtcgaaggaacggcaagcggcttgcatgttgatgactgtgcgggaacgtctggtcagcgtgaagtcgcagctctccaatgctttcaggagctatgccgctgagtttggtatcgtcggccccgccggccggcagaacgtcgcggcactcatcaaacgtgtgctcgaagacgatagcctgccggaaatggcgcgggatctcttccgccttcaggcggacgagtatgccgcggtccaagctcgcctggcgaagatcgaggccaagctgctgaagtggcatcgcgaggatgacatcagcaggcgtattgcgacaattcctggcgtcggtccgattgggtcgtcgatgctcagcatgaaggcgccgccgcccgagacgttcagatcgggtcgcgactttgcggcatggctcgggctgacacccaaggatcattcaactggcggccggcaaaggctcggcggcatcacaaaggccggagattctatactgcgatcgacgttgatcgtcggtgcgaccgcactgctgaggcatgtccgaaagggccgtcataagcccacaccatggctcgcttcgctgctggagcgaaagcctccaaagttggtcgcggtggccttggccaacaagtttgcccggatcgcttggcgcttgatgatatcgggcggcgtgtacaagcagccggtagccaccatgccgacttgatctgaaatcggcccgcgagcaagattgctcggcggattgcccacgtgcccacgaacttgcaggacgcagtagatggaaggaccgatcggtcgatacgcgcgagcttccgaagattacactggcaccaagaatgtcgcccatgtgcttggagcgtgcgtagcgaacaccatctcggccagcgggctttgcccgcgcaaacaggccggacatctgatagcaagcgatctggccaaaagtctgctacaatcctgacaagtggggggccgtccacatc

SEQ ID NO: 8664 - DNA, 1428 bp, unidentified
  source 1..1428: mol_type = unassigned DNA; note = element_d99b599
  misc_feature 1..2: note = core
  misc_feature 3..343: note = LE
  misc_feature 344..1297: note = CDS
  misc_feature 1298..1428: note = RE
  misc_feature 7..224: note = bridgeRNA
ttcgtattatgaggtcagccagtttttactggttgaccatttttctttcagtggtgtatttatcggtagccggggcagaacggtcgtacccctgggaacacatcccgtcgctaaaactgttcgccccctacttgtagaaaccatgttttagctggttgggacttggatctcgcataacaagcgatgctgtggaactacgagtcagtataggggttgccggcaataaaataatgaagggagcacatcatgaatccggtcattggtctggatatttttagaatcaacggggcattaccatcagcctgttgtacaatttcttgaagcacaagatattctgttcttagtggtaaatccactcatatcctaccaagccaagaagtctagtcttcgtaaagtgaaaacagatgctgtggatgcctatcagctctgtcagctttactacaaagaggagttcgaaacccacaaacaaagaggaattcagctactcaatcttcgtcacctgacacgtcagcacgaatcaattactcatatgtatgtccaagctaaactgcattttcaagctgtgctggatcaagtttttcccgaatacagaggagtttttggggatctgtattccagagtatctttgttgcttctcaaggagtttccaacttcaaaattcattatgaagtccggtgaagctaaactggcagatcggatcgcatgtctttgccccagacgttcagacaattgggccaaggataaagcccggcttattatgaacgctgcagcaaacaatccatttcaggagaccaactataacagccatcttattagcatagagctgtacatcgacctgctccttcaataccaagagcatctagcccaccttgaaaataagatcgatgctcttgctaaagaagttgatgagtttatgattatccaatcgattcccggaatcggtgacagaatcgctgcaacggttttgtctgagatcggggaaatccatcggtttaatcacgctaagaaattagtcgccttcgctggaatcgatcccagtgtttattcgtcgggaaagtttaccgcgacaacgaaccgcataaccaaacgaggctctaaacaattacggcatgccctctatcttgctgtcttatgtgggctgaggaattctaggaataagaagctacggacattctatgataagaaacgtgaagaaggaaaaccataccgagtagcaattgtagcctgcattaacaagctccttcactgggtgtacgccatgttaataaggaaagagtccttccttgatttagcttaaaacccacacttctcatccaaacgaaaaaccttccaagcatctacaaagaaggttcttaagcatgccctttttcagtataagggttgattctaagtaatttaagagaaaaatgttgacaaactattagctgg

SEQ ID NO: 8665 - DNA, 1411 bp, unidentified
  source 1..1411: mol_type = unassigned DNA; note = element_d99ea48
  misc_feature 1: note = core
  misc_feature 2..78: note = LE
  misc_feature 79..1101: note = CDS
  misc_feature 1102..1411: note = RE
  misc_feature 1184..1402: note = bridgeRNA
taatgagatggtccgccgcttgcttcctttgcctttgcggaggattgtggatggcaggttttcaggaggatcatcgctatgcaaattcattccatcggcatcgacctgggcaagacgaccttccaccttgtggcgttgggagcagccggcaagatgctggtgaagaagaagttcacgcagaagcagctgctgacgcacacggctaacctgcagacatcgctcatcggcctggaggcctgtgccggcgctcacttcctcggccgtgctctgcgcaagcagggccacgatgtgaggctgatcccagctcagttcgtgaagccctttgtgaagtccaacaagaacgatttcgtcgatgcggaagccatcgccgaagcggtcgagcgcaagaacatgcgctttgtgccgatcaagaccgacgaccaactggacctgcaggcgatccaccgggttcgcgacaggctggtctcacgacgcactgccgtgatcaaccagatccgtgcatttctgttggaacgcggcttggtgtttgcgaagaggccggcccagctcagggccgcgatggcagacgttcttgagaacgcagaagctgatctcacgccgatgatgcgcaacctgatcaacacgctgtgggatgagtggaagaccgtcgaagcgcagatcgaggagcttggggatgagttggaacgcatctccgctgcggatgccggctgcacccgcattcggcagattccaggcatcgggccggttgtggcgaccgctatcgtcgcggcgatcggcaacggtgctgccttccgcaagggacgggacttcgcggcgtggctgggcatcgtgccgcggcagtactccaccggtggcaaggcccggctgttcagtatcagcaagcgcggcaacgtgtacctgcgcaagatgctgatccatggcgcgcgagccgccgtgctccgcgtcaagcgggacagtgcgcccttcggtgcgtggctggatcgactcgatgcccgatctcccaaaaacgtcgtcgttgtggccatggccaacaagctcgcccgtatcgcctgggcggtgttgtcgagcggtaacgactaccgatcagccgtgccagcctaaccaatgcggaaaagctcgccttcggcttggaagcgctacgcgctcccacttttctgcaccacgacgacaattcgtaaagcttccccaccgaagtctgcgtagggcaacaaggacgaaagaacagtcacaacggcgtgtctgcagcctggtaccgacaatggtcttcaacgaccgtgcgacttataaggaccgacacgcgcgcaactcatcatggccaggagaactagtctccacccaaaggccgaatacatttgcgcagacttgtcttctcgaccaaacttccccttgcagtcgcgcggcggaccataca

SEQ ID NO: 8666 - DNA, 1434 bp, unidentified
  source 1..1434: mol_type = unassigned DNA; note = element_d9a061e
  misc_feature 1..2: note = core
  misc_feature 3..119: note = LE
  misc_feature 120..1157: note = CDS
  misc_feature 1158..1434: note = RE
  misc_feature 1187..1383: note = bridgeRNA
agataggatattcggcttgcgcccaccttggacggtgatgagtacggtgctgcgcttcgagctgatgatagaacgtggtctgtcgctacagccacaagcatcaggaaaggaagcgcagcatgaaacactttgttggcctggacgtctcggtgaaagagactgccatttgcattgtcgatgaattgggcaaaatctgccgggaggtgaaggttcacagccatcccgaagatttgctcgtgatcatgaaggatccgggctggaagatcgagagggtcgggctggaggctggacccttgtcgcagtggcttttcgaggggcttgcgcgcgccggattgccggtcatctgcattgagacgcgtcatgtgaaggccttcctgaaagcccagccgaacaagactgatcgtaacgatgcgcgcggaatcgctcagatgatgcgggtcaacctgtaccgtccggtgcatgtgaagacgctgacgagccaaaagcggcgggcgctcttgaccgcccgcaagcttctgcaaggcaaggcgatagcaatcgagaatgatatccgcggtcttctgcgcaattttggcctcaaggttggtgttgtgggaacagtgaagttcgaggttcgcattcgagagcttatcgaaggcatgcccgacctggaggaattcatggagccgctgcttgctgcccgaaacaagctgcgcgccgaatttgctcgcctgcacaagaaggtgctgacgttggccgaggaggatgcgatctgcaagcgcttgatgacgatccccggtgtcggtgccgtcacggcgctggcctatactgcaaccatcgacatttcgcagcgctttaaaagttccaaggcagtgggtcccattctcggacttacgccgaagctcaacgagtccggcgaaagcaggcgcgtgggtcgcatctctctgtgtggggacagcatgatgagaacactgctctatgaggccgcacagacgctgctgacgcgcgtgacgaaatggtcatggttgaaagcatgggcaatgaacgtcgcaaagcggcgagggatgcgcaaagccattgtcgcacttgcgcgtcgccttgcggtcatcctgcatcgcatgtggctggatggcaccgggttccgctggacgcgggaagctacggccccgaccatctgatctggacggccaagaaggagagagaccgaaaagttccgccccggcggacaagcgtccttcgcaggacgatggatgaggtaagttcgaattcaactccgtgccgatcgcactcgatgtcggtcaggacgccaaaaagatggaactgcctcattctcctgatcctatgctgggagggcaatgcgccgatcccgtagagaagcaagggcctgcgaaagacgctgatgtccgggcacatggaaaggctcgaagcgcttgacctgaatacgccgaatagaga

SEQ ID NO: 8667 - DNA, 1610 bp, unidentified
  source 1..1610: mol_type = unassigned DNA; note = element_d9a141d
  misc_feature 1..3: note = core
  misc_feature 4..291: note = LE
  misc_feature 292..1467: note = CDS
  misc_feature 1468..1610: note = RE
  misc_feature 48..271: note = bridgeRNA
actcgtattatatagtagtagtgtttatagtccctctccaaggaccgtatatactgctttccatagcctctctttaccttttctataggtatggctatgatatataagatactgtggattggtttttcctctctaccacttgatggtttcagaaagtgtccaaccacagtctctttgtttgattgttgatcagttagataccgcatgacggtttatttagaacgagttcacaactacgaagagcacctgtgggttctaaacagtgtcaaatacacattgaaggagatttttatgatttacgtaggtattgatattgccaaagataagcatgattgctttatcgctaattcagatggtgaagtgctctttaattcttttaccattccaaacaacagagagggctttgatgaactctatcagaagattgaatccgtttcagatgatatgactaaagtaaaagtaggactggaagccactggacactacagctataacatcttgggatatcttcttgataaaggttgcccgacctttcttatcaatccgttacttactagtctttacagaaaaagcctaagccttagaaagaccaaaacggataaagtggatgcccatacgattgctaccatgctcatgtctgatgttgacttaaaatcctactcagacacatcttaccacaatgaacaactcaagtcacttacacgctatcggtttgataaagtaaaagaacgtgcaaaactcaaaacgtccgttgctcggcttatggtgattctcttccctgaactagagaaactcgttccttctcttcatattgcctctgtctatgctatgatgagcgaattcccatctgcaaaggctatctcccatgctcacctgactagacttacccaccttttagaactggcttccaaagggcattattccaaagacaaagcaactctcattcgggaagcagctcgacaatccatcggctcggatatgccagctaaatctttggaactaaggcacaccatcaaattaattaatgaactatcctctgagattgacgaaatcgaatttcacatcaaggcaattatgactgacataaactcgcccatcacaacgattccaggaatcaacctgcgtatgggagcaatgattcttgcggaaatcggtgactttaatcggtttgattctccagacaagatacttgcctatgctggattatccccttctacataccaatctggccagttggaatcttcctactcacatatggagaagcgtgattccagatatttgcgatacgctctatttaatgctgccaagtttgtttgtatttgggatcctactttttctgcctatctggcaaagaaacgtgcggaaggtaagcattacaatgttgcggtatcccatgctgctaaaaagctcgtaagagtgatttaccaacttgaaaagacaaaacggccatacctcaaagcatcctaaattggtgtaaataaatatctcctttttgagcacctgcaaagatgctctatttgtcatgcagttttcaaggtgctgatttataaaaaatgcttttcaatatttttatcataaatacaattttagtcttgacttttaatagttag

SEQ ID NO: 8668 - DNA, 1569 bp, unidentified
  source 1..1569: mol_type = unassigned DNA; note = element_d9ad4ed
  misc_feature 1..2: note = core
  misc_feature 3..249: note = LE
  misc_feature 250..1425: note = CDS
  misc_feature 1426..1569: note = RE
  misc_feature 3..227: note = bridgeRNA
ctcgtattataaagtagtagtgtttatagaccctctccaaggtttgtatgctatactattggagatactgtggattgtttctcacttcctaccacttgatggtttaagaaaggctacaaccacagtctctttgtatatttgttaatcagttagataccgcatgacgttttatttagaacgaggtacaatcgcaaggagtaccagtggttctataaacagtatcaaaatatttactcaaaggagatttttatgatatacgttggaattgatgttgcaaaggacaaacacgactgttttattaccaattcagatggtgaagcattattcaaatcttttaccattcctaacaatcgtgaaggttttgaaaactcatttcagaaaatacaatccgtatcagatgatttaaacaaagtaaaagtagggcttgaagccactggacattatagttacaatcttctgggattccttcttgataaaggtttgccgacctacgttatcaatccgttgcataccaatttttacagaaaaagtctaagccttagaaagacgaaaacggataaagtggatgcccataccatcgcttctatgatgatgtctgatgtgaacctgaagtcctactcagacacatcttatcacaatgaggagttaaagtcactcactcgttatcgttttgacaaagtaaaagaacgggcaaaactaaaatcttccgtttccagacttgtgtgtatccttttcccggaattagaaaagctcgtgccacaacttcatatgacatcagtctatgccttattatccgaatttccatctgctcatgctgttgcatctgcacatcttaccagacttacaaatctgctctccgagagttcacgtggcagatatggcaaagagactgcgattatatttcgtgacgctgccagaaactctatcggttcaaatatgccagcaaagtctctggaactgaagcataccgttaggctcattcaggaattaacttctgagattgacgaaattgaaaatgaaatcaaaatcatcatggatgaaatcaattctcctattctcagcataccaggaatcaactatcgtatgggagctatgattcttgcagaaatcggtgacttcagtcgttttgactcagctgataagatacttgcctacgctggaatgtctccatctacttaccaatcgggacagttagataactgttactcccacatggaaaagcgtggttctcgctatcttcgatacgctctttataatgcaacgaaatatgtctgccattgggatgaatcctttggagcatatcttaccagaaagcgagctgagggtaagcattataatgtcgctttatcccatgcagcaaagaaactagtcagaaccatttatgcaatggaaaaatcaaggcaagcatacaagcatgtcgcttaattcttttctataaacatctcctagttgagtgcctataacgacactctttttgtcatgcagttttcaaggtacaaatatatctgaaatgcatttctgcaattcattcaaattttttcattttagacttgacttttaatagttagt

SEQ ID NO: 8669 - DNA, 1166 bp, unidentified
  source 1..1166: mol_type = unassigned DNA; note = element_d9b0e8d
  misc_feature 1..2: note = core
  misc_feature 3..200: note = LE
  misc_feature 201..1163: note = CDS
  misc_feature 1164..1166: note = RE
  misc_feature 3..176: note = bridgeRNA
cttgtatggttagacttgtaggggtggtgggactaaaagccagcatctgactctagccagtacagaccgtgggagacttcgtcccaccccttcaccaaagcgccgataaggaatgcatcggccatgaccgacgatagaagcaagccagcgcaacggtgaagccccgacaagcccgtaaaccctaacccggagcttttctcatggcaatgactgtctcgcaatcaatcattggagtggatgtcgctaaagccgaagtagttgtttatcaaagtgaaactgctgaaacaaagatcgtatcgaacaagaaaagcgagctgaaggcatggctgaagtctttgcctgcgggcagcgccatcgcaattgaagccaccaatatctatcacgtggataccgtcaacttggctcattcgatgggccatatcgtttacgtgattgatggatatcgccttagccattaccgcaaaggcacaggtggtcgcgctaaaacagacttcagtgatgcgcagttgctggctcgctacttgaagaatgaacaggctgatttacgcgcctggaatccgccgccgaagatttataccaagcttcaaagcttgctgcgtcgacgcgcagcgctggtgaaaatgcgtgttgcactgaatcagagctgggcgggcgagccatcactcaaggcctcgtccaagagcatttcagcgtgtcttgataggcatgaggggctcattgagaaaaggatattagatgctgttactgaggcggggcttttgcatcaggtcaagcgctgccaagccgtcgagggcattgggtttctgacagcagttgccctggtaatggcgtttcagcgaggagaatttgaaagtgctgacgcttacatcgcgttcttgggaatggacttgagagtatccgattctgggcaaatgagcggacgccgctcattgagcaagaagggagattcagagatacgcagattgctgcataacgcggcgtcagcaggtatcaggtcagaagcctggaaacctttatacgagggttatctggccaggggcctgaaaacgactcaagccctggtcatcattggccgcaagctggcgcgcatcgccttttcgctcatgaaaaacctgagcgaataccagtcaaaagcggttttgggggcttccccaaaaccatagaat

SEQ ID NO: 8670 - DNA, 1435 bp, unidentified
  source 1..1435: mol_type = unassigned DNA; note = element_d9b4ca6
  misc_feature 1: note = core
  misc_feature 2..70: note = LE
  misc_feature 71..1108: note = CDS
  misc_feature 1109..1435: note = RE
  misc_feature 1214..1429: note = bridgeRNA
taatgggatggtccgccgcctttactcagcgagcagctgagatataaggagggtacggaggaggcatcccatggaactacacacgatcggtattgatctcggcaagacggtctttcatctcgttgggcttaacctgagcggcgaggtggtggtgcgcaagaagttttcgcgcaagcaactgctgcatttcacggccaaccggcaggtcaatttgattggcatggaagcctgcggagggtcacattttctgggtcgggcgctgcgcgagcaaggccatgaagtacggctcatcccggcgcagtatgtgaagccctacgtgaagacgaacaagagcgactatatcgacgctgaggcgatcgcggaagccgtggcccggccaagcatgcgcttcgtgccgatcaagagcgatgaccaactggatctgcagtccctgcaccgggtgcgcgagcgttgggtagcgcgtcgcaccgcggttatcaaccagattcgtggattactgctagaacgcggcataacggtgcgcaaggggcggtgccatatagaagcggcattgcccgggatcctagaagacgccgacactaagctgtcgggcgcagtgcgcctgctgctggcgcagctgcagctggagctcgatcacttgcagaggcggatcgacgaagccgatacggtaatcaagcaaacggctggcgacaacgaagcctgccaacggctggtgacgatccccggcatcggaccggtgacggcaaccgcagtcatcgcggcgatcggcaacggagcggccttccgcagagggcgagagttcgccgcctggatagggttagtcccacgagaacactccaccggcggcaagcaaaagctgctcgggatcagcaaacgtgggaactcctacttgcgaagacttttcgtgcacggggcacgagccgtcctgcaacagagcgcgaagcaatctcccggtctcagcgcgtggttggctcacctcacatcgcgtacccaccggaatgtcgcaggagttgcgttggccaataagctggcgcgcatggcgtgggccgtgctcgccaagaaggaaccctatcggtacccgaggttggccgctgcaacgacagcctgactggcctgcagatgacgcctggctgaggccaggcttggaaatcgcatgcgcgattcccacatccgcaacccagcggctactactgcgagtttatgtttttttctgccaggtttgctggcgactcatgagatggcacaacggtcgaacccggcgctctcgaaacctgtaaaccggaaaagtctttccagactgcctaactaagtaggacgagggcgcagcgcattccatcatggccaggagctttgtgctccaacgaaggccgtatacatttgcgcagaccacctgtcactctcatttttcgcttgcaacacggcggcggaccataca

SEQ ID NO: 8671 - DNA, 1356 bp, unidentified
  source 1..1356: mol_type = unassigned DNA; note = element_d9bc340
  misc_feature 1..2: note = core
  misc_feature 3..72: note = LE
  misc_feature 73..1098: note = CDS
  misc_feature 1099..1356: note = RE
  misc_feature 1123..1352: note = bridgeRNA
ttaatgagatggtcacccccaccctacgagcgggttacgcttgtagggtgtttccatttctggagggccatcatgcaacgagcgacgctggttggaattgatctggggaagcatgcgtttcaccttcacggtcaggatcaacacgggaatgcggtgtttcgcaagaaggtgagtcgtaagcagttggttgagtttttcgccacattgcaagcctgcaccgtcgtcatggaggcttgtgctggtgctcaccacatggctcgcacattggcatccttcagacatcacgtcagactcatctcgcctcaattcgtgcgtccgttcgtgaagagcaacaagaatgatttcgttgatgccgaggcgatttgcgaggctgcatcgcgcccatctatgcgatttgtcagtccgaagacagaatctcagcaaacgctatcggcgcttcatcgtgttcgcgattcgttggtgcgcgatcgtgtgaaagcagtcaatcaggtacacggttttcttctcgagttcggcgtaagtttgcctgtgggcaagactgttatgacccgtctcccagccgcgctcgcagaacatgcgttgccgcctcggcttgtcgccatccttgaacgtttgcacgagcattacaagtatctgagcgaccaaatcgacgagctggagaaggagatgtacagacagcttgctgacgacgaacttggccagcgcctactctcaatcccatgtgtcgggccaatcaccgcaagcgtattggccgctgagatgggtgacggcaaacagtatggctccagccgagattttgccgcttcgatcgggttggtgccccgtcaatacagcacaggcggcaaggcgaacctgcttggaatcagtaagcgaggggacaagaacattcggcgtttattggtgcagtgcgcgagagtctatatgcagcgccttgatcgacaagtagggcggttagctgactgggttcgctcgatgctcacgcgacgacattcaaacgtagtggcttgcgcgttggccaataaactagcgcgcacggcttgggcgctggcaacccacaacgccacgtttgacgcaggagcgatcgtcatgtcggcttgagattaaggtccagattttaatttctgaccacccaccaggttttgcgaccgctgaaatttgatgacgtgaacggcacaccggcctgacggacaccctaccgaaaaaattggctttcaaggccgaggcgtttttaaggaccgtcaggcgcgactctcatcgtggcgcagggttttgtccctaaaacgacgccggatagatttaggcaagccaatcatttagtcaaaaattggggttgcaaaaatgggggtgaccatagat

SEQ ID NO: 8672 - DNA, 1353 bp, unidentified
  source 1..1353: mol_type = unassigned DNA; note = element_d9c0647
  misc_feature 1..2: note = core
  misc_feature 3..229: note = LE
  misc_feature 230..1333: note = CDS
  misc_feature 1334..1353: note = RE
ctaatgggaagtgccggggttgccgttcaggcagactcggtgcctggtagccgctggtgagtgagcacttccgccacctggacttcgagtcctggggtcagagcgtgccttcaccggtggtcaggggctgttgatcgctgatgggatgtcgtgccccccgaacgttggggtgagcactggtccattaggtcgccgacgcgctcctgcgggctgctgtgtcccgttgtcgatgttggaggtctgggtgctgttggtcggggatgactgggctgaggaccaccacgacatcgaggtccaggacgagacgggccgggtgttgaagcgggctcggctggccgaggggatggccgggatcgcccggttccacgacctcctcggtcggttcgtcgctgacgacgctgaggcgtcggagagcgacaagggtgacgcccacgccctggccgacatgatccgcacccgccgccaccagttgcgcgaggtcgccggggactccgggatcgccgaggcggtcaaggtcgtcaccagggcgcatcagacactgatctgggaacggacccgccacatgctccgccttcgggcggcgttgcgggagtacttccccgccgccctggccgcctacaagtccctggacctcaccagcgacgcggtgctgaggctgctggtcaaggcgcccacgcccgaggccgcggcgaagctgacgatctctcagatcacggcctgtctgaagggccgccgcggcatcccggacaaagccgcagcgatccaggacgtcctgcgcgctgagcacctcgggcaagcgccgttggtcacgaccgcctacgcggccacggtgaagtcactggtcgcgatcatcaccgtcctcaacagcgagatcaagaccctccaaggcgaggtcgaggcccattttggccgacacccggacgctgagatcatcctctcccagccgggactgggtgtgatcctcggcgcccgggtgctcgccgagttcggagacgcccccggccgctacgcctcggcgaaggcacgcaagaactacgccggcacctccccgatcacccgccagtccggcaagaccaagaccgtccaggcccggttcgtccacaacgaccggctcatcgacgccctccacaatcaagcctcgtgcgcgatcctccacgacccgcacgtccgcgcctactacgaccagctcaaagcccgcgacatcagccacaacgccgccctccgccaggtcggcaaccgcctcgtcggcatcctccacggctgcctcaaaaccggcagcatctacgaccaagcaaccgcctggtcacaccacgaccacgacctcgccgcttgacatccaacctccagggatgt

SEQ ID NO: 8673 - DNA, 1224 bp, unidentified
  source 1..1224: mol_type = unassigned DNA; note = element_d9c1473
  misc_feature 1..2: note = core
  misc_feature 3..210: note = LE
  misc_feature 211..1200: note = CDS
  misc_feature 1201..1224: note = RE
  misc_feature 11..191: note = bridgeRNA
cttgtatcttgctcatgtcgtgattagctatcacgacatgaaacagagtgagcttcgaaggagagtcagggctgtaaaccttgtgtgtgagtttaagccctctgtttcacctttcacgccagcattaacattgaacggttacctagagcactgactctgaatgtacaagcgaaacgggcgtgatggcttcagtgaaagggggacatcattatgtattacgtaggtattgatatcagtaagcgtgtcgtcgacgtgtgtctgttagttgatggcattaaaggtaaacgtaagacgaaaacgttacccaatggccccaacgcggttgaggcgttggctgaatggctaacgcgacaacaatgtgacccgggtcaggcccatatcgttatggaagccacggggatttatcacgaacaccttgcttatggtcttcatcagtcaggtattgccgtatcggtgataaatccccaccgtttgcgagagtttgccaaaggaatggggatactcacgaagacagataaagtggatgcctgtgcgctggcctgttatggctgtctgagacagccggagtgctggacgccgcctgctccagaaataaggaaactcagggcattattgcagcacagggatagtctgctgggtgataagcagcgcctggaaaaccggctgagcgcgctaagttcgacactgacaacagaagaagtgatggcatcactggaattgatggtgcagcacgtaaaggatgagctggagcatatagaaagactgatagcagaccacatagacaaataccccggactcaagaacgacctgaaacttctgaaatcgatagatggtgttggagaccaaatcggatggaatatgttggccaccatccggggcagtaacttcaggagtgcggaacaggtggcggcgtatctgggggttatcccggtagagcgtcgctcgggtacctcggtacggggcagagccaggttgtcgaaaatagggccgcctgctatcagggcaaaactgtatatgggagcaatagcggccatcagtcacaatcatcatgtgaaggcgcaatacgagagactgttgcaaaaaggaaaggcaaagatgctggcgataggggcagcgatgaggaagctggtccatctgtgttatggcgtgctgcatacgcagcaacaatatgacaggaattatggggtggtagccagttgaaaggcttgactgacaacacggtta

SEQ ID NO: 8674 - DNA, 1430 bp, unidentified
  source 1..1430: mol_type = unassigned DNA; note = element_d9c5b18
  misc_feature 1: note = core
  misc_feature 2..67: note = LE
  misc_feature 68..1117: note = CDS
  misc_feature 1118..1430: note = RE
  misc_feature 1208..1424: note = bridgeRNA
taattggtatggtccgccgcttcttgccccttcggggactataagaggtgagcacaggaggcggtccatggaactcgacacaatcggcatcgatctgggcaagacggtttttcacctcgttggtctgaaccgtgctggtgaggtagtggtacggaggaagttctcgcgcacacagctgctgcgcttcgccgcgaacctgcgcgtcagactgattggcatggaggcgtgcggaggctcgcacttcctcggtcgcagcctgcgcgaacagggccatgaggttcgcctgatgccagcgcagtacgtaaagccctacgtgaagacgaacaagaacgactacatcgatgccgaagccatcgctgaagccgtggggcgagcgaacatgaggtttgtgcccatcaagagcgatgaccagctggatatgcagtcgctgcaccgtgtgcgtgatcgctgggtcgcccgcagaacgtcggcgatcaaccagatccgcggactcttgctggagcgcggcatcaccttccgcaagggacgccgacatgccgaagcttcactgcccgccatcctggaagacgccgataatcgcctgtccggatttctgcgcatgctgctggcgcagctgcagagcgagctgagacagctgcagagccatatcgaggaagccgatgcactgatcgcgaaggccgcacgggagcgggaagcctgtcagaggctgatggcgattcccggtatcgggccgctgacggcgacggcggtcgtagcttccatcggcaacggcgccgagtttcgcaaggggcgctcctttgcagcctggctgggtctggtaccgaagcaggagtccactggcggcaggcagaagctgctgagcatcagcaagcgcggtaaccactacctgcgcagattgtttgtgagcggagcacgcgctgtgctgcagcgcagggacaagcagtcgtcaggactcagtgcgtggctcggccagcttgcatcgcgagttcacaccaacgtcgccgcggtggcgctggccaacaagatggctcgtgtcgcctgggcggtgctggccaaaagcgaagcctatcggccaccgctttcggtgaccccaacggaggcactggcctgcaattgacgcctggctcagaacgccaggcttggaaatcgctctggcgattcccacaatcgcacaccagcgacggctgatcttcaataaggttttctgccaggtctgctggcgaacagcgagatggcaaaatggtcgaacccggcgctctcgaaacctgtcatacggaacagccctctgaggcttcgaaagtagttaggacgagagcgcagcgcattccatcgaggtcacgagcttcggctcaatcaaagaccggatacatttgcgcagacccaaccgtccatcttcacttttcgcttgcaacaaggcggcggaccataca

SEQ ID NO: 8675 - DNA, 1970 bp, unidentified
  source 1..1970: mol_type = unassigned DNA; note = element_d9c62e1
  misc_feature 1..4: note = core
  misc_feature 5..205: note = LE
  misc_feature 206..1405: note = CDS
  misc_feature 1406..1970: note = RE
  misc_feature 15..176: note = bridgeRNA
ctccgtaagtttggtggtggcccgagggggccgaatgtggcttatctgtcgtcgccgatcgtgtggctcagcaggagtggccgtccggtcccctggggtgcccctggccgctaattgagatgtgcgtttcggtcgctgtttacggagatgacggttgggtgctcctcgggcctacacgaggtagatcagaaccgaggaggacgagttgaacgatcaacgagctcacgtctgggtgggcatcgatgcaggcaaggcgcatcactgggtgacagcgatcgacgaccagggcgccatgctctggacgaagaaagtgagcaacgacgaaggcgagatcctcgattcgatcgccgaagtgctcgccctcggcgagaacttcacctgggcagtcgacatcgtcggcacgacatctgcgctgctcctcgccctgctcgcaagccacggccagtccgcgttgtacgtccccggacggatcgtgaaccggatggccggcgcgtaccggggcgaagcgaagacggacgcccgggacgcctacgtgatcgccgaaacagcacggcaccgccacgacctgaccccgatcaggatgccggtcgagatcatcgccgacctcaagctcctgatcgcccaccgcggcgatcttgtcgccgaccgcgtccgcatgctcaaccggctccgtgacgtgctgactggcatcttcccccgcctcgaccgagcattcgactacgccaaacacaagggcgcgctcgtcctcctcaccggctatcagactccaatcgcgcttcgccggatggggcaggcgcgcctgacgaagtggctgagccgccgaggcgtgcagggtgctccctcggtcgcggaggctgctctcgaggccgcgagcgggcagcagacgcagatcggcaacgagagaatcgcggcgcagatcatcgccgaccttgcaacgcagatcctcgccctcgacactcgcctccgagcgctgaagaaccagatcaccacgatattccgcgcgcacccgcaggccgagatcgtcgagtcgatgcccgggatgggtccgatcctcggggccgagttcctcgcagcagccgggccactcgacaactacgccgacgacggccacctcgccgcagcagctgggctgatacccgttccgcgagactccggacgtcgaaccgggaacatgcaccgtcccaagcggtacaaccgacagctgcgccgctcgctctacctctcagcgcaaacttcggtcatccgcgaaggacccaaccgcgacttctacctcaagaaacgcggcgaagggtacaagcacacgcaggcactcctcgccctatcccgacgacgcgtcagcgtgctctgggccctgctgcgcgacaaccgcaccttcacccaagcacctccgagtcgcgttgcgtaggcgagctcgacttcggaaggagcgctatgcagagggactctgaacgttcgcagccgcagtgagccgccgatggcggtgccaccgcgggctggagggcgatgcctcttcggacgccgtagcgtgggcagcgctatcgtcaagctcgacaaggggagggccgatgcgagccgaatggaacgaatcgttctttgatgcacagcgcgaggagccgctgatctactgggtctgcttctggaccggcaccgacgacgagctggcggtgacgcatgacccgcagcggatcacggatgccagctcggtcgaggaagttctcgcctgggtgcacgacacaaagggcgagcgagacttcgagctgttcgtggagacccacagcaacgccgagacccgcgagcacggctggacgcgcacccgaaatctcatccacctcgccggcgattaccgcccacccggaacgacgtccactctctccgcgagccttgagaactagcaggaccccttctgaccgtcgacttcccgcgtcaacggctcgaagcgggactaggccgccttgacgtcctcattgaga

SEQ ID NO: 8676 - DNA, 1432 bp, unidentified
  source 1..1432: mol_type = unassigned DNA; note = element_d9c6dbe
  misc_feature 1..2: note = core
  misc_feature 3..120: note = LE
  misc_feature 121..1149: note = CDS
  misc_feature 1150..1432: note = RE
  misc_feature 1185..1385: note = bridgeRNA
agatggggtaatcggccggccggcgtttagagcgctggcgaatgtgggtgctgcgcttcaggctgatggtgaaacgaggtctgcattcgcggcctcaagcatcagaaggagaagcgcagcatggaccattctgccggactagacgtatcagtcaaggagacaagtatctgcatcgtggatgacacgggcaggatcgtgcgggaagtgaaggttgcgagcgagccggaagatctgctgcaggttctgagtaaccccacctaccactttaagcggatcggattggaagccgggccgctgtcgcaatggctttacagcgccctcgccgaagagggcttgccggtgatctgtgtcgagacgcggcacatgcgggcggtgctgaaggcgcagatcaacaagaccgaccgcaacgatgcacgcggcatggcgcagatgatgcgggcgggactttatcgtccggtacatgtgaagacgttacgcagccagaaactgcgaatgctgctgacccatcgcaagctgctgcagtcgaaggctatcgctatcgagaacgacctgcgcggtactttgcgcaacttcggcctcaaggtcgggatggtcgggaaggtgaagttcgaggcgcgcatcaaggagcttgtcgggaacttgcccgatctggcccttctggtcgaaccgctgctcgtcgtccggcgagtgcttcgcgagcagcttgtcatcctacataaacgtttgctggccatcgtgcgggacgatgaggtgtgtcggcgtctgatgacgaccccgggtgttggccccgtagtagcgctgacctatcgtgccaccgtcgacgttcccgctcgcttccgaaaatccaaggcagtcggggcagtgtttgggctgacgtgctccaagtatcaatcgggtgagatcgatcggagcggcagaatatcacgctgcggagatgagatgatgcgggtcatgctctacgaagccgctcagagcatgttgcgttcgaagaaatggtcctggctcaaggcctgggcgatgcagatcgccaggcgccgcgggatgaaaaaggcaatcgtcgccttggcgcgtcggttggccgtgatcatgcaccgcatatgggttgacggcactgagttacgctggacccgggacgtcgcagcagcatgagagcctcacaggatcaaaggcgataggagaacactcgagctccaccgagcggtggaatgatgtccctcgcgggacgatggatgaggtgagttcgcatgtccgcttggacctgccgtcacactgacggtaaggccgccgcaaagattgttccacctcgtcctcgaatcccatagtggaagggccttggtgccgattccgaagagaagcgcgagcccgtgagcgacatcgacactgcagtggtggatagtctgaaagtgcttgacctcaaacggccgattagaga

SEQ ID NO: 8677 - DNA, 1457 bp, unidentified
  source 1..1457: mol_type = unassigned DNA; note = element_d9ca7cb
  misc_feature 1: note = core
  misc_feature 2..329: note = LE
  misc_feature 330..1442: note = CDS
  misc_feature 1443..1457: note = RE
  misc_feature 45..219: note = bridgeRNA
cgttaccttgttgacaggtcctgattggcgggtgttgattgggattgtcggccagccgccctggcatggtgtcttgcccctgtctatccaatgatccgggggtgttgccaccagggtcggttgccagcatgtgatcgctgattaggggctcggcaccaaggatggatgcctgtcgtaacgtggatgtgaggcgtgctgtctaggctcggccgacttatggtgcaaaccgagaggacaactgccatgagaactgaccgaccagacattttctaggactggacgtcggcaagaccgaccactgggcctgcgcactaaccgattccgggcaggtgttatggaataagaccctgcccaacaacgaacaaaaactcactgatatctacacgaatctgtcagcgaaaggctctgtgctggtggtcgtggatcagccggcaacaatcggcgctctcgccatcgcggtcgcccaacatatgggcatcgaggtcgcctacctgccggggctgaccatgcgccggatcgctgacctatacccgggcgaggcgaagactgatgaaaaggatgcgttcattatcgctgacgcagcccgcagccttccccacaccctgcgccagctcaccaagaccgaccaggacgaggcaggactggcgatgctcaccggtttcgaccttgacctctcacggcaggtcaatcaagtctccaaccggatccgcgggctgttcacccaaatccaccctgaactggaaagagttctcggaccacgcctggaacatgacgcgatcctcgaagtgctcgctacctggccaaccccgcaggctctacgcaaagccgggcgagccagaatggatgcgaaactcaaaaagcacggagctcgccgccacgctgcatggaccgaggatattcttaccgcgctagcgaagcagtcggtgatagtcaccggcaccgaagccgcgggcctagtcatcccgcacctggcccgccaactggtgagcctgcacgctcaacgcgccaacgtcgcttcagaggtagagaagatcgtggccacccaccctctttacctggtcctgagatccatgcccggcatcggtctcaggaccgctgccgtgatcatcgctgaacttgcagggaagaccttcaccagctcagcagccctggcctcctacgctggcctggcaccgaccacccgtcagtccgggtcatcgatcaagtctgaacgagtcagccactcaggcaacaaacgcctcaaacgtgccctgttcctgtcagctttcgccgtgatccgcaccgacccggtcagccgcgcctactacgaccgcaaacgagcccaaggcaaacgacacaaccaagccatcatcgccctcgcccaccgcagactcacagtcctgtacgccatgctccgagacggcaccctctacgacgtccccgacaccgccctggcagcttgacacacaacatagggg

SEQ ID NO: 8678 - DNA, 1386 bp, unidentified
  source 1..1386: mol_type = unassigned DNA; note = element_d9d43bb
  misc_feature 1: note = core
  misc_feature 2..272: note = LE
  misc_feature 273..1106: note = CDS
  misc_feature 1107..1386: note = RE
  misc_feature 1127..1372: note = bridgeRNA
tgaaggtgtggacggctcccgccttcggcatttgagtgccaagattgggtttgctgttcaacacaatcaggggagccgcccatgagcgagattatcacgatcagtttggacatcgccaagaacgtatttcaggttcacgggattgatgggtcgggaggtatcgttatccgccggaacttgaggcgcggggatgtagctgggttctttggcttaccccctgcctggttggcatggaagcctgcgcgacttcgcattattgggctcgagttctgatggaactgggtcatgaggtgaagctgatgccgccgacctatgtgaaggcttatctcaagcgtcagaagaacgatgccgcggacgccgaggcaatctgcgaggccgtgacccggccgaacatgcggtttgtgctagtgaagtcagccgagcagcagggcgtgttgatgcttcaccgaagtcgggagctccttatccgccagcgaacgatgctgatcaatggactgagggcgcatctggcggagttcgggatcgtcatgcggcaaggcatcgccggggtctcgaccttgatgacgctggtcgaagattacgagcatgacctcttcccggagattgcccgggaagccttgttgagtttggtggctcagttgcgcgacgcctatgaacggatatcggtgatcgaccggcaaatcctggtctggcatcgttcaaatgaagagagccggcggcttgagaccatccccgggatcggaccgatcacagcgagtgcgatggtggcgacgatcacggatcccaccctcttccgcagcggccgagacctcgccgcctggattggccttgttccccgccagaactcgaacggcggcaaggaacgactggggcacataagcaaaaagggtgacagctatctccgccggttgctcatcaccggtgccattgccatgttgcggtttgcccacaaagggcaaggcggtcgaacgacacaatgggcggcgaacttgctcagccgcaagccttacaaggtcgccgccgcggcgctggcaatcaagatggcgcggatcgtctgggcggtcatgacgcgacaggaagagttccggccacggctggcaagctgacatcgccgggacgacgttgacttgacttgaacttgatggacagtgaattggtgaggtgctgaggatgtgatgacgatacgggtcgacacccgggatcagaagaacccgtctaacagtggctgcgtctttgaacgcgatgacctgaatgggatctgatcttgcggacttcatcatggccagcggcataacattgccgcacatcaaaggccggacacatgaccgccaccgacccaagcgttctctatccaaaagtccttgccaaaagggggccgtccacaca

SEQ ID NO: 8679 - DNA, 1330 bp, unidentified
  source 1..1330: mol_type = unassigned DNA; note = element_d9d4658
  misc_feature 1..2: note = core
  misc_feature 3..68: note = LE
  misc_feature 69..1034: note = CDS
  misc_feature 1035..1330: note = RE
  misc_feature 1097..1328: note = bridgeRNA
ttaatgagatggtcactccctccttcccggtactatgctgaggacaggctttcattcggagaactatcatggaaaacattgcgctcattggtatcgatctgggtaaaaactctttccatattcattgccaggatcgtcgcgggaaggctgtttaccgtaaaaaatttacccggccaaagttgatcgaatttttggcgacatgccccgctacaaccatcgcaatggaagcctgtggcggttctcactttatggcacgcaagttggaagagttggggcattccccaaagctgatatcaccacaatttgtccgcccgttcgttaaaagcaataaaaacgactttgtcgacgccgaagctatttgtgaagctgcatcgcgtccgtctatgcgttttgtgcagcccagaacggaatctcagcaggcaatgcgggctctgcatcgtgtccgtgaatccctggttcaggataaggtaaaaacaaccaatcaaatgcatgcttttctgctggaatttggcattagcgttccccgaggagctgccgttattagccgactgagtaccattcttgaggataatagtttgcctctttacctcagccagttattgctgaaattacaacagcattatcactatcttgttgagcagattaaagatttggaatcccagttgaaacgaaagttggacgaagatgaggttggacagcgcttgctgagcattccctgcgtcggaacactgacagcgagtactatttcaactgagattggcgacgggaagcagtacgccagcagccgtgactttgcggcggcaacagggcttgtacctcggcagtacagcacgggaggtaggacgacattgctgggaattagtaagcgaggtaataaaaagatccgaactttgttggttcaatgtgccagagggtattcatacaaaaactggaacaccagtctggcaaattggccgattgggtcagggatttactgtgccggaaaagcaactttgtcgtcacttgtgctctggcaaacaagctggccagaatagcctgggccctaacggcacgacagcaaacttatgtagcataacggcagaaatacaccggtttaaagaattactgatctggttttgcgaatactgatattgatgatactaacggcccaccggcctgttgaggaacctgtaaaacggaaaggctcattgaagccgtatattttctggaggttcatcaggcgcggaactcatcaaggcgcgggaataaaatcccattcagacgccggatagattcaagcaagccaacttgtcgtcaaaatcggtgttgcaaaaacgggagtgaccataga

SEQ ID NO: 8680 - DNA, 1422 bp, unidentified
  source 1..1422: mol_type = unassigned DNA; note = element_d9e0cd1
  misc_feature 1: note = core
  misc_feature 2..227: note = LE
  misc_feature 228..1247: note = CDS
  misc_feature 1248..1422: note = RE
  misc_feature 19..233: note = bridgeRNA
ctgatggaggatgtgggcggggcgttgagcgtgtgctcgtagcgtcctggggtcttggtcggctggctctcgaactgcctgctgctcgcgtgtcgggttggcttccgaacgaagcgccagccggccagggttcggtcacggcgtggctcgaaagaggcgagcagcacctgcatcaggagtgcccgtcgtgacgctcacacgcgtcaacgaggaggacttccaggacggtgatcatcggtgtcgacccgcacaagtcgacccatacggtggtggcgatcgaccgcgacgagcggccgctggcccggctgcgactggtggctgagcggtgtcagactcagcggttgttggcctgggcggaaccgctgggcagggagcggacctgggcggtggagtccgctggggggctgggcaagctggtggctcagcagctcctcgaggcgggtgagcacgtcgttgatgtgcccccgaccctggccgcgagggtgcggctgctgggctcgaccaaggcgtcgaagaacgacccgaacgacgcgctggccacggccatcgccgggttggggcactgcgggctgcgggcggtgcgggtggaggaccacaccgcggtgcttcggatgctgatcgaccgctacgacgatctggtggccttgcgtacccacgccgcctgtcggctgcatgtggcactgcgagagctcatcgccggcggcgcgccccgccgtttgggggctagccgggcaaccaagctgctgggcaacatcgatccgcagggtgctgctgggctcgaacgcaagcgtctcgcagtggagctgctggccgacctgcgtcgcctcgaccgcgacatcgccaccgccaagcgccgcgtcagcgacgccgtcaccgcgtcgggcacgtcgctgctggagctacatggtgtcggcccgatcgtcgcggggttcatcctgggccacgtcggcgacccggcccggttcgcgacgccggagcggttcgcgtcctacaacggcaccgcccccatcgaagcctccagcggtccccgcaaacgccaccggctcaacccccgaggtaaccgcaagctgaaccacgccctccacctggccgcggtcacccaggtccgccacgacacgccgggtcgcgcctactaccagcgcaagatcgccgaagggaagtcgaagaaggaggcgctgcgcgctctgaagcgtcggatcagcgacgcggtctggcgccagctccaggtcgacctcggtcgccgctgacaaggcaggcccgggaggacaatcagggacgactctttaatccagcgtggccggctgaaccctgaacaccggcacttcgcaacaagtcactcccggacccgatcaccacgctacgcccgcgcccacggcgctgcttcaacgcgcccccgcacaccctcttgacacaaagaggctt

SEQ ID NO: 8681 - DNA, 1523 bp, unidentified
  source 1..1523: mol_type = unassigned DNA; note = element_d9eced7
  misc_feature 1..2: note = core
  misc_feature 3..241: note = LE
  misc_feature 242..1408: note = CDS
  misc_feature 1409..1523: note = RE
  misc_feature 3..220: note = bridgeRNA
cttgtataatgaactcgtagtcaagttacggtcattatcctttcttatacgatataattaacatagtgttgtggattggtttcatcacctacagcttgactgtttctttgaggctccaaccacatatctatgtttttttgttgataagttagataacgctttgacgtttgatctagggcaaggatacataacatagaaccatgtggaaccacagccaactttttaaaaaggatgtgattttatgatttatattggcattgatgttgccaaagataagcacgactgctttatcgttaattctgacggtgaagtcatcaaggatgttttcaccatccctaatactctcaatggattcaatactttattagaagccatccctaatgtatctaaagataaaattaaagtgggacttgaagctactggtcactacagccttaaccttatgagattcatcatcgataaccagttcccgctgattgttcttaatccgcttcagacaaaccttttcagaaaagctcatacgcttagaaaaagtaaaacagacaagattgatgccaaactcattgcgcttatgctgcagtcaggtaactttaaaccccactcagatgtatcataccatcttcgtgagcttaagtcacttactagacataaatcccggattaaagacaatcttgctaaatacaaaatttctcttcatagaattcttgatatcatgtttcctgagcttgcttcggtcgtttattcattaaatcaaaaatctacttatgaactacttaaagcatttccttctaaacaggccattacttctgcacatcttactaaacttacaaaccttctaatcaagcactctaaaggaaaatatcgcaaggaaaaagcaatacttataaaagaaactgctgctaaatcaataggaaccgacagccgagctatctcatttgaactttctcaaactttatctttcatagaagtttattctaatgaaatcaataagattgataatgagattaaaagcattatggatgaaattcaaagtcctattcttactattcctggtatttcttacggtcttgcttctgtaatccttgctgagattggtgatataaatcgttttgattctccatccaagcttttagcttttgccggtctagaaccttctacatacgaatcaggacggtttgtcgccacaggcatgaagatggttaaacgtggctcttcttatctcaggtgggctattcttgaagctgctagattagttgctatgagagatccaacttttaaagaatactatcaaaagaaaaaatccgaaggtaaacatcattatgttgctaactctcatgttgctaaaaaattaatcagagtcattcaccacttactgaccaataacttgcaattttatcctcaaaaatagccaataattcaatttttatttcagtagatttctctacttctttttgtcgtgcaattttttaactttaattttatttagattattttgttttttctattgacttcatatagttagt

SEQ ID NO: 8682 - DNA, 1528 bp, unidentified
  source 1..1528: mol_type = unassigned DNA; note = element_d9f2213
  misc_feature 1..3: note = core
  misc_feature 4..250: note = LE
  misc_feature 251..1417: note = CDS
  misc_feature 1418..1528: note = RE
  misc_feature 8..228: note = bridgeRNA
tttcgtattatcaggtcagccagagatttctggttggcctatttttatggtcgttctatgatggcggtagccgggagaacgtggctctttttggggcacttaccccgtcacaaaaactgttctcccactatccccaatgaccatgtttgagctggttgaggcacttgacttgacctcgtatcacaagcgaagctgtgggtttggaaccatcgtgggattgccggctagattaacatcaggaggagttgacatggaaccggttatcggactggacgtggcaaaaggtgtgagtgtatttcaagcgttcatgaagcgtaatgaagcatgcggcaagccggaggctattcggcatactgaggacggttttgaacgcctaggcgatgtgattcgcctactggagcaacaaacggggaaacagcctgttgttatcttagaggcaaccgggcattaccatcgcattgttgtagctcaccttgagcgtacaggggtcacgtatttcatcgttaatccgctcctctctaagcgcgcgaagagtgctcagttacgcaaagtgaaaacagatgcggcggatgcctggcatttggcggagatgtattaccgtggcgatgtgcagccgcaccgcaggtgggaggataacataacggagattcagcatttaactcggcagcatgagtttatgacatcccaatttgtgcagtcgaagttgaatgcaagggcattgctggatcaagtatgcccggaatatgaagctgtgttcagcgatctgttttccaagacggcgttgcaggtgctgcgtcttatgctgagaggtaacgttgttactgaagaattgatccgggaaacagctggcacctcacatggtagagcatggattcaggaaaaagtggggcgaatccatgctctaccagagtttaacaagtctagtgcggctcaaaaggtggcattattatgcatagtggaaattatgcttgttcagcaagagcaactgagtcaattggaaatgaaaatcgaagaagaagcaacggggatcccggaagtagggctgttaaaaaccatcccaggaatcggagataaactggctgccacgttaatcgcagaaatcggtaatgccagtcagtttagagatccaaaacagcttgtggcttacgctgggctagatccaggtgtgcatagctccggtcagttcgtggcgaccagcacccggataaccaaacgcggctctaaacggttgcgtagagcgctatatttagccgtacagtgtggaattaggagatgtacaaacgagcgattaaaggcgtactacgataagaaaagacaagagggcaagccctacaaggtgacagtgattgcttgcgccaacaagctattacatcacatttacgccatcttgaagaaaggccagcccttccaagtgtgaaccatatttaaccaaagcctccgccaacggaggtttatttggcgtgtacagaaattataacaacttttcctcggcagaccaacacgccaaagcttgacaaacattagctgg

SEQ ID NO: 8683 - DNA, 1306 bp, unidentified
  source 1..1306: mol_type = unassigned DNA; note = element_d9f8e57
  misc_feature 1: note = core
  misc_feature 2..273: note = LE
  misc_feature 274..1206: note = CDS
  misc_feature 1207..1306: note = RE
  misc_feature 76..252: note = bridgeRNA
cgatagcggtgggtcagccaacatcaatgtttgctgggctgacgtcttcgcgggcaagcccccttgtgtcttgagccaggattagactgagggtgagagcggtgagtagcaagctgaatgccccgagtgcttaaagcacgtgtgggagcccacgctgctactcacccctccgctctggacatgagcccgaacagttgaacgagcccacctcgaacagttacaagcgtgggccaagccagagcgctctcacattaagtgtaagaggatttggctatgttttcctatccagcaggtattgatgtttccaaggacagccttgaggcccgagttaatcaggttgacgttggggtaaattgcgctaacgccgaagaagatttccctgggttgattgggtggctattgcttcaccaggttggtcgtgtggtgttggaggctaccggcggttacgagcgcaaagtcataaaggcgcttcaggctgcgggccttgaggtcatctgcatcaatccgcgccgagctaagagtttttccagggcgatgggccaacaagccaaaaccgacccgatagacgcaaagtctcttgcgcactatgcagctgttctagactcgccaagcgcccgagttacaagcccggagcacgataagctgcgcgcgttggtccagcagcgggaacattttgttcagcaaagagatgacgacagacgacgcctgaaaacagcttcctgcgatgcggtaaagcctgcattgcagaaccatatcgactatttgagcatggcagtggaggcgatagatcaactgattcgtcaaagtgcgtacgagctagatagcgaaaaggtggctcgactgtgttcagtcaaaggaattgggctggttactgccaccagtcttatggcttacctgcctgagctgggagaaattggagggcgccctatcgcggcattagcgggcctcgctccgtacaacaacgacagcggaaggcataaaggtgcacgccatattagtggcggaaggttttcagtccgtcgctcactttacatggcctgctgggtggtcatccgtgaccagccagaattcggggctcgatataaggcgctacgtgataaagggaaatgcgccaaagtcgcgttgatcgcctgcatgcgcgttttgttggtacgcctcaacgcaatgctgcgtgaccgcactgaatggaaagagcgcaccgattagctcggtagcagcaatttccttcagcattgcacggcctaaagctgtggaagctttgctgcctatgaaaatgacttctgaattgaatccaataagacagttg

SEQ ID NO: 8684 - DNA, 1615 bp, unidentified
  source 1..1615: mol_type = unassigned DNA; note = element_d9f981e
  misc_feature 1..2: note = core
  misc_feature 3..443: note = LE
  misc_feature 444..1403: note = CDS
  misc_feature 1404..1615: note = RE
  misc_feature 12..297: note = bridgeRNA
ctcctacaatatagttacggtgaaaggcacggcagccagccgtgtcttttgtcgtctcaaagctgaagctgtagaatgagagagtcaatggcctgacacttgtcaccttgggctgacatgcccgtgatcgagtccgtcagccgtctctctcattcgcagcgttcgatttgcgcaggtagaactaatgggtttcccaatacgttcgcgtcactcaggagattgaacaagcggcgagaaacagagacgggagccatatccaatcacacaggaggacgctatgaatgcagtaggaattgatatatccaaagggaaaagcatgatgatggccctgcagccgatgaataaggtcgcgctgaagccaaaggaatacccccacaccagggttggtctggagcagatggcgcttgctatcttggggctggggggaagatactcgggcaatcatggaggccacaggccgatatcatgagccggtggcggcggccctgcacgagtatggcatccacgtcatggtgatgaacccgctgttcatcaagcagagcggcggctctatccgcaaggtcaagaccgataaggcggatgccaggaaaatcgccaagtatgctcttgacaattgggcagatctacgggaatatatccccatggatacaatcagggaacaactaaagctgtactcacggcagtacaatttgtacatgaaaaacgtggtggcgtttcaaaacaacctcatttctctcactgacaaggtctttccgggggtaaacgagctgttctccagcccggatcgcgccgatggtagccagaagtgggtcgattttatcatgaccttttggcactatgagtgtgtcaacctggccagcgaggccaccttcaccgaacgctaccgtaagtggtgcaaacgcaaggggtatcatttcaaccaggggaaggcagcggagctgtatatggacagcatgggccatatcacgaccctgcccaggaacaataataccaaactgctgatctccaccgcctccaaggagttggcctcggctaaggccactctggccgtcctgcgtgctgaaatggaccgtctggcccgccagtttccgaagtatgatactgtccgggccatgtacggcgtgggcgagaggactgttttgcagctgatggcggagattggtgatgtgcgctgtttcccccgccgcagctccattgtgagcttcgcgggcgttgatctggctgtggacgagtctggtaagcacgtttccaagagcaatcccaccaccaagcgcagctcgccccacctgcgtaagacgctctatcaaatcgtctgcacttatctgaaaaagtctccctctaaggaaccggtgtaccagtttctggacaagaagcgggccgaaggcaaaccttatttcgtttaaatgaccgccgcccaaaacaaattcctgcgcatttattatgcccgcatgaaagagtgcctcgccgctgatgcgcaggagactgccaagaattagtacactccgaaatcctcagcttgtatggtctgcaaaaaatcttcttttgcaggcttggtttgttgtaccctgtccctctcaaattttttcattttgaggcttaacttttgtttgcagga

SEQ ID NO: 8685 - DNA, 1540 bp, unidentified
  source 1..1540: mol_type = unassigned DNA; note = element_da0717a
  misc_feature 1..2: note = core
  misc_feature 3..241: note = LE
  misc_feature 242..1420: note = CDS
  misc_feature 1421..1540: note = RE
  misc_feature 3..218: note = bridgeRNA
cttgtattatagagtagtagttattaaagcccctctccaagggctgtgctacactgtaagggatgctgtggattggtgttcgcctcctaccacaagatggttccagaaaggttccaaccacagccccttacacttttgttaatcagttaaataccgccagacggtttatgtggaacaaggctacaaaagtaaggtgcactgtggatgcagcatcacaaatctaaccgctggagggttttctatggtagtttctgttggtattgatgtctcaaaggataagcatgattgcttcattctcagttcggagggtgaagtcctggtgaatgtgttcactatccccaatacaatggatgggttcaactgcctgttgcagagaatccaggactgcaccacaccacaggacaaaatgaaagtagggcttgaggcaactggacattacagctacaatctgcttgggtttcttcttgacaacggtctccccacctatgtcttgaaccccttacgcacaaacctttaccggaagagccttagccttagaaagaccaaaaccgaccgggtggatgcacgaacgattgcttctatgctgttatccgatgcgggcctcaaaccctacacggacacagcataccacaatgaggagctaaagtcactgaccaggtaccgttttgacaaggtgaaagaacgcgccaagctgaaaagctctatttcccgattggtctgcatcctgttccccgaactggaaaagctcgttccgtctctacatattgcctctgtctacgccctgctggcggagtttcctggtgccaaacagattgccgctgcccatttgacgaggctgaaaacactgctcaaaacggcttccaaaggccactacaagcgggacatggctcttgaaatccgagatgccgccagaaactctattggcgctcggatacctgctaagtctcttgaattgcagcacaccatccgactcatccgagaactggatgctgaaattcatgagattgaaactgaaattgagaacataatggacgagattcactctccaattacgaccattccaggtatcggataccggatgggcgccatgattctggcagaagctggtgatctctctcgcttcgactcaccagataagctacttgcttatgctggtatgtctccttctacttaccaatccgggcagctaaaaaactgttacccacacatggagaaacgaggttccagatacctgcgttatgccctttacaatgccaccaagtatgtctgtctttgggacccaacctttgctgcttatcttgctaagaagcgggcggagggcaagcactacaatgtcgctctttctcacgctgccaaaaagttggttcgtctaatatttgccatggagaaatccaagcaaccgtattgttcagcggcttgaacgcaactacttgaataggcagcaggggtctgacaagacctcagctttgctataccttttttgaaccatttacttttcatctcctccattcattttacgggttgacttttaatagttaat

SEQ ID NO: 8686 - DNA, 1389 bp, unidentified
  source 1..1389: mol_type = unassigned DNA; note = element_da07195
  misc_feature 1..3: note = core
  misc_feature 4..90: note = LE
  misc_feature 91..1116: note = CDS
  misc_feature 1117..1389: note = RE
  misc_feature 1087..1376: note = bridgeRNA
agatggggtggttgccgccctccccagacggcatcgcgcgatgtgccaaaattgtggtaggtaaaagccacagagcggagaggacggcagatgaaggacatgatgatcggggtggatctggcaaagaatgttttccaacttcacggggcatcgatgacgggtcaggtgctgtttcgcaagaagttgtccaggggccagtttcttcgcttcatggagagcctgcgagccgctgttgttgtgatggaggcctgcggcagcgcccatcattgggcgcgggaattggtgaaactgggccatgatgtaaagctgatcggaccgcagtatgtccggccctttgtgaagcgccagaagaatgatgcagctgacgcggaggccatagtcatcgcagcgcagcgaccagagatgcggttcgtggaacccaagacgccgaatcaacaagcgagagccattctgttcagagcacgtgagcgcattgtccatcagcggacggagctggtgaacgcgctgcgcgcagtgctctacgaatacggacaggtcgtcccgcttgggattggtcacatcaagcgcatcgaggcgattgtcgaagatgcggataatgaactgccggaacttgtgcgggaagagtgccatgatcttctggcgcagattggtgagaaaacactgagaatcgaagacaagacgaagaaaatcaccgggctttctaagcaaagcgatactgcgcggcggcttcagacaatgccgggtgtaggcccaatgatttctctggccgtcgaggccttcgcacccgccatggagaacttccggtgcggccgtgattttgcggcctggctcggacttgtgccacgacagttttcgtccggtggcgaggaaaggcttggcaaggtgttgaaggccgggcaggccgacatccgcaggctgctgatcatcggcgcgatggcacgtgtgaactgggtgagccgcaagcccgccgcacagggagcatggctgtcccggatgctggcgaagaagccgcggatgctggtggcgattgcgctggcgaacaagatggcccgaaaaatctgggcgatgctgaagcaggaagactatcgagatccggcattggtcgtggcagcgtgatttgatgctgaccacaaatatccaaagtcggtaaggaggtgtgagaagtcgatgacctgaatgggcgcatgatcgaaacgatccggatagggaaaaccagtatggttcttcgagctggagagctcggctaaaagatttggacccgatccgcagatcaccataccggccagcggcttctgaaaatgccgcacataaaaggcctgacagaagaccgcactcgatcgcacattcaaaaggtcagaaacttcttgcacaacgggcggcaaccacaga

SEQ ID NO: 8687 - DNA, 1178 bp, unidentified
  source 1..1178: mol_type = unassigned DNA; note = element_da0ae40
  misc_feature 1..2: note = core
  misc_feature 3..207: note = LE
  misc_feature 208..1155: note = CDS
  misc_feature 1156..1178: note = RE
  misc_feature 3..182: note = bridgeRNA
cttgtatgctgggacttgaagggaggaggagggacaaagccagattctgactgttgacgcagtacagatccgtgggagatttcgcccctcctcctttcacccaagcgccgataaagaatgcatctggccaggaccgacgataggaacaagcctgcgcccctgggtgagcccttcaagtgttcaaaaccatatctcgggggatgttcaatggcaatgccggtttctgtcgtaaagcctattgtgggcgtggatgtcgccaagaatgaactggtcatctatcaggccgagctggatctgctcgagactatttccaatgacaagacagccatcaaaaaatggctgaaagccttgcctgcacctgttgatttggctatcgaatcgaccaacatctatcacctggcgttcgccgatctggcccatgaagccgggtgcacgatttacatggtcgatggctacgcgttgagtcattaccgaataggggtgaaagttcgcgccaaaaccgatgcgctggacgccaagctgctcgctcgttatctaaaaaacgaatacgaagagcttcatccttggatcccgccatcgcctttatatcgccgccttctgagccttttccgccgtcgtgcagcgctggttcaggcacgggttggtctggtgcaaagctgggcgaatgaaccgctgctcaaaagcgcgtttgctgagcaagtggcctcaatgcagaggctcgaaacattggtcgagaagatgatcaacgatcaattaaaagaggctgggctgctcgcagatctgaagcgctgcacaaaagttgaaggtattggttttttgaccggagcccgtttgatcgcaacatttcagcggggcgacttcaaaaacgcggatgcatttattgcgtttttggggatggatttgcgcgtgtcgcagtcaggacaaaaggacggtcgccggagcctgaccaaacgcggagacccagaggcccggcgactgctccataacgcagccatgtcggccagccgtacaccggcttggaaaagcttctacgaggagcaaagaaaccgtgggttcagtacgacacaggcgctggtgatattggctcgcaagcttgcgcgagtcgtattcgcgctgctgaaggggcaaagcgaataccagccgaagggaggttgagggcttcccctcaaccatagaat

SEQ ID NO: 8688 - DNA, 1517 bp, unidentified
  source 1..1517: mol_type = unassigned DNA; note = element_da0e9fe
  misc_feature 1..3: note = core
  misc_feature 4..120: note = LE
  misc_feature 121..1161: note = CDS
  misc_feature 1162..1517: note = RE
  misc_feature 1186..1379: note = bridgeRNA
agatggggtattcggcttgagccccatcgtcgacggtgatgcagaggtgctgcgcttggagctgatgatagaacgtggtctgtttgcaacagccacaggcatcaggaaaggaagcgcagcatgaaacattatgccggattggacgtctcggtgaaagagaccgcaatatgcattgtgaacgaaacgggcaaggtttgccgcgagattaaggtcaccagccacccggaagacctcgtccaggccctgaagaaccccgagtggcaactcggtcggatcgggctcgaagccggaccattgtcgcaatggctgttcagcggcctggtcgaggccggcttgccggcgatctgcatcgagacccggcatacgaaggcattcctcaaagcgcaggtgaacaagactgaccgcaacgacgcgcgtggcatcgcgcagatgatgcgagtcaacctgatccggccggtgcacgtcaagacgctgacgagccagaaacgccgcgccctcctgacggcgcgcaagctgctgctggaaaaggcgatcgcaatcgagaacgatatccgcggcctgctgcggaacttcggcctaaaggtcggcgttgtcaacgtgatcaggttcgacgaccgcatccgcgagcttgtcgacggtctgccggaactcggtgatctcatgggaccattgctgtcggcccggcaaaagctccgcgagacattcatggctctccaccgcaagctgctatcaatcgtccgtgatgacgaggtttgccggcgcttgatgacgatccccggtgtcggccctgtcacatcgctcgcattcatcagcaccatcgatgtgccggcgcgctttagaaactcacgagctgtcggtccggcgctgggattgaccccggtgctcaaccaatcgggcgaaagccatcgcgtcggccgcgtttgcctgtgcggcgacgggatgatgcggacgcttctctacgaggcggctcaagtcatgttgtctcgcgtcaacaaatggtcctggctgaaagcctgggcgatgaacgttgccaagcggcgcggacggcaaaaggccatcgtcgcgctcgcacgccggctggccgtgatcatgcatcgcatgtggagcgacggtgccgagttccgctggacaagggagaacagcatgccgacagccgtctgaacggcctgccgggaaggagacgacaaagttccacttgccggtggagacgtccttcgcgggacgatggatgaagtgagctcgcttggggtcttgtgccgatcgctccatcgcgatcaggacgcgagtcagattgggccacctcattctactgaccccatgctgggagggccaaagagccgatcccgaagagaagcgaggccccgcgaatgacgtcaaatgccggtgcaacggaaagctcaaaagcgcttgacctcaacacgccgaatagagaagagaagcgaggccccgcgaatgacgtcaaatgccggtgcaacggaaagctcaaaagcgcttgacctcaacacgccgaatagaga

SEQ ID NO: 8689 - DNA, 1575 bp, unidentified
  source 1..1575: mol_type = unassigned DNA; note = element_da1c28d
  misc_feature 1..3: note = core
  misc_feature 4..639: note = LE
  misc_feature 640..1461: note = CDS
  misc_feature 1462..1575: note = RE
  misc_feature 13..271: note = bridgeRNA
cttgtataatgtatttaggttgttcaagggatacctataaacccttagacctacttctttacatctccagtctgataggagataattgttttattagattgagaggatgatcgttttctccttgagcgcctctgctcgtacttgaaagactgatgcctctctctaataagctttccacgtatgagttggatgttggttgccgcatggtttctctccgtatttagcacaaggtagtggcgcttattagttgagtggcctcccaatctgaaatcttttttctgaggtgttttttatgttttttgttggtattgatattggtaaaaacaatcatgtcgcttccatgatgaatgaatctggaaaggttgtattcaaggctttttcctttcccaatacttcggatggtgggaattccttgttttcaaagctctcttcttattcttccagtacctccgactttgaaatcggtatggaagctactggctctctgtttactcttttctttttgaaaagggctttcttctccatgtcatcaatccgattcagactgacggctggcgcagaggcacagaaatccgcaaacgcaaaaacgatatcatcgattctcttctgattgctgacctgatccgttacgggcagtttgtggaaaccaggcttgcagacgaggatttattctctctgcgcaccctgacccgtttccgcacttatcttgtggaatccatcagtgacttaaaacgaaaggttgtctgtgtgctggaccaggtttttcctgaatatcagtccatcttttccaacattttcggtaagacctcaaaagaaatccttctccagttttcttcgccaatcgattttgaggcggtttcatcggaaacactggccgaactgcttgcacagctcagcaggcagaaagttggtattgcaaaagcacaacagataaaagctgctgcatccagttcttttggcgttacctttgccaaaaacagcttcaccttccagctcaaaacgctgattgaacagatttcttttatcgaaaaacaggtaaaagaaacggaagcagaaatttccggtattatgggaaaactggaatctcctattactaccattaccggaatcggcagtgtcacaggtgcagccatcatcagcgaaattggcgatatctccaaatttgacagtcccagaaaactggtagcttttaccggtctggatgccactgttacgcaatccggtgaatttgaagcagtccacaatgtaatgagcaaacgtggatcaccgtatttgcggaaggccatttttcaggcagctttgattgcctcctttaaagaccctgtattaagtgcctattaccagaaaaagagggccgaaggcaaacatcatctgacatgcgttggtgctgttgcgagaaagatgtgcaacattatttatgccgtactgaaaaacaatcagccttacgttccaaaagcttaaatccttgttctcccattccggcttgcctgacagcaggccttattgtcgtactcttttttcctacaaaatttcttttgactttttcaattatctacttgacttttaatagttggt

SEQ ID NO: 8690 - DNA, 1692 bp, unidentified
  source 1..1692: mol_type = unassigned DNA; note = element_da2a550
  misc_feature 1..2: note = core
  misc_feature 3..322: note = LE
  misc_feature 323..1579: note = CDS
  misc_feature 1580..1692: note = RE
  misc_feature 45..300: note = bridgeRNA
ctcgtataatatttgtataagatctttatgattttatacatttttattcttttaatcttttctgttttctttcttaaaaggtcctagtgctataataaagatagatatagctgaaggaaagtgcttaccctccttgcggtcagaccgctatgaaagcgtgcaatcctgcttatcatgtgtaattctttacccggttgttgtttgaatgtccactaactcatttaatccatgtggccaggaaattcttatgtgcgaggctggaactgtgtgataaggctaggaccttttttatatctaattcattcgattggtggtgtattaaatgtcacaagaattaactaccttatacatcggtatcgatgtctcaaaggaatctaactttgtgtatattactaactttaaccaatcttttaatcaatcattcaacacgctaaataatgttcatggtgctgaattgattgaaacaaaactacttgaaatacttcataatgttgagtactcaaatataatttgtgtacttgaatctactggtatttactctgctcatattgcgacatacttatctgcttctaagaaactctttcaatacaatgttttagtctattgtattaaccctaagatatctagaaactatcgcgctagtttctctgacatggataagacagaccctaaagattcctatatccttgcggatatcgctagagttggtagaaccaaaactcttcatcctttcaaaggatcacagaagttagcgcttcagcgcttaactcgtcatcgtgttcaccttgctgaacttctttccaaagagaaaacatacgctcttactaatatctatttaaagttttctgaattcggtaaaaaagactctaaattctcttctgataaatggggtaataccgccatatctattttggaagagttctcttcacctgaagaaatcattaagacttctcttgaagatttagttgcttttgtcatcaaaacttctagaaatcgtttttcgagtcctaccgaagttgctaaacttattaagaaagctgcgaacgcttcttatcgtctcgataaagtcgcttacgaacctatcaatcatgctatttcttcaagtttgattcttattcgttgttacgaagatgaaatcaagaaaatcaataaagctattgaatctctcatcaaagattttgctgatgatcaatatctttctcttaaatcaattcctggtattggcattgtgtatgcttctggtatcatctctgaaattggctctgttcatcaatttagaaatgaagaagcccttgccaaatatgctggcattacttggcgcaaaaatcaatcaggtaactttgaagctgatactactaaaatgaccaaaactggtaatcattatcttcgttactatttgattgaagctgctaattctgttaaaaactatgttggtacttataacgacttctatcacaaaaaatttaatgaagttactgttcatcaacacaaacgcgcactcgcactcacttctcgtaaacttgttaaattgatctatggattattgagtaaaggtcaactttataataagaactactaaccgttacctatacttcataatctacctaacctcgttaggtttcttaattatgtctagttatcaaacaactagtcttttttattgcttttatctcttgacattcttaccggttg

SEQ ID NO: 8691 - DNA, 1351 bp, unidentified
  source 1..1351: mol_type = unassigned DNA; note = element_da44df9
  misc_feature 1..4: note = core
  misc_feature 5..298: note = LE
  misc_feature 299..1102: note = CDS
  misc_feature 1103..1351: note = RE
  misc_feature 1081..1339: note = bridgeRNA
atgatgggtggacggccccttgcggcatcgaatgtgccaaactgggctgtgattaactccagcggaaggagaccgtccgtcatgcaagctatcagatttggaatcgatttggccaagaatgtgtttcaggtgcacggcgtggatgctgccgggcgcgtggtggtgcagcggcagctgcgccgcgcgcaggtggagaagttcttcgccgcgcagccgccggcgctgatcggcagaggcctgcggctcggctcatcattgggctcgcacgctcagcgcgctcggccatgacgtcaagctgatgccgccggcctatgtgaagccctatgttccgcgcaacaagaacgatgcccgcgacgcgcacggctgttgcgaggcggtgagccggcccgacatgcgcttcgtgccgatcaagtcggtcgagcagcaatgggcccgggcgctgcaccgcacacgcgaccttctggtgcgccagcgcacgcaactggccaacgccatgcgtggcctgctctatgagatgggacagacaagtgccaaaggggcggcgggcatcgagaccctgctgcggcgcgtcgaggcggccgatgaagccatcccagcggcgctgttgatctgcctggtgccgctggccgggcaatggcgggcgctggatggcgagatcggcaagctggacaagcagatcctggctcaggtcaggcagcagcgggcagctttgcggctgacgacgatcccgagcgtcggcccgatcatcgcgcatgcgaccgtcgcagccatcggcgacggtcgccagttcgcctcggccagggacttcgcagcctggctgggcctgacccgcaagacccatgacaccggcggcaagcacaggccgacaggccatataagccgtgccggcgacaaggacctgcgcaggttgctcattctcggcgccagttcctggctgcgtcaggtcagggccaagcccgacagaggctcgccctggatacgcggcctgctggccaggcggccggtcaaggtcgccgtcgtggcgcaggcggccaagaccgcccgcatcatctgggcaatgctgcaatcgggacaacaatacagggcaccggctgtggcctagccgcaatcgaggcccttaacagcgtaaggagcaaaaaggcagcacggcaaaatggtcaggacctgggtcgggaaaatccgccatcgtcatcgcgacaccaagcgcgctagaatgattggaaccgatccgcgtaacccttgttggtcagcggtcatcgaactcgaccgcactaaaggccgaatacatgaccgctccagacttacgccgtcgtcgtcattttgcctcttgcccaagaggggccgtccatac

SEQ ID NO: 8692 - DNA, 1577 bp, unidentified
  source 1..1577: mol_type = unassigned DNA; note = element_da488ac
  misc_feature 1..3: note = core
  misc_feature 4..247: note = LE
  misc_feature 248..1450: note = CDS
  misc_feature 1451..1577: note = RE
  misc_feature 8..226: note = bridgeRNA
gttcgtattataaggttagacagtttattttactggttgacctttttttaatagaatctattatatcagtagccagggtaggacgtacgggtgcgtgggacttaatcccgtgaactaaactgtccgccccctacttgtagaaacatgtttgaggctggttgggacgtagatctcgtataacaagcgaagctatgacactacatggaggactaggggtactggttaataagtagaggaggaaaaaacaatgaatccagttgttggtctggatgtggcaaaagaagagagccaagtacaggcatttttagaccaatctaaaccgtatgggaagagcttttcaatgaagcatatcaaagaggaattagattatttattagactttttaaaagaggttgaagaggtgacagggcagatgcctatggtcattttagaatctacagggcattaccattctcccgttattcaatacttggaggaacaagggattctatatatcttactaaatccgattatttcttatcaggtaaagaagtccagtttacggaaggtaaaaacggacgcaatcgatgcgtaccagttgtgtgtgctgtattacaaggaggattttgaacctcataaaattagaggaattcagcttttagaccttcgtaatttgtctagacaacaggaaatcgtaacgaatatgtatgtggaggctaaacttcagtttcacaccattttagatcaggtgtttcctgaataccggaaggtttttggggatctatattcgaaggtttctttattgatgttaaaggaatatcctacttcagaggcggtattaacggccggagaaagtagactagcagagagtgtaatagagttctgtcctagcagatcgggtgaatgggcatgggaaaaagcaaaaaaaataatggattccgcatctcgaaatccatttcaaaaaaacgtgtatgaaagtcacgtaatcaatcttcgtatgtatattgagttgctttttcattaccagggacacctttctgatttggaagatcgtatagtggccctggcaaatgaaatggaagaatataagatcatccaatcgattcccggtataggagaaaaaatcgcagcaacgattatctctgaaattggtgaaatcgatcggtttaatcatccgaaaaaactggttgccttcgctggagtagatccaagtgttcactcatcaggtaagtttacggcaaccattaatcgtattacgaaaagaggttcgagcagactacgtcattctctgtatcttgccgtactatgcggcataagaagttcaaggaacaaaaagcttaaagccttctatgataagaaaaaatcagaaggaaaacctgccaaagtgtcaatcgttgcctgtatgaataagttgcttcattggatttacgctttattaaaaagaaaagaagcattcctagatttagcctgattaatgattttgtgacagagaaaaatccttccaaaagggttttggagggttatttggcatggccaaaaatagtatatcataagggaaatgaaaattttagagaaagatattgacatcctattagctg

SEQ ID NO: 8693 - DNA, 1183 bp, unidentified
  source 1..1183: mol_type = unassigned DNA; note = element_da48cbe
  misc_feature 1..2: note = core
  misc_feature 3..217: note = LE
  misc_feature 218..1168: note = CDS
  misc_feature 1169..1183: note = RE
  misc_feature 22..194: note = bridgeRNA
cttgtatattcatagcgaagtgtttccatgaacaaagttaatacgaaaaggatgggacaggccgttcgcccctcggtcgttggaggccgtgatgtagcatgggtcgtcccatccttgctccccaaaagctcgaacagttgcctgggttaaccaagcccgcatctttcgcaaggttgagctaagttggagcagattaaaaattaaggaggattgcattttggaagtttcccttatcttcgtcggtatcgatgtgtccaaggcacaactcgatgtcgcgatccgtcccagcgacgagagacaatcttttgccaacgacaaggttggcatcaaagcgttggtcaaaaagctggctaagatcaaaccgaccttgatcgtgttggagtccacgggcggtttggaacgtcaggtcatgggcgctctgataagcgccgaactcccagcagtcatggtcaacccacgccaagtcagagacttcgccaaagccaccggacaattggccaagaccgacaacatcgatgctgcggtattggctcactacgctgaagcggtccgtccaccgctgcggcctttgcccgatgcgctcacggtggaactcagagccctgaccgcacgccgacgacaaatcatcgagatgatcgtcgccgagaaaaaccggctggccacggcctcccaagcggttcgaaaacatatcctcgctcacatcagctggctcgaacacgaccttgatcgcgctgaccaagacatcgagcacttcatcgagcaaagcccgatctggaaacaaaacgaagagctgctgcgcagcgcgcccagcgtgggtccggttaccagccgcactctgctcgccgagctgcccgagcttggaaccctcgaccgcaaacaaatctcggccctgaccggtattgcaccgttcaaccgagacagcggcacgcttaaaggtcaccgctcgatctggggagggcgggccgctgtgcgcagcgctttgtacatggctaccctcgtcgccactcaacgcaaccccgtgatccgcgacttctacagacgcctgaaggccaaaggcaaagcttccaaagtggccctggtcgcttgtatgcgcaaacttctcacgattctgaactctatgctcaaacataaaactcgttggtctgatactttccttcagaccaattgactttgaagacagttg

SEQ ID NO: 8694 - DNA, 1453 bp, unidentified
  source 1..1453: mol_type = unassigned DNA; note = element_da4af12
  misc_feature 1..2: note = core
  misc_feature 3..221: note = LE
  misc_feature 222..1433: note = CDS
  misc_feature 1434..1453: note = RE
  misc_feature 12..220: note = bridgeRNA
ctaatagcagcagagccgccaagatagggcggtttgtccgagccctcggtggatgagcactctcgaaatccagagcgtggaagctctaccgatagatagtgccccaccgggaggtgaggagagaagacgaccggtgggatgttgtgccttgagcactgctctattaggatgtcgcggctctcctcggctcggtgtccacgcgtgcctgaaaggagatgccaatgatctttgtcggaatcgactgggcggaagcccaccacgatgtctgcctggtcgacgatgccggacaggtgctggccaagagaagagtggcagaaggactcgaaggcgtgggcaagctgcacgcgctcatcgccgagcatgctgaggagccggcttcggtcgtggtcgccatcgagactgaccgcggactgctggtcggctccttgctggccgccggctaccaggttttcgcgatcaatccgctggccgcgagtcggtatcgagaccgccatgcgacctcgggcgcgaagtcagacgccggcgacgcccgggtgctggccgacctggtccgcaccgaccgtcaccagcaccggccggtggctggagactctgagctcgccgaggcggtcaagatcctggccagagcccatcagggcctgatctggagtcggcagcgccaggtcaatcagctgcgcaactccttgcgcgagttctacccgggggctctggctgccttcgatgatctcggctctgcggacgccatcgccatcctggagctagcatcgacgcccagccgcggccgcgccctttcccgagccaagattgcctcagccctgcggcgcgccggacgcgagcgcaatctggagaccaaggcggcccagatccagactcagctgcgccggccccagctggaggcgccggcgctggtcgcccaagcctatggccacagcgtcgccgcctgcgcggccatcatcagtcagctcagccagcagatcaatgccctcgagcgggagctggccgcgagttttgaaacgcacccggacgccgagatctacctcagtctgcctggactcggtcgtgtcctcggcgcccgggcattagccgagttcggtgatgaccggactcgattcacacatcctaaggcgcgcaagaactacgccggcaccgcgcccatcaccaaggcctccgggacccgcaaagtcgtcctcgcccgggtggcgcgcaaccggcggcttgctgatgcctgttaccagtgggccttcgcggctatcaccaggtccgaaggcgcccgccgcaaatatgactcgctgcgcgcccgcgggcagactcatcaccaagccctccgcgctctcggcaaccgactggtcggcgtccttcacggctgcctgactaaccagcagacctatctcgaggaggtcgcgtggcgcagcgcaatcgatgttgccgcttgacatttccagccgtgggatgt

SEQ ID NO: 8695 - DNA, 1622 bp, unidentified
  source 1..1622: mol_type = unassigned DNA; note = element_da51f71
  misc_feature 1..2: note = core
  misc_feature 3..157: note = LE
  misc_feature 158..1267: note = CDS
  misc_feature 1268..1622: note = RE
  misc_feature 1344..1542: note = bridgeRNA
agacatcatggcctgacttggtggagtcagggtcatgcggagaatgaagggtaagaggtctgcctccagtatcgtgggttgcgcaccgaagtgcgccgagccacatgcggaaacgcccgagggcgtgttgccgcaaacattcagaggaggcagacccgtgagtaagcctatcacttcgttcgtcggattggacgttcacaaggattccaccgccataggggaggctgaggctggacgggagaacccgcggtttatcggaacggtgggttctgatctggggcaactgctcaaggcactgaagagtcttgggaaacccgagacgatgctcgtggtgtacgaggccggtccgtgcgggtacggactggcccgacagctgcgctcgcgcggctatagctgcgaggtggtcgctgccgggaagatcgcccgtcgtcccggggagcgtatcaagaccgatcgacgcgatgcactcaccctggcgcgcttggcgcgctcgggcgatctggtgaaggtgatggtgcccgatgagcgcgatgaggcgatgcgggatctgtcgcgtacgcgcgaggatgccgtgaaggcacgccttaaagcccgacagcaattgaaggccctgctgctgcggcacggtcatcgctatggcgggaagagctcctggacgctcgcccatgagcgctacctggccacggtgggctttgcccaccccgcgcaggacatcgcctttgccgaatatcgtcaggcggtgcgcgaggggcatgagcgggtggagcgtgtgacccaagcgctgcgtacccaaaccgagcagtggcgcctgcagccgctcgtggcggcgctctcgagtctgcgcggcatcgactttgtggccgccgtgaccctcgccgccgagatcggcgacttcggccgctttgcccaccccaccgagctgatgggatttttgggcctggtgccttcggagtattccaccggtgacacccgccgccagggagatatcaccaagaccggcaacagccacgcgcggcgcgtgctggtggaagcggcgtggaattaccgcttcccggcgcgcatcagtcgcgtcctgcagatccgccaggagggtcaacccaaagcggtgcgcgagattgcctggcgggcgcagctgcgcctggcgcaccgctatcggcgcttgagctcgcgcaagctgcacccgaacaagatctgcgtggccatcgctcgagagctcgctggttttctctgggacatcgcgcgccaggtgaaagtggcggaggcctgaactcaccgtgagcaccacgcaggccaacacattggaggtaacactgcacgacccaacaatctaagctccatacctaacagcgcaggagcaacgcgatgcgcgggtccgatgaggggaatcctcgatccgactatgtgggcatccatcgcgatgatccccgactttagagtgtaggcagccccgcgacggacagatgaagtgtcggtaaccaatccgcggatatcagtatgatccatcgtcgccatgactgcctgcgcgtcgcgttgctcgtgcgcgtgtttgttgtgtcagatccatcatcgtgaagaaaacgcgaggaagaggcgttatgctacttgacaagtcaggccatatc

SEQ ID NO: 8696 - DNA, 1302 bp, unidentified
  source 1..1302: mol_type = unassigned DNA; note = element_da5923d
  misc_feature 1: note = core
  misc_feature 2..247: note = LE
  misc_feature 248..1291: note = CDS
  misc_feature 1292..1302: note = RE
  misc_feature 64..229: note = bridgeRNA
cccttagatttgcgcaataaaaggaaatacggttggaatgattacttttgttgtgtgaaagaaacagaccagccaactgcaaggtaaaccatgctcgttccagataaaatctatattctgttttggaccttgcagttaacagtcaaaaagccacatagaaaactttgcctttttaccctaaaggtaatggtagttaagggagatggctcacggctgttgtagctgacctgtttaaaaattaaagaatatggcaaagttaatcattggaattgatttcagcaaggaaaaaatgaattactgctgcatggaaagtgaaagtatgtctatccttcaggaaggcgaggtagaaaacagccgcaagggatgtgcccagatgacaggccgcctacgtagtctgtacaaggggctgaaagcggccgatttcctgttctgcggtgaaaataccgggatgtacagcatggaggtcgttgaatgcttcacccaaaggaaatatttgttttggctggagaatccgcttcagatcaagttgagcagcggcatacagcgcagcaagacggacagacttgatgcgcgcatgattgccgaatacgcctgccggcaccgtgacaaggcaaagggatgcacccttcccgacaaaggtctgaaaaaattgcgggaactccatctgacaagaagaatgctgaaggaatgtgaggtcaaattacgcaatttctccggcagtacgtcaaaggcctcctccgaagcatccaaagcccttcggaaagtgatgaaagccattatggagtccgtcaagtccttggagaaagagatacgtgaaactctaatggaagaagacgagttcaaggaaaatacggaactggcgctcagcgtccccggcatatcgtgggtaacagcatcagccatcattctggatacgagaaactttacgagattcgatagcgcccgccagtatgccaaccatacgggatgtgttccccatgaacattcatccggcacaagtatcaacaagaagcccagagtgagcaaggcatcgaaccgttatgtcaattccctgctcacacaaggtgcactctcgttgttaacacataatccccggacaaaggagtatgcacagagaaaaaaagcggaaggaaaacccttcggattcatagtcaataacatacgcaataaaacaatacatcgactgttcgctgtcatacgcaacaaaacacctttctgttgggactatgtgaagggaagtcctacaagttgtgttaacttattgcaaaaagatgttgttacatttgcgtaaatcatagaaaa

SEQ ID NO: 8697 - DNA, 1481 bp, unidentified
  source 1..1481: mol_type = unassigned DNA; note = element_da5a485
  misc_feature 1..2: note = core
  misc_feature 3..240: note = LE
  misc_feature 241..1461: note = CDS
  misc_feature 1462..1481: note = RE
  misc_feature 12..237: note = bridgeRNA
ctaatgagtcgtgagtcggccgtccggcagactcgggtctggtagccgccggcaggtgagcactttgttttcccggacgtttgagtcctgatgaaagagcgtgcccctgcggtgggccgggagagttgatcgctgatgggatgtcgtgcccacgggtttgtggtgtgagcactgattcattaggtcgctgagagttctcccgcgggctgccggtggtggtgatcgaggacgggagaacaggtgctgttcgtaggagacgactgggcggagtcgcatcacgacgtcgagttgatggatgcgaagggccggcggctggcgaaggcccggctgcccgaaggtgtggcgggcatggcccgactgcacgcgatgatcggtgaacagcttggccaggatgccgaggatgtggaggtgatagtcggtatcgagaccgaccgtggtccctgggttcaggcgttgatcgccgccgggtacacggtgttcgcggtcaacccgttgtcggtggcccgttatcgggaacgccacggggtttccggcgcgaaaagtgatgctgccgacgcgctcacgctggccgacatggtgtgcaccgactcctatcagttgcggccggtggccggtgataccgatcaggccgaggcggtcaaggtcgtcgcgcgagcccataagaccctgatctgggaacgcacccgccatacccaacgcctgcgccacgccctgcgggactacttccccgcggcggtggaggccttcaccgacctcgacgccggcgacaccctggaactgctgggcaaagcacccgacccggacgctgccgcccggctgtctctcaaccagatccgtgcggcgctgaaacgggcccgcggccgggacgtcgacaccaaggccgcggcgatccaggctgtgctgcgcgcggaccacctgggccagcccgcggtggtcacggcggcctacgcggccacgacccgggccgctgtggcggtgctgaccaccctgcgcgagcaggtcaaagagttggaaaagcaggtgcaggcgcattttggccgacacccggacgctgagatcatcctgtcccagcccggtctgggaccgatcctcggtgcccgggtgctcgccgagttcggggacgaccccgaccgcttcgccaccgcgaagtgccgcaagaactacgccgcgaccagcccgatcacccgcgcctccgggaagaaaaaggccgtgctggccaggttcgtgcacaacgaccggctcatcgacgcgttgatgactcaggcgttcgccgcgctgaacgcctcgcccggcgcccgcgcctactacgaccaactccgagcacgcggcgccgggcacaaccctgccctgcgccagctcgccaaccgcctcgtgggcatcctgcacggctgcctcaaaacccgcaccctctacaacgagaccaccgcgtggtcgcaccgcgtcgagaagactgctgcttgacattcaagctcctgggatgt

SEQ ID NO: 8698 - DNA, 1365 bp, unidentified
  source 1..1365: mol_type = unassigned DNA; note = element_da5b45a
  misc_feature 1..2: note = core
  misc_feature 3..73: note = LE
  misc_feature 74..1099: note = CDS
  misc_feature 1100..1365: note = RE
  misc_feature 1132..1362: note = bridgeRNA
ttaatgagatggtcagcccgatccctactcagcggactacgctgagtagggattgttctttttggggaccatcatggacacggcttcgttgatcggcattgacctgggcaagcattgtttccacctgcacgcgcaagatgcatcgggcaggatggtgttccgcaagaagctcacgcgccaccagatgctcatcctgctggccaacttatcgagctgcactgtggtgatggaggcctgcgctggcgcccactgggtagcgcggcaagtccagtcgctaggccatgaagccaggctgatctcccctcaattcgtcaaacctttcaggcagggcaacaagaacgactttgcggacgcgcaggccatctgcgaagcagcttcacgcccgagcatgcgcttcgtgagcccgcacaacgaggcccagcaggtcatttcggctttgcatcgggttcgcgagggcctggttcgggagcgaaccggcacgatcaaccagattcatgcgttcctgctcgaattcggcatcagcttgcccaggggcatggcggtaatccggcggttaccggtggtgctggcaaccgagtcattgccgccgcgcctgattgcgctgctcgaacgcttgcacgtccacttcaagtacctggacgagcaaatcgcccagatcgagcgcgaactgctatcccagttgcatgaggacgagcgcagcgaacggctgctggagattcccggtatcggcccgatgacggcgagcgtgttgatgtcggaactcggcgatgcgcgtcaatacggatcggctcgccaatttgcagcctcgatcggactggtcccgcgccaatacagcaccggcggcaagcccaccctgttgggtatcagcaagcgcggggacaagaatttgcgacgactgctggtgcaatgtgcccgcgccatcatgcaaggtatcgagcggcgaaccgatctgctgggagtgtgggttcaaggcctgctgactcgtcgacactcgaatgtagtggcgtgcgccttggccaataaattggcgaggatcgcctgggccatcctcgccaaaggaacacgctatcgaagtgaacgggctgttcccgcagcctgacgcttcccactgcttaccgcttcagtttcacggaggcactacctggttttgcgacgcgagatacgtgaagacataaacggctcaacggccgggcaaacaccctgacatgaaaaacagcacctcgatgctgcgcccttttttaagggttgcccggcgcgactctcatcatggggcgggatctttcccatccacgaccccggatagattcgagcaagtccactttatgccaacaccgcctcgcttgcaaaaatcgggctgaccataga

SEQ ID NO: 8699 - DNA, 1610 bp, unidentified
  source 1..1610: mol_type = unassigned DNA; note = element_da60a3e
  misc_feature 1..2: note = core
  misc_feature 3..281: note = LE
  misc_feature 282..1493: note = CDS
  misc_feature 1494..1610: note = RE
  misc_feature 14..301: note = bridgeRNA
ctactataataaatttatgggtaagttacacggcagccagccgtgttcgtatccatcttgttgctgaaactgctataatgggagtgcaaggtctgacgtattcctccttggactttcgtccgcaatttagtccgtcagccagcctctcattatgcagtcgttcgatttatgcaggttgaactgtccttccgacacgtccgtatcacaccacagtagatagaataagcaatgagaaaaggctggtttaccattgcaaaaatctattttaggagttgatgaaaatgaacgctgtcggtatcgacatttccaagggcaaaagcatggttgccatcgcccgcccgtttggtgagattgtttccaaaccctttgaggttcgtcatacctcagacgacattgccgcactgaccaaatatctgcacaccttagacggtgatacacgcattgtgatggaacacacaggcagatactacgaaccgatggctcggcagcttgcgggtgctgacttctttgtgagcgccgtaaatccaaaactgattaaggattacggcaacaactcgcttcgcaaggtgaaaaccgacaaagccgacgcacttaaaattgcccgttatgcgcttgacaactggcaggatttgtgccaatatacaagcatggatacttcacggaatcaattaaaaacgctgaaccaacaattcgctttctacaccaagcagaaaacagcgtcaaaaaacaatcttatcgccttgcttgatatgacctaccccggcgtaaatactctttttgacagcccggcacgagatgacggctctcaaaagtgggttgactttgccgagtctttttggcatgtggattgcgtccgcagcattgggcttacagctttcacagaacgttaccgcaaatggtgcaaacgccacggctacaattttcaaccgcacaagccgcaggaaatctattgcgctgcaaagaatctgattgccgtattcccaaaagacgctatgacgaaatctctcatcaaacaagcaatccttcagcttaacactgtttctcaaacagttgaacatctcagagccgaaatgaatcatcttgcatctcaactgccggaataccctgttgttatggcaatgtatggcgtaggtgaatccctggggcctcaactgatggccgaaatcggggatatttcccgttttcacaggcgtgaaaacctcacagcctttgccggtgttgaccccggcgccaatcaatcaggtacatacgaagcacagagcgtacgcacctccaagcgcggttctccaagacttcgcaaaacactgtttcaaattatggattgcttagtgcgtacaaagccgcagaatgacgctgtctatcgttttattgataaaaagcgttccgagggcaagccgtatttcgtttacatgaccgccggcgccaacaagtttttgcgcatttactacggcagagtaaaagaatatctggcttccataaccgaaacgaaatagtttactttatcccatttttgaccggcgcttttgcggtggtctttttggtttgctctttttcctgcataaatcttttttcattttttcctaaaaaatacttgactttttatttgcagg

SEQ ID NO: 8700 - DNA, 1572 bp, unidentified
  source 1..1572: mol_type = unassigned DNA; note = element_da65e0c
  misc_feature 1..2: note = core
  misc_feature 3..276: note = LE
  misc_feature 277..1443: note = CDS
  misc_feature 1444..1572: note = RE
  misc_feature 3..250: note = bridgeRNA
cttgtatgatgtttatagaaacaaaaacaccatatttcctttctttttgatatcgtggtttaatacaactcagatactgtggacttttgatttttctctgtagccttgactactcaacaggagtgtattgccgctacctttatctgaattgtttattagctggatgttgccgggagattctcctcccattgagtacttatttcaatcaagtctacgatgataatcgctggtggatatcacggtatcagactatttttgaaagggaggtatttcctcatgatttatgttggtattgatgtagctaaacaaggccatttcgcatctctcatctcttctgatggcgaaatccttgttgggccgttccaattctcaaacgacggtgatggcttccagtatctcgtttccgccttcgaaccattcgacgacgaagagatcatcatcggtcttgaatcaacggctcattatgccgacaacctgatccgctaccttgttacggagggctacaacgtttgtgtccttaatcccatctctacttcttccatgcggaaaaataacatccgcaaaacgaagacagataagattgacacttacatcattgcccaaactcttatgatgcagaaatcctatcggttcgttacctttgaagatcttgatctgatgaacctcaaagaactggggcgtttccgtcagaaaacgatcaaacagcgaaccaggcttaagatccagcttacttcctatctggatcagatctttccggaacttcagtactttttcaaatccggcctgcatcagaaatctgtctatgcgctcctgaaagaagcgccgacagctaaagccattgcttccatgcatctgacccatcttgctgctctccttacaaagacttcccacggtcatttcaaaaaggaacaggcggcagaattaagagttctggcacgaaagtcggtcggtcaatccgaccagacgctgtccatccaggtcacttccgtaattgctcagattgaacttctggatgaacagattgctcgagtggaggctgaaatgacagagattatgcgctttaacgattctgtcatcatgaccattcccggcatcggttacctcaatggcgggatgatccttggcgagattggtgacattcaccggttctccactcccaaaaaactgcttgcatttgccggtctggatccgtctgtatatcaatctggtaatttcaatgccagacgcacacgaatgtccaaacgcggctccaggatcttaagatatgccctgatgaatgcagctcataatgtcgttaagaacaacgccacctttaaagcttactatgataagaagatggcggaaggccggactcattacaatgccctggggcattgtgccggcatacttgtcagagtcatctggaagatgctgactgacgaagtagaatttaacctcgattaagaggtctgtataccaatatcgatagattttgaaaagccccctaagggagctttattaaagttacccttttttaccatcgataatgaaaagaaatttttgctaattcatacttgacttttcatagctggt

SEQ ID NO: 8701 - DNA, 1154 bp, unidentified
  source 1..1154: mol_type = unassigned DNA; note = element_da675e0
  misc_feature 1..2: note = core
  misc_feature 3..206: note = LE
  misc_feature 207..1142: note = CDS
  misc_feature 1143..1154: note = RE
  misc_feature 12..212: note = bridgeRNA
cttgtcttatgctgatcccggctcttgtgcgaagagagagccagcgcgcgccacgccatttatggcgcgcgctggcggtggctggatcgtcacgggcttggtcgtgagggaccgttttagagtgtgatcagccatcgtcttcgcctgaggcctgaacggatacagagcggcgtgaagccctctacgacaagcataggacagcgaagatgaacaaggataccatcggaatagacatctcgaaagacacgctcgatacgcatcgcctgagcaccggcgcggcagcgcgcttcgccaactcagccgctggcttgcgcgcgctgcggcgctggatcggggcgcaaatgccggacctggtggtctatgaggcgaccggtgcttaccacgctgctctcgaacgcagctttgcaggtgttctgccgttggtgaaggtgaacccgctacaggcgcgccgcttcgcgcaggcccgcgggacaagggccaagaccgacgccgttgatgcgcgtgtcctggccgtgttgggatcggcgctcgatcttgcgccggatgtgccagcaggcaagaatcaacacgacctcaaggagttgcagatcgcccgcatggcgctgatcaaggagcgcacgcgactgctgaaccgttcgaaaacacagtccttggccctgctcaaacgccagtccaaggcccgacttgagcaaatcaagcgccaactcactgagctggaagcggcgctgcttgatctcacacgccagtgcccgaaacgggcgcgtgcctttgacattctctgctcaatcccggggctgggcccggtcactgcggtcgcgatccttgtcgagtgcccggaaatcggcaccctgacacgcaagcagatcgccagcctcgcaggtctggcaccaatgacccgacaatccggccagtggcgtggcaccgcattcatccagggcggacgtaaattcctgcgcgatgcgctgtacatgcccgcgctcgtcgccgcccgttataacccggatctgcgacagagataccagaccatgatccaagccggaaagcctgcgaaagtcgccctgacagcgctcatgcgaaagatgatcgaactggcaaacgcactcgtccagcaaaaccgcaaatggacaccgaaaacagcttgatcaagacggata

SEQ ID NO: 8702 - DNA, 1625 bp, unidentified
  source 1..1625: mol_type = unassigned DNA; note = element_da681fb
  misc_feature 1..3: note = core
  misc_feature 4..258: note = LE
  misc_feature 259..1494: note = CDS
  misc_feature 1495..1625: note = RE
  misc_feature 8..234: note = bridgeRNA
gttcgtattataaggttaaccagataagaaaatatttctggttgacctttttttatatggtcttattatagcagtagccagggtagaacgtccgcccccgtgggacttagatcccgtcaactaaaccgttcaccccctactggtagaaacatgtttgaggctggttgggacttagatctcgtataacaagcgaagctatgatactactaggaggaattaggggttactggcaagttaaaaatgaggaggagatttagaatgaatccagtcgttggtctggatgtgtcaaaaggagaaagtgaagttcaggcgtttttagataaggggaaaccctatcataaaagctttagtatcaaacatgaccttgatgggctaggatcattacttgagtatctggaaggtctaaaagctaaaacaggtatacaaccttcggtggttttagaagctactggacattaccatgcaccagtggtccagtttctagaggaacatcagtatttattaatcattgttaatcctttgatttcccatagagccaaaagctctagtttacgaaaagttaagaccgatgccattgatgcctatcgtctttgtgagctttactacaaagaggatttagagccatataagaagcgtggcattcaactcttgaaccttcgtaatcttacaaggcaacatgagaatattactggattgtatgtgcaaactaaactacaatttcaagcagtgcttgttcaagtatttcctgaatacactggggtttttggtgacttatattctgttgtgtctctgcttgttttaaaagaatatcctgcatcagaagatatttcagctgttactgagaacgcattgactaatagaattaaggaattatgtaaaagtcgttcaataaaatgggcagaagaaaaagctcaaagactaaaacaagcagcagttcggaatccatttcaaaagacactttatcagagtcatttactgagtctaagtatgtatattaatatgcttcttcaatacaaaaagcatctatcagagttggagactgagatagatactctcgcaaaagaaattgaagaatataagattatccaatctatcccaggtataggagaaaaaatcgcggcaacgatcatttccgaaattggggaaatagatcggtttaatcacccaaaaaaacttgtcgcatttgctggagttgatccagaggtatttgagtcagataaattcaaagccactctcgttcgcattacaaaacgaggatcaagtaggttgcggcacgccctatatatggctgttcgttctggtattcgtgattgccgtaaacaaaaaacaactgatgagatcatccctagaaacaagaaattaagggagttttacgacaaaaaacgaaatgaaggtaaattatttaaggtagccgtcattgcttgtgtaaataagcttttacactggatctatgcccttttaaaaaacagaaccactttccaagatatagcctaattaagaaccctaactaaacaaggtaaaaccttccaatcattagggagtggaaggttatttggtatgcccattttagtatagcatgaaagattttaagtttttattgaaaaatattgacaaactattagctg

SEQ ID NO: 8703 - DNA, 1599 bp, unidentified
  source 1..1599: mol_type = unassigned DNA; note = element_da6e654
  misc_feature 1..4: note = core
  misc_feature 5..274: note = LE
  misc_feature 275..1480: note = CDS
  misc_feature 1481..1599: note = RE
  misc_feature 26..294: note = bridgeRNA
ttttagtaccataaaagtgtagtagttagagagtaattaactctgacatctacacttgttttattataataggggaagcagttggtatggcataggcttttttggattcctaacatccgtcaataaaaccgtcaaccaaccccttattataaatattcgcttaggcaggttgatactccgtgtgagctttcgtgtaacgaactaaactgaatcgtaataagtgtggatggttttactgattgctaataaaaaattaccagggcaggaggttattatgatcagcgtaggaattgatgtggcaaaagggaaaagtacggtatgtatactgaaaccttatggggagattgtcagcaaaccgttcgatatctcacatgtagaaaaggatttgggggaacttgccgccatgcttctgagatttgatgacgaagtgaaagttgttatggaggcaacgggcatctatcatctcccagttcttacatatttacaggaaaaggggctgtttgtagccgtcatcaacccatacttaatgaaagtataccgtagcggagatcttagaaaagcaaagacagacaagatagattccaggattattgctaattacggcattgagcactggtttacgatggcagagttcaaagcatcggatgatgtgtatggagaacttaagatgctgggacagcaatacagacactatatgaaactgcatatcatgtccctgcatgaattgacgcatttgctggattatacaatgcctggaatcaagggcatgcttgcaagttggaatgaaggaaaccgaaaggataaactgagtgattttgttgaacggttttggcattatgataccatcacatgccttagtgaaacagaatttataaagcagtacacgttctgggcaaaagaaaagaaataccatcagagccaggacaaggcacaagccatatatgccctggcccgtgaaggcattcctaccttatcttcagaaaccccatccgtcaaaatgctggtaactgaagcggtccgagtgctcaaagaagttgatgcaactctaagtataattttatcacgaatgcaggaattagcaaagagcctgccggaatattccgttgtgagggggatgggaggcgtgggagaagttctggcgccaaagctaattgcagaaattggtgatgtcaggaggttccatagcggaaaggctttaatagcatatgcgggaatagatactccgccgtatgaatcggggcaatttgctggttctaatcgaaagataactaaacgtggatcggcggctttacgtaaagttggctatgaaaccatgagatgtataaaatcgcacccaagaccagatgatccagtttaccagtatatagtcaaaaaagaagctgaaggcaaggcaaaaaaagctgctaaaatagcagggctgaataagtttctcagaatatattacgcacgagttaaagaagtctatacggatataaaataaatatcaaaatgaaagactgcaaaaaggctacctaaatgacagtctatttgttgtgcctaattttataaaagaaaaatattttaaaaacctgcaaaaaaatattgacttttcttagcagg

SEQ ID NO: 8704 - DNA, 1447 bp, unidentified
  source 1..1447: mol_type = unassigned DNA; note = element_da70a9a
  misc_feature 1: note = core
  misc_feature 2..230: note = LE
  misc_feature 231..1262: note = CDS
  misc_feature 1263..1447: note = RE
  misc_feature 14..239: note = bridgeRNA
ctgcttgagactgtcactggcgttgcgggtgttcccgtagcgtcgcgaggtctcggtcgggtcgctcacgaagtgcctgccggctcgggtttccgggtctggctttcgaacgaagagcgtccgttcgggatctcgccgcggggtggctcgagagaggaacgagcacaacgatccgaaagtaggagtgccctccgcggttccccaacccacgagaacccatggaggaactcatgcaagtgatcatcggtgtcgacccgcacaaggcgacacatactgcggttgcgctcagcgacggcgaggacgagctggctcgcaagaaggtgcgggcgacacgggtgcaggtgccccagctgctcggctgggccgaaccgttcccgacgcgcaggtgggcgatcgagggtgccgacgggctcggcttcctgctcgcccaacagctcgtcgccgccggcgaacacgtcgtcaacgtgccggccacgttggcggcccgcacccgtctgctgggtaccggccggtcgaacaagaatgaccccaacgacgctctctcggtggccgtcacggcgttgcgcacacgcgggctgcgacgagtcgaggcggtcggccacagcgaggtgctgcggctgttggccaagcgcaacaccgacctcggcgaccaacgatgccggctggtgtcacggctccacgcgctgctggtggagctcgcaccgggcgggatcgccaaggaaatcaacgcttctgacgtcgacgccttcttggcccagatcaccccggcgactccggtcgagcagctccgctacgacctcgccggcgaactcctcgacgacatccgtcgcctcgacacccaactgaaggcatcccacaaacgggtccgtgtcgccgtgcaagcctcggccaccacggtcaccgacctgttcggcgtcggcccgatcatcgccgccatgctcatcggctacagcggcgacatcggtcgcttcgccaaccgcgatcactacgccgcctacaacgggaccgcacccgtcgagttctcctccggcggccgaatcgttcaccggctgtcacagcgcggcaaccgcaaactcaaccacgccatccacatggcggcgatctgccagctgcgccaaccacactgcgagggccgcgcctacttcgagcgacgagtcgccgacggcaagacgaacaaggaggcgatcagatcgttgaagcgacacatcagcaacgccgtctaccggcaacttgccactgacgcccgccgcgccacccgctgaccaaggatccgggaggacacgcgggagcgtctccaagccagcgcggccgaccctacatccctaacggtcggctcttcggcgaagtcactcccggacccaccccccaaactacgacagccgacgacgtcggcccacctgacgcgcccgcgagccgttcaaagagcccccttgacacagagaggatt

SEQ ID NO: 8705 - DNA, 1467 bp, unidentified
  source 1..1467: mol_type = unassigned DNA; note = element_da7183a
  misc_feature 1..3: note = core
  misc_feature 4..224: note = LE
  misc_feature 225..1448: note = CDS
  misc_feature 1449..1467: note = RE
  misc_feature 7..221: note = bridgeRNA
tctaatggtgcacgacatcgccacttttgtgaagatgtcaccgaaccgctgatcggtgagcgctagcacattctgaacgacgagttctagtcggagagcgcgccccgatcggttggtgaggtcgacggagaaggctggaggggtgtcgtgccatgagcactggtccattagatcgccaccgttgcctcgaggttcatttaactcaactagcgggaggtgaccagatgatttttgtgggagtggattgggccgaggtccaccacgacgtgtgcatcatggacgcggacggacaagtcctcgagaggaagcggatctcggactcgttgactggtctgagcgagctgcacgctctcgtggccgatcacctcggtgagaacgacgagccgagcgacgtcattgtcggcattgagaaggaccgcggattgatcgtgatgtccctactcgccgcgaattaccagatctttgcggtcaatccgattgccgccgcccgctaccgcgagcgtcacgtcacctcgggagccaagtccgatcccggtgacgccaaggtgctggctgacctcgtgcgcaccgaccggcacaatcaccgcgcggtcgccggcgacagcacgctgagcgaggcgatcaagctgttgtcgcgagtgcaccaaaacaccatctggaaccgccaacgccaggtgaattcgcttcgttcagcgctgaaggactactaccccggggccctggaggcctttggaacggacctttgcggccaggacgccgtggcgattcttgccattgctcccaccccgtcgctcggacgcaccttgtcacgggcgaagatcacgagcgccttacgcaaggtcggtcggagtcgacacctcgaagagcgcaccgagcggatctatcaggccctgcgccaagagcagctgcgccagccggccgtcttggagaccgcctacggcgtcgcgaccgagacggcgatcgcgaacatcgtgcagttcaacgcgtcgctcgtgaagttggaggcgtcgctgtcggagcattttgagcagcacccgagcgccaaggtcatcctctctcttccaggaatggggacggtcctcggtgctcgggtgctgggcgagttcggagatgatccgaaccgttacagcgatgccaagtctcgcaggaattacgccggcacgtcgccgatcacgagggcgtcaggccgatcgcgagtggtgctcgcgcgtcatagccgcaacaagcgcttagcgggggcgcttgaccaatgggcgttcagttcactgttgccctcgccgggggctcgggcctactacgacgaactgaaagcacgtgacaagcaccaccgaaaggctattcgtcagctggccaacaagtgggtcgggatcctgcacgcgtgcctcgaaagtggcactccctacgacgaacagatcgcgtggtcaccgcgcgaacaacgagtcgcttgacatttacgaccaaggggtg

SEQ ID NO: 8706 - DNA, 1431 bp, unidentified
  source 1..1431: mol_type = unassigned DNA; note = element_da72ed3
  misc_feature 1: note = core
  misc_feature 2..134: note = LE
  misc_feature 135..1154: note = CDS
  misc_feature 1155..1431: note = RE
  misc_feature 1191..1428: note = bridgeRNA
atggtatggacgcctctcacttcgaaggggaggtaagtaggtgagcttgagaagcaagtggaccctccgggccgacggcatcaaagtgcctgaggtggaagggttcaatcttcacaggcaccggagggtccgacatgaaggctatcgtaattggagtggatatcgcaaagcgtgtgtttcagctgcattgggtggagaccgagacgggcgagattgtggcgctgcagcttaagcgggagaagtttttggagcattttgctaatcgctcgacctgtgtgatcggcatggaagcgtgcggcggctcgcagcactgggcgcgctcgctgcagaagcttggtcacgaggtcaagttgatgtccggacggatggtcaagccgtttgtggtcgggaacaagaacgatgcggccgatgcgcacgggatctggatggcggtccagcaaccggggatcaaggcggtggcggtcaagagcgaagagcagcaagcggtgttggcgttgcatcggatgcgcgagcaattggtgaagtttcgcacttcgcagatcaacggcttaaggggattgctcacggagtacggcgaggtgatgccgttgggccgagcagggatcaagcgagatatcgccggggcattgggtcgattgtccgatcggttaccggcgatcgtgattgagacattgcgcgaacagtatgcccgcttaagcgcgctcgatgaacaaattaggcagatcgagaggcgtctacggcaatggcagaaccaggactcggcgacccagcgcattgcggcgatccccggcgtggggctactgagtgcgaccgcggcggtggcgacgatgggcgatccgaaagcctttaagtcaggtcgagagtttgcggcctggcttggattagtgccgcggcaaaccggcaccggcggacgagtgcgattgctcggcatcagcaagcgcggagacaaatatctacgcacgctgctgatccacggtgctcgcgctgtgctgacgcacagtaaatcgccgcccgagtggttgagcgaactagttaaacggcgaccaaagaacgtggccgtcgtggcgatggcgaacaagatggcacgcacgatctgggcgctcatggcctatgaacgggcgtaccaatccgggtacgtgagtcggcctgcgtaacgctgcactcacgattgattagctgttaacagaggaaggcacgctaaaaggttgcgcaaggactacaacgtgtgatgggaaacaggtcagaccgtgacccgccaagcctgagtggtgtggcgagcttcgagctcttaggagaaatgaggcgcgggtcagcgaaatccatcagggcccgcaggcttcggtctgcaaaacaggccggatataaacctgcaaccttatctgtatgtcatcacactgagaaagtacttgcacatcgggaggcgtccatata

SEQ ID NO: 8707 - DNA, 1139 bp, unidentified
  source 1..1139: mol_type = unassigned DNA; note = element_da7e9dc
  misc_feature 1..2: note = core
  misc_feature 3..167: note = LE
  misc_feature 168..1124: note = CDS
  misc_feature 1125..1139: note = RE
  misc_feature 17..182: note = bridgeRNA
cttgtatctttaagtctgcggtttcggaccggctcacgtagcccgttcctcctctgggaaaccaagcccgcgagtgagcactgggcgcgtgagtcggaccgttcttccgtaagcccgaacggttgtcggaataaagttcgcataaacaaggacgggagtggaagaacatgcccgaagcagtgttcatcggtatcgatgtttcgcgcgacacgctggaaattggcagcagcacggcgagttcgacctggcaatacgccaacgatagtgacggcattgaagcgatgacggccgaactggcgaagctggctccagcactcgtcgtactcgaagccacgggcggctacgaattcgaggcggcgtgtgccttgcaggctgcgggactgtcggtggccgtggtcaatccccgtcaggcgcgcgactttgctcgtgccatgggcacgttggcgaagacggacagcctcgatgcgcggatgttggctgcgtttgcccgcgtgttgcaccagcatccgcagcgcgagcgctttatcaagcagttgcccgacgcgcaattgcagcgcttgcacgcgctcgtgttgcgtcgcaggcagctggttacgatgccgacggctgaacgggcacgcctgacgatggcgcatgcaagtgcgcgtccaagcatcgagcaaaccatcaagttcctcaagtcgcagatcgacgatgtcgaacacgattgcgccgatcatgtgcgcgctcaccacgccgaattggcccaggcgctgtccagcgtcaaaggcattggccctgcgactgtcgctacgctgctggccgaattgcctgaactgggttcgttgtgtcgtcggcgaatcgccgcgctggtaggcgtggctcccctgaatcgggattcgggccagatgcgtggccaacgctccatctggggtggccgcaccgaggtccgacgagcgttgtacatgactacgctcgtcgcagtgcgccacaacacggtcttcaaaagcttttatgcgcgcttgacggccctgggcaagcccaaaaaggttgccctcgttgccgcgatgcgcaagctcttgaccatcctgaatgccatggccaaatcgggctcgcatcggaatgactccattcaattggcttgacatgaaagaaggttg

SEQ ID NO: 8708 - DNA, 1490 bp, unidentified
  source 1..1490: mol_type = unassigned DNA; note = element_da7ebdc
  misc_feature 1..2: note = core
  misc_feature 3..246: note = LE
  misc_feature 247..1470: note = CDS
  misc_feature 1471..1490: note = RE
  misc_feature 7..243: note = bridgeRNA
ctaatgagagttaccgagccggtcgtgagacagactcggtgccgtagccgccagcaggtgagcactgtccctccctggacttgcttgcagtccttctgacagatcgtgcccctgctggttggccgggagagttgatcgctgatgggatgtcgtgcccacccggtggtggtgtgagcactcgttcattaggccgctgatggttctcccgcaggctgctgatcgtcggactcgagagcgggagaagctgtgcggttgttgatcggagacgattggtccgaggagcaccacgatgtcgaggtgatggatacatccgggcgtcggcttgccaaggcgcgactgcctgagggtgtgaagggcatggcccggttgcacgcgatgatcggtgagcagctcggtgacgacgccgaggacgccgaggtgctggtcgggatcgagaccgaccgcggcccatgggtgcaagcgttgatcgccgccgggtatcgggtgttcgcggtcaatccgctgcaagcggcccggtatcgggaccggctgagcgtgtcgggtgctaagagcgacggagctgacgcccacttgttggccgatatggtgcgcaccgattcccaccagttgcggatggtcgctggcgacaccgcgcaggccgaggcgatcaaggtggtgacccggacacacaagacgctgatctgggagcgaacccgccacacccagcgactgcgacacgcattgcgtgactacttccccgccgcactggccgcgtttgaagacttggacgcacccgacaccctggagttgctgggcaaggccgcgaccccggcgtcagcggcgaagctgagcatcggccagatcagcgcggcgctcaaacgcgcacgccgcagaaacgtggccgccaaggccgccatcatccaggccgcgctgcgcgccgagcaccttggtcagcctgacgtggtcgccctggcctatgccgcctcggtccgcgcactgatcgcggtcctgtccacactcaacgagcaggtcacagccctgcaagagcaggtggagacacattttgggacgcacccggacgctgagatcgtgttgtcccagccggggctggggccgatcctcggtgcccgggtgctcgcagagttcggcgacgacccacaccgctacccccacgcgaagtcccgcaaaaactatgccgggaccagcccgatcacccgagcgtcgggcaaaaagaaggtcgtgctggcccggttcgtgcacaacgaccggctcatcgacgcactcggctcccaagccttcgccgcgctcaccgcctcacctggcgcccgggcctactacgaccagctcaaagcccgggaggtcagccaccgagcagcgctgcgacaactcgccaaccggctcgtagggatcctgcacggctgcctcaagaccggcaccctctacgacgaagcaaccgcctggtctcaccgcaccgacaccctcgcggcttgacatttaagcgcctgggatgt

SEQ ID NO: 8709 - DNA, 1381 bp, unidentified
  source 1..1381: mol_type = unassigned DNA; note = element_da84bf5
  misc_feature 1: note = core
  misc_feature 2..72: note = LE
  misc_feature 73..1107: note = CDS
  misc_feature 1108..1381: note = RE
  misc_feature 1139..1376: note = bridgeRNA
caatggtatggaccccgcccgccatcgggcgcaggcttgacaactccgaaacggacaagaaggaggattgccatgtcggtcgttcggattggtctcgatcttgccaagtacgtcttcgaggttcacggcgtggacattcacggcaagatcgtcttgcgcaggcggttgagacgagatgcggtctccacgttctttgctaacctgccaaagtgcctgattggtatggaagcttcgaatggcgcgcattattgggcgagaacgttgaaagcgctggggcatgaggttcggctcatcagtccgcaatttgtaaagccgtatgtcaaatcgaataaaaatgatcaaaacgatgcggaagcgatctgcgaggccattagtcgaccatcgatgcgctttgtcccgccgaagtccgccgatcagctgacgatgcaggccgtccatcggatccgccagcggctcattggtgatcgagtgcggctcgtcaatcagatcagaggtttgctttctgagcatggcattgttgttgctcgcgacatcgcgcagcttcgtaggcgcctggcggaaatcgttggtgatagcgccgaggaactctgtgacctgctccggtcgctgatgcgggaattatatgcggaactgacggaactggacgctcgaatcaagtcgttcgatctccggctacgcgagatcttccgcggtagcgaacaatgccagcgccttgcgaaaatcgagggtattggaccggtcacagcaacagccctgattgcagcagttggcgatcgatcatcgttcaaaaatggaaggcagtttgcggcctggctgggtttggtgcccagacagcaatcaagtggcggtcgtcagcgtttgtttgggatcagcaaacgaggagatcgttatctacgcacattgctgatccatggtgctcgagcggccttggctcgagctggcggcaaacaagatccgcgcagcgtttggctcggcaagcttcgtctccggcgtcatcctaatgttgccgccgtcgcactcgccaataagaacgctcgcatcgtctgggccatgctgtcgggaaacgaggattatgagatgcagcgatccgtgggaagcgctgcctgacgagagcatatcaaaatggagatacatgcctgacaattgcagcaaacggcaggagatggaaaacggtcactcccgtcgcttctcaaacctgatgtgtggaccggcatggcgttgtgccaatgtcttgggggcattgaggtggaagcgagcgaaaacccatcgaggctcgcagtggcgaatatcgcgctgcatcaagaagccgaatatacgtccgcagttgtgacctgatatccaaagtttgccagacctgttgcaatcgggcggggtccatata

SEQ ID NO: 8710 - DNA, 1248 bp, unidentified
  source 1..1248: mol_type = unassigned DNA; note = element_da88f47
  misc_feature 1..3: note = core
  misc_feature 4..213: note = LE
  misc_feature 214..1146: note = CDS
  misc_feature 1147..1248: note = RE
  misc_feature 15..196: note = bridgeRNA
gcttgtgtcttgaaccagacttaaactgaaggtgagagcggtgagtgacaagctgaatgcccgaagtgcttaaagcacgtgtgggagcccatgctgtcactcacctctccactctggtcattgagcccgaacagttgaacgagcccacctcgaacagttacaagcgtgggccaagccagagcgctctcaccttgagtgtaagaggatttggctatgttttcctatccagcaggtattgatgtctccagcggtagcctcgagattcgggttgatcaactggatgtagcgatgagttgttctaattcgcagagtgattttcctgggttaattggatggctaaccctgcatcgcgtgggtcgagtgctgctggaggccactggcggttacgagcgcaaagtcatgaaagcgcttcaagccgcgggctttgaagtcattcggatcaacccttgccgagccaaaagctttgcccgggctatggggcaacaagccaaaaccgatccgatagatgcacgccttcttgcgcagttcgcagcggtcatcaaatcgcccgatagccgggttaccagcgccgagcaggatgatttgcgcgccctggtccaacagcgagagcactttgttcagcaaagagatgacgacaaacggcggcttaaaacgacctcctctgacgtggtcaagcctgcgctgcagagtcatatcgactatttgcaaaaagtgctgaaggagctggaaagcctgatccgccaaagtgcagaacgtctggatcgtaaaaaagtagcccttctgtgctcagtcaaaggcataggacttgttacagcggccagcttgatgtcctatcttccggagctaggcgaggtgggtagacatcagattgcagcattgagcggcactgcgccctacaacgacgatagcggcaagcacaaaggcaagcgtcatatcagcggcggcaggttcgccgcgaggcgctcactgtatatggcctgttggtcagtgatccggtttcaacctgagtttgccgcgcgatataaggcgctgcgcgagaaaggaaaatgcgccaaagtggcactcatcgcgtgtatgcgtgttttgctggtacgcctaaacgcaatgatccgtgatggatctgaatggaaagagcacgccgcctaaaatcctgcggtagctattacctaaagcagttacacggagtacagccgtgggagcgttgccgcctctggaaaaaatggcttgatgaaaaccatcaagacagtt

SEQ ID NO: 8711 - DNA, 1215 bp, unidentified
  source 1..1215: mol_type = unassigned DNA; note = element_da9767d
  misc_feature 1..2: note = core
  misc_feature 3..228: note = LE
  misc_feature 229..1200: note = CDS
  misc_feature 1201..1215: note = RE
  misc_feature 6..202: note = bridgeRNA
cttgtatctcgaccatcgcctctttgtggggctatggttcccgactgatcatcgggggaggagttgcaagccgtgtccacccttaagccccgagcttgcgtcgtagatagcgctgcgctcctccacactcatccggcaagtccgaacggtatccagagcttcgagctcgcatcagcaaggttggacaggatgatgtgatgatcggtgaaactctgaggaggaaagatcatgaccgcggtagtgggtgttgatatcgccaagcgcaccttcgatctggcaatcttgcagcctaacggcaagcacagaaccaaaagcaaactaggcaatgatacggctggctttgcggtctttgctgactggctgcaacgccatgctgagccgggtgcctgggtcgtgatggaggccacgggcatttaccacgaggcccttgccgagcacttccatggcctgggttaccggattgcggtgctcaatccggcgcagatcgcccgttatgcgcagagccaactgcagcgcagcaaaacggacgaactcgacgccaagctgatcgccacctatggccaactacacgtcgatcacctgcgtgcctggcagccggagcccatgtccgtacgtcagttgcgcgcactgacccggcgcctggaggatcttcagtcgcttcggcaaatggagctcaaccgactcgacgttagcccgaccaatgtccaggactcaatccaagccgtcctgcaaaggctcgatgaacagatcgcctggacaattgagcagatcaaacgccatatcgacgatgatccggatctgcgcggcaaacgcgatttactggtgagcatcgatggcatcgccgagaagaccgcagccctgatactggccgaactcggccatatccaacgtttcgccgatgcacgcgcggtcacagccttcgccggtctggatccacggctgcaggaatctggagtataccgtggccacaccagcatctcgcgcacaggctctgccagacttaggactgcgctgtatctgccggccgtcacagcactcacctataaccccgccattaaggcacaagctgagcgtctgagagccaaaggcaagaaaggtaaacaaaccgtctgtgccgcgatgcgcaagctactgggcatcgcttacggcgtactgaagtcgggcaagccttttgatcccgttttggcgattgcacggtagggccgaagacggtat

SEQ ID NO: 8712 - DNA, 1431 bp, unidentified
  source 1..1431: mol_type = unassigned DNA; note = element_da9c8c9
  misc_feature 1..2: note = core
  misc_feature 3..124: note = LE
  misc_feature 125..1159: note = CDS
  misc_feature 1160..1431: note = RE
  misc_feature 1192..1384: note = bridgeRNA
agatggggtactcggccggcgttgttgtggatacgcgaagaaatttgggtgctgcgcttcaggctgatggtgaaacgaggtcaccgcggatacgggcctcaggcatcagaaggagaagcgcagcatggagcattttgctggattggatgtatcggtcaaggaaacgagcgtctgtattgttgacgaggccggcaggatcacccgcgaagtgaaggtagcgagcacgcctgaggctttaatgcaggtgctcagggcgccagcctatcacttgaagcgggttggattggaagcgggaccgttgtcgcaatggctgttcggtgctctcgccgaagcgaacgtaccggtcatctgtgttgaaacgcggcacatgcgtgccgttctcaaggctcagatcaacaagaccgatcgcaacgatgcccgcggtatcgcacagatgatgcgagcggggctttatcggccagtccatgtgaagacattacgcagtcagaagctgcgaatgctgttgacgcatcgcaagctgctgcagtcgaaggccatcgccatcgagaatgatctgcgcgctactttgcgcaattttgggctcaaggttggtatggttgggacggctaagtttgaggctcggatcaaggagctggtcggggacgattccgatctggtcctcatggtcgagccgatgctgattgtccgacgggtactccgcgagcagctagccattctgcaccgccatctgctggcgctcgcccgtgacgatggggtgtgccgacggctgatgacagtccccggtgttggtcccgtggtggcgctgaccttccgcgctacagtcgacgtaccagcccgcttccagaactcgagggcggtcggggcggtgtttgggctcacaccttgcaagcatcaatccggggagagcgactacaccggcggtatatcaaaatgcggcgacgagatgatgcggatgatgctctacgaggcagcccagatagtgctgatccgcgcaacaaaatggtcttggctgaagagttgggcaatgcagatcgccaaacgccgtggcgtgaagaaagcgattgtggcgctggcgcgccggttggccgtgatcatgcaccgcatttggattgatggcaccgagttctgctggatccggcaagaggccgtagccgcatgataataggcaaccaaacgcgataggaaggaacacaagctccaccacatggtgggatgatgtccctcgcgggacgatggatgaggtgagatcgtatgtccgctaggttctgcctcggtaagaccgccccttagattggtccgcctcattctcggatcccataatggaagggcctcagtgccgattccgaagagaagcgcgagcccgtgagcgacaccgaccactgaagtggtggacagtttgaaagcgcttgacccaaaacggccgattagaga
